United States Patent Application Publication US 2011/0183924 A1 - sequence listing, part 24

SEQ ID NO: 58162 - DNA, 414 bp, Homo sapiens
acatgctgggttctgtgttagcttctagggataagtcagtgaagacatttattttaccaaatagctcatcatgtagtagagattacagacctgtaatcaagttacaattacagtatgaaaaggtctgtgaaggaataagtaccaggtataatgaaatcaaagggaatgcccctaactcatttctgtggcaggaggtgatcagagagggctttaaagaggaaggaatgtttaagatgagccctaaaaggtcatccagagttaattatgtgaaaagggaggaacaatatagacaaagtcctggggttgttgcacaaggttcagcatgactggaatgtagactgtgaagtgaaaaagtaatgacattaaagactgaattcacagagaggggctaaattattgactttgtaaacagtg

SEQ ID NO: 58163 - DNA, 150 bp, Homo sapiens
aaacaatacattcatatatcaaaattggccccaaattccttatcatcatcatcaacagtctagaaatgaaatgacacataatataaaactttcctgtttataactaaaagatttatgaaactgttttttataaatgcctttttttttttt

SEQ ID NO: 58164 - DNA, 291 bp, Homo sapiens
cacacacacacacacacacacatatatgtaatgctaccgtgtttgagggtcatgagggtcagttttttgaaataccagtttttttctgatttaggtggatgacatggtacgtgaagcttaaaaaaaaatttggtaaattggtatgaaaaaatgagaggacaacgtttttcctttctggtacttagcaggaaggcaagttcttgtatgaacccatatttcctgttacccattttcagaccaatattggtttctcatctatataatagggatcttttgactctaacctcttaa

SEQ ID NO: 58165 - DNA, 563 bp, Homo sapiens
gggaaaaaagggagtctggacacattgactgaaggtgaaataattctttgtgtttctttttcaaagaactgggacataaagtgggtgctgggcctttcatggtccttgcacttacatgtttgcctcagtgagtgagtagaaggaaatgagacaaaagcatccattgaatccacatataccaagcgtctacttagcacgtggtaaattgcctggcctggcccccactagatgttcaagaaatatttatgaaccaactacttttagctttgaccctgtactagtcactgatgacgcataagtaaataatataggtagtgcttgcactcaaacaactcatacattttaggtagttaaagggtgtgcaatggaatgctgttcataccccctccctttctcctgcttgtttgcagctctactaggaagtcataatttgtattgttgttgttaatgtcagaggatgcatttttaaatagaagagcaaatatgcctcttgtagcgggagaaagatcccatggcatttatttaggcaagtgggatttaacttcagaggcagctgatgttct

SEQ ID NO: 58166 - DNA, 718 bp, Homo sapiens
tctaatttggcgggggcgggaagggcggttctggaaggaaaatgagatggaagtgatgatgcaggcaacttaattaagagactgggcgcaaaacccaggtgtgtgtctgtgttggttttgtggtgtggaggcagcagggggagggaggaaacactcagttttcctgctaccaggtctagagaattgtatctcagttccctgtaggggtggggccctcccattccttcagggttgggccaggtcccctgggcccagggtcctttcattcacaaaggactgaaaatggagacagctgacattatctgaaggctgaacaatagccatagagctccactgcctggtatcatagcattgagccctgaacacctttcaacttggtaccattatcacaccctctgtggtaacccacaaagaatccaatcttcccctaattctcaacaagagcacaaggatgttacattgtactttgagggttaatagcatttatttatttgtttaacatacacatttaaaatatatcaatttctgtgtgtggttttttttttttttttttttgagatggagtcttgatctgtcgcccaggctggagtgcagtggcgccatctcggttcactgcaacctctgcctcccaggttcaagcgattctcccgccccagcctcctgaacaggtgggattacaggcgcccgccaccacacctggctaatttttatattttta

SEQ ID NO: 58167 - DNA, 758 bp, Homo sapiens
agctcaaattccatttgtacttaaggttacgtaacagctcatagtgtaatagctttggcccgtgtccagtgagcctgtagatattggcggctttgcgtgcttaaaaggcccccatcaatcagtcatgatgcctggtcctacacccagttgccatgtttgtttaagccggctttggaggttgtataaatagtgttagcaacctgctctcccacccttggtgataaatggcacctttaaaaatcctttggcacattcttaggatgcgaaggagtagaactggatccattgacatctttggtggttatcagcctccttctgcatatgttcttgtggcatctccaggagggaagtgtggagggtgcctggggcatccgtaccgccctggcttcttgggcctctgcagcctctgcctgtctgaatcagctagtggagtatcctgcctcgtggaaactggcaagggctgcacaggggctcccaaatgaaactgtgactcaggactggacaagcgaattcgagttcacacagaatggaaaggtgtactttttcccctttaaaaaaaaaaaacacaaagattgctacaacatgttggcattgattcatgcagtcactttttgttctgtacaaacagtggccttggggtagcaggaagagcaatgggcaaaggacacaacctcagtgcaaaagccctagctcccttggaccacagttgcatatctagaaaattaagaaataacttcctcttgttgtgaggttccggc

SEQ ID NO: 58168 - DNA, 272 bp, Homo sapiens
gtttgtgctacatggagcaggcttctctcttctttctctctccccaggttctatctcctcccaggagatcacagaggctctggcctcccctctctggcccatttattatggggtctgttttgtccatttgggccttcctgcgcagctgttgcataggcctcgtctccccagatggactgggcccttgcatgtgattggtccttgggcagataccttgtgatgtaaagcaggactcatgatttgtgtttctttcatgtggcccttggtgcttt

SEQ ID NO: 58169 - DNA, 576 bp, Homo sapiens
taaacaagtaaacacaccaaatattctacctagtcattccacccctacatgcttacccaagagaaataaaaacatgtccacagaaagattgtatgtgaatgttcatagctggtttatttgtcattttaattgcgaaaaaccagaaacagcacaaatttgcatcagcaggtgaatggataagcaagtggtaggatatctacacaaaggaatactacgcagcagtacaacagaatgaactactgatagacagaatgacatggacgaacctcaaaataatgccgaatgaaataaatctatcaaaaaagaatacatactgtatgattccattcacatacaattctagaagacacaaatctgaagtgacacaaatcagatcagtagttgtctggagataggaaagaggaaaaagagagggattccaaaggagtacaaggaaacgtcagagggtgatggatagatttattttttattgtagtgatggatttacaggtatatagacatgtcaaaactgtacattgtacaatttaaatatgtgtagtttattgtacatcaaccatacctcaataaaatagtaaa

SEQ ID NO: 58170 - DNA, 631 bp, Homo sapiens
agcgggtaataaggagtagcccctgtgaggtcaggtacacagtaaagagggtaaatagaatccttgggaacttctgtttcagtctgaggaatgcttggatttgtcaaaagaatggagctttgtaggaaacaggcacaaagacgcaaacccagggcttaacctgctagaaaatgcatggaatgtgaacacaagttaattatttcaaaatgtttttcagatgttatttaaatagtaatatatacattgatttttcataatttatcaaagcctgtggtacgcactgaattttctttgtcacatagttttgaatttcacagccttctgcattgcatacacttgaactggacatcaggggaagctgcttgagagttctcaattactttcttaaacagtgttttctgaaggcgtgtgtcatgatacaactgtgaattctaccttagggactctggttaaactattggtgaggagctcgagtggtttgtatagaccccagatttttgtttactttaatgtattccacaaaacccatcctggtttttgttagtttgttttgtttttaatctttttttttccttctctacttatttaaattgccactggaataaatgtgccttttgaagcaaagtccaaa

SEQ ID NO: 58171 - DNA, 418 bp, Homo sapiens
caaagtggagtacttggtggcagaaagtgtcagataaccaagtccagagtgttctgatcatgtaggtggaaaccactcatatttcttgtcacctgcctagacgaaaagaccagggttgtttatggacaaggtcagagtggaacttgtgatgcacagatggaagtttattgtgctttgtcttctatcatattggcatttgcacatctccagcttccatgtgcccctgtcagtctgtgggagtgaaatagttgcaaagtatttaatataagatgcctttctgttcagtcctggcagttatacagcttggttttttcacctggccaagtcagtccaggcttttgatctatctgtatgtaaccttcggtgtgtgcttgcttaatgagaggagcaggtgagctatgccagctcacacagggct

SEQ ID NO: 58172 - DNA, 373 bp, Homo sapiens
cgggatttcattatgttggccgggctggtctcgaactcctgacctcatgatccgcccgcctcggcctcccagggtgctgggattgcaggcgtgagccactgcgcccggcaaagctgagttttaaactgttccttccttcattcagacacttactgagccctagtaagaagccacccatgttctaggccaggggttgacaaactttctctaaagggtcagacagtgaatatgttagcctttataggccacatacagtctctatcactactaccaccaataataataataattctttctcattttctcattcctcttctccttctttacagctcttaaaaaatattaaaaaaaaaaacaaaacaaacaaaacaaa

SEQ ID NO: 58173 - DNA, 464 bp, Homo sapiens
  misc_feature (13)..(13): n is a, c, g, or t
  misc_feature (28)..(28): n is a, c, g, or t
  misc_feature (85)..(85): n is a, c, g, or t
aaaccaattggancactgccctcctcantgtttaaacaacctcctccccttgccaaaggcctgttgttatgtcctggggtaaganggaccatgggggggtcccctaagcatgccagccatgccacctgtccagagcatcctgtagcccacagccccggcagaggaaggtagggacccatgcgggggcaaaacacaacaaaaaccaaaccaacaaggaagtacaaagaacaatataaagaagagaagtccccagatggtagagagcagtcatatcttacccctagatgttcatcccagcagaagaaagaagaaggtgttggggtaggattcttcagaggttagcctggtactttctcatcagacactagcttgaagtaagaggagaattatgcttttctttgctttttctacaaacccttaaaaatcacttgttttaaaaagaaagtaaaagcccttttcattcc

SEQ ID NO: 58174 - DNA, 2542 bp, Homo sapiens
agccgagcgccaacccgctagcgcctgaatccggcgtgctgcccgctcgccgcccgccatggcccgcgcagccccgctgctcgccgcgttgaccgcgctcctcgccgccgccgctgctggcggagatgccccgccgggcaaaatcgcggtggttggggctgggattgggggctctgctgtggcccattttctccagcagcactttggacctcgggtgcagatcgacgtgtacgagaagggaaccgtgggtggccgcttggccaccatctcagtcaacaagcagcactatgagagcggggctgcctccttccactccctgagcctgcacatgcaggacttcgtcaagctgctggggctgaggcaccggcgcgaggtggtgggcaggagcgccatcttcggcggggagcacttcatgctggaggagactgactggtacctgctgaacctcttccgcctctggtggcactatggcatcagcttcctgaggctgcagatgtgggtggaggaggtcatggagaagttcatgaggatctataagtaccaggcccacggctatgccttctcgggtgtggaggagctgctctactcactgggggagtccacctttgttaacatgacccagcactctgtggctgagtccctgctgcaggtgggcgtcacgcagcgctttattgatgatgtcgtttctgctgtcctgcgggccagctatggccagtcagcagcgatgcccgcctttgcaggagccatgtcactagccggggcccaaggcagcctgtggtctgtggaaggaggcaataagctggtttgttccggtttgctgaagctcaccaaggccaatgtgatccatgccacagtgacctctgtgaccctgcacagcacagaggggaaagccctgtaccaggtggcgtatgagaatgaggtaggcaacagctctgacttctatgacatcgtggtcatcgccacccccctgcacctggacaacagcagcagcaacttaacctttgcaggcttccacccgcccattgatgacgtgcagggctctttccagcccaccgtcgtctccttggtccacggctacctcaactcgtcctacttcggtttcccagaccctaagcttttcccctttgccaacatccttaccacagatttccccagcttcttctgcactctggacaacatctgccctgtcaacatctctgccagcttccggcgaaagcagccccaggaggcagctgtttggcgagtccagtcccccaagcccctctttcggacccagctaaagaccctgttccgttcctattactcagtgcagacagctgagtggcaggcccatcccctctatggctcccgccccacgctcccgaggtttgcactccatgaccagctcttctacctcaatgccctggagtgggcggccagctccgtggaggtgatggccgtggctgccaagaatgtggccttgctggcttacaaccgctggtaccaggacctagacaagattgatcaaaaagatttgatgcacaaggtcaagactgaactgtgagggctctagggagagcctgggaactttcatcccccactgaagatggatcatcccacagcagcccaggactgaataagccatgctcgcccaccaggcttctttctgacccctcatgtatcaagcatctccaggtgacctactgtctgcctatattaagggtccacacggcggctgctgcttttttttaagggggaaagtaagaaaagagaaggaaatccaagccagtatatttgttttatttattttttttaagaagaaaaaagttcatcttcacaaggtgcttcagacttggtttcttagctagaaaccagaagactacgggagggaatataaggcagagaactatgagtcttattttattactgtttttcactacctactcccacaatggacaatcaattgaggcaacctacaagaaaacatttacaaccagatggttacaaataaagtagaagggaagatcagaaaacctaagaaatgatcatagctcctggttactgtggacttgatagatttgaggtacctagttcagaactccctagtcaccatctccaagcctgtcaacatcactgcatattggaggagatgactgtggtaggacccaaggaagagatgtgtgcctgaatagtcgtcaccatatctccaagcttcctggcaaccagtgggaaaagaaacatgcgaggctgtaggaagagggaagctcttccttggcacctagaggaattagccattctcttccttatgcaaagattgaggaatgcaacaatataaagaagagaagtccccagatggtagagagcagtcatatcttacccctagatgttcatcccagcagaagaaagaagaaggtgttggggtaggattcttcagaggttagcctggtactttctcatcagacactagcttgaagtaagaggagaattatgcttttctttgctttttctacaaacccttaaaaatcacttgttttaaaaagaaagtaaaagcccttttcattcc

SEQ ID NO: 58175 - DNA, 2679 bp, Homo sapiens
agccgagcgccaacccgctagcgcctgaatccggcgtgctgcccgctcgccgcccgccatggcccgcgcagccccgctgctcgccgcgttgaccgcgctcctcgccgccgccgctgctggcggagatgccccgccgggcaaaatcgcggtggttggggctgggattgggggctctgctgtggcccattttctccagcagcactttggacctcgggtgcagatcgacgtgtacgagaagggaaccgtgggtggccgcttggccaccatctcagtcaacaagcagcactatgagagcggggctgcctccttccactccctgagcctgcacatgcaggacttcgtcaagctgctggggctgaggcaccggcgcgaggtggtgggcaggagcgccatcttcggcggggagcacttcatgctggaggagactgactggtacctgctgaacctcttccgcctctggtggcactatggcatcagcttcctgaggctgcagatgtgggtggaggaggtcatggagaagttcatgaggatctataagtaccaggcccacggctatgccttctcgggtgtggaggagctgctctactcactgggggagtccacctttgttaacatgacccagcactctgtggctgagtccctgctgcaggtgggcgtcacgcagcgctttattgatgatgtcgtttctgctgtcctgcgggccagctatggccagtcagcagcgatgcccgcctttgcaggagccatgtcactagccggggcccaaggcagcctgtggtctgtggaaggaggcaataagctggtttgttccggtttgctgaagctcaccaaggccaatgtgatccatgccacagtgacctctgtgaccctgcacagcacagaggggaaagccctgtaccaggtggcgtatgagaatgaggtaggcaacagctctgacttctatgacatcgtggtcatcgccacccccctgcacctggacaacagcagcagcaacttaacctttgcaggcttccacccgcccattgatgacgtgcagggctctttccagcccaccgtcgtctccttggtccacggctacctcaactcgtcctacttcggtttcccagaccctaagcttttcccctttgccaacatccttaccacagatttccccagcttcttctgcactctggacaacatctgccctgtcaacatctctgccagcttccggcgaaagcagccccaggaggcagctgtttggcgagtccagtcccccaagcccctctttcggacccagctaaagaccctgttccgttcctattactcagtgcagacagctgagtggcaggcccatcccctctatggctcccgccccacgctcccgaggtttgcactccatgaccagctcttctacctcaatgccctggagtgggcggccagctccgtggaggtgatggccgtggctgccaagaatgtggccttgctggcttacaaccgctggtaccaggacctagacaagattgatcaaaaagatttgatgcacaaggtcaagactgaactgtgagggctctagggagagcctgggaactttcatcccccactgaagatggatcatcccacagcagcccaggactgaataagccatgctcgcccaccaggcttctttctgacccctcatgtatcaagcatctccaggtgacctactgtctgcctatattaagggtccacacggcggctgctgcttttttttaagggggaaagtaagaaaagagaaggaaatccaagccagtatatttgttttatttattttttttaagaagaaaaaagttcatcttcacaaggtgcttcagacttggtttcttagctagaaaccagaagactacgggagggaatataaggcagagaactatgagtcttattttattactgtttttcactacctactcccacaatggacaatcaattgaggcaacctacaagaaaacatttacaaccagatggttacaaataaagtagaagggaagatcagaaaacctaagaaatgatcatagctcctggttactgtggacttgatagatttgaggtacctagttcagaactccctagtcaccatctccaagcctgtcaacatcactgcatattggaggagatgactgtggtaggacccaaggaagagatgtgtgcctgaatagtcgtcaccatatctccaagcttcctggcaaccagtgggaaaagaaacatgcgaggctgtaggaagagggaagctcttccttggcacctagaggaattagccattctcttccttatgcaaagattgaggaatgcaacaatataaagaagagaagtccccagatggtagagagcagtcatatcttacccctagatgttcatcccagcagaagaaagaagaaggtgttggggtaggattcttcagaggttagcctggtactttctcatcagacactagcttgaagtaagaggagaattatgcttttctttgctttttctacaaacccttaaaaatcacttgttttaaaaagaaagtaaaagcccttttcattccaacaacaccacacaacccacaaaaacacactacaaacaaacaaccacacacaatcacgaaccacaagcatccaaccccacaaccacacacccaaacaacaaacgggcgcaaaaatacagccgagacacaacacacag

SEQ ID NO: 58176 - DNA, 301 bp, Homo sapiens
cagatgtgggtggaggaggtcatggagaagttcatgaggtagggctggcagagctgtggggatggcgttccaggggaaccgagaagaggtgggggaggaaccagcttgcctgtactttgtgaaaaaggaaaaggtccttgctgaattgagccagcacaattcagtgcaggctcagagcaagcccctggcatgaggaatggccgtatttggtccagtaatggtctccctagtattgtcacattgactctcattttcttaccctctactacactgatactaataaaagcatgggttgcaaact

SEQ ID NO: 58177 - DNA, 2365 bp, Homo sapiens
agccgagcgccaacccgctagcgcctgaatccggcgtgctgcccgctcgccgcccgccatggcccgcgcagccccgctgctcgccgcgttgaccgcgctcctcgccgccgccgctgctggcggagatgccccgccgggcaaaatcgcggtggttggggctgggattgggggctctgctgtggcccattttctccagcagcactttggacctcgggtgcagatcgacgtgtacgagaagggaaccgtgggtggccgcttggccaccatctcagtcaacaagcagcactatgagagcggggctgcctccttccactccctgagcctgcacatgcaggacttcgtcaagctgctggggctgaggcaccggcgcgaggtggtgggcaggagcgccatcttcggcggggagcacttcatgctggaggagactgactggtacctgctgaacctcttccgcctctggtggcactatggcatcagcttcctgaggctgcagatgtgggtggaggaggtcatggagaagttcatgagctatggccagtcagcagcgatgcccgcctttgcaggagccatgtcactagccggggcccaaggcagcctgtggtctgtggaaggaggcaataagctggtttgttccggtttgctgaagctcaccaaggccaatgtgatccatgccacagtgacctctgtgaccctgcacagcacagaggggaaagccctgtaccaggtggcgtatgagaatgaggtaggcaacagctctgacttctatgacatcgtggtcatcgccacccccctgcacctggacaacagcagcagcaacttaacctttgcaggcttccacccgcccattgatgacgtgcagggctctttccagcccaccgtcgtctccttggtccacggctacctcaactcgtcctacttcggtttcccagaccctaagcttttcccctttgccaacatccttaccacagatttccccagcttcttctgcactctggacaacatctgccctgtcaacatctctgccagcttccggcgaaagcagccccaggaggcagctgtttggcgagtccagtcccccaagcccctctttcggacccagctaaagaccctgttccgttcctattactcagtgcagacagctgagtggcaggcccatcccctctatggctcccgccccacgctcccgaggtttgcactccatgaccagctcttctacctcaatgccctggagtgggcggccagctccgtggaggtgatggccgtggctgccaagaatgtggccttgctggcttacaaccgctggtaccaggacctagacaagattgatcaaaaagatttgatgcacaaggtcaagactgaactgtgagggctctagggagagcctgggaactttcatcccccactgaagatggatcatcccacagcagcccaggactgaataagccatgctcgcccaccaggcttctttctgacccctcatgtatcaagcatctccaggtgacctactgtctgcctatattaagggtccacacggcggctgctgcttttttttaagggggaaagtaagaaaagagaaggaaatccaagccagtatatttgttttatttattttttttaagaagaaaaaagttcatcttcacaaggtgcttcagacttggtttcttagctagaaaccagaagactacgggagggaatataaggcagagaactatgagtcttattttattactgtttttcactacctactcccacaatggacaatcaattgaggcaacctacaagaaaacatttacaaccagatggttacaaataaagtagaagggaagatcagaaaacctaagaaatgatcatagctcctggttactgtggacttgatagatttgaggtacctagttcagaactccctagtcaccatctccaagcctgtcaacatcactgcatattggaggagatgactgtggtaggacccaaggaagagatgtgtgcctgaatagtcgtcaccatatctccaagcttcctggcaaccagtgggaaaagaaacatgcgaggctgtaggaagagggaagctcttccttggcacctagaggaattagccattctcttccttatgcaaagattgaggaatgcaacaatataaagaagagaagtccccagatggtagagagcagtcatatcttacccctagatgttcatcccagcagaagaaagaagaaggtgttggggtaggattcttcagaggttagcctggtactttctcatcagacactagcttgaagtaagaggagaattatgcttttctttgctttttctacaaacccttaaaaatcacttgttttaaaaagaaagtaaaagcccttttcattcc

SEQ ID NO: 58178 - DNA, 2190 bp, Homo sapiens
agccgagcgccaacccgctagcgcctgaatccggcgtgctgcccgctcgccgcccgccatggcccgcgcagccccgctgctcgccgcgttgaccgcgctcctcgccgccgccgctgctggcggagatgccccgccgggcaaaatcgcggtggttggggctgggattgggggctctgctgtggcccattttctccagcagcactttggacctcgggtgtggaggagctgctctactcactgggggagtccacctttgttaacatgacccagcactctgtggctgagtccctgctgcaggtgggcgtcacgcagcgctttattgatgatgtcgtttctgctgtcctgcgggccagctatggccagtcagcagcgatgcccgcctttgcaggagccatgtcactagccggggcccaaggcagcctgtggtctgtggaaggaggcaataagctggtttgttccggtttgctgaagctcaccaaggccaatgtgatccatgccacagtgacctctgtgaccctgcacagcacagaggggaaagccctgtaccaggtggcgtatgagaatgaggtaggcaacagctctgacttctatgacatcgtggtcatcgccacccccctgcacctggacaacagcagcagcaacttaacctttgcaggcttccacccgcccattgatgacgtgcagggctctttccagcccaccgtcgtctccttggtccacggctacctcaactcgtcctacttcggtttcccagaccctaagcttttcccctttgccaacatccttaccacagatttccccagcttcttctgcactctggacaacatctgccctgtcaacatctctgccagcttccggcgaaagcagccccaggaggcagctgtttggcgagtccagtcccccaagcccctctttcggacccagctaaagaccctgttccgttcctattactcagtgcagacagctgagtggcaggcccatcccctctatggctcccgccccacgctcccgaggtttgcactccatgaccagctcttctacctcaatgccctggagtgggcggccagctccgtggaggtgatggccgtggctgccaagaatgtggccttgctggcttacaaccgctggtaccaggacctagacaagattgatcaaaaagatttgatgcacaaggtcaagactgaactgtgagggctctagggagagcctgggaactttcatcccccactgaagatggatcatcccacagcagcccaggactgaataagccatgctcgcccaccaggcttctttctgacccctcatgtatcaagcatctccaggtgacctactgtctgcctatattaagggtccacacggcggctgctgcttttttttaagggggaaagtaagaaaagagaaggaaatccaagccagtatatttgttttatttattttttttaagaagaaaaaagttcatcttcacaaggtgcttcagacttggtttcttagctagaaaccagaagactacgggagggaatataaggcagagaactatgagtcttattttattactgtttttcactacctactcccacaatggacaatcaattgaggcaacctacaagaaaacatttacaaccagatggttacaaataaagtagaagggaagatcagaaaacctaagaaatgatcatagctcctggttactgtggacttgatagatttgaggtacctagttcagaactccctagtcaccatctccaagcctgtcaacatcactgcatattggaggagatgactgtggtaggacccaaggaagagatgtgtgcctgaatagtcgtcaccatatctccaagcttcctggcaaccagtgggaaaagaaacatgcgaggctgtaggaagagggaagctcttccttggcacctagaggaattagccattctcttccttatgcaaagattgaggaatgcaacaatataaagaagagaagtccccagatggtagagagcagtcatatcttacccctagatgttcatcccagcagaagaaagaagaaggtgttggggtaggattcttcagaggttagcctggtactttctcatcagacactagcttgaagtaagaggagaattatgcttttctttgctttttctacaaacccttaaaaatcacttgttttaaaaagaaagtaaaagcccttttcattcc

SEQ ID NO: 58179 - DNA, 651 bp, Homo sapiens
gtgaatcctgagggttagagcatccaccaggtgccctaggtaagggccagccactctgggaggcagcccggggcactcactgtcctctcagtagtaaatgaaatcactcaggccatgtctgctacccagagagcctgagtgtcctcaaatgcttgttctgcctctccatccactcctgcagacacctcagtggctgcatcccaaaccgctgaactttgcttctctttctccaacccccaattccacccacatcccaaaactgctctgccccctattcccatctcagctgagggtactatcatccaccctgtggccacatccaggaatgtgtgtatcacctgggctctgaggatgacatcagctcttctaagtcaacagaatgtcgggtctgttctaaaagtctcatctgacaaggagatctttaaggctttactcccttaaaggctttactcccatcatgatggggatttcagtgtcattctgtctttttcttcggaatgattcctgggactcgccttgtttgcaacatgtgcattgaaatatcttttcaacataactttgttcttaattgtgtttacttcctttctctgtgaatctcagtgattcctggaagctgtggttggtgggggatggggtgggaggactttggta

SEQ ID NO: 58180 - DNA, 666 bp, Homo sapiens
gtgaatcctgagggttagagcatccaccaggtgccctaggtaagggccagccactctgggaggcagcccggggcactcactgtcctctcagtagtaaatgaaatcactcaggccatgtctgctacccagagagcctgagtgtcctcaaatgcttgttctgcctctccatccactcctgcagacacctcagtggctgcatcccaaaccgctgaactttgcttctctttctccaacccccaattccacccacatcccaaaactgctctgccccctattcccatctcagctgagggtactatcatccaccctgtggccacatccaggaatgtgtgtatcacctgggctctgaggatgacatcagctcttctaagtcaacagaatgtcgggtctgttctaaaagtctcatctgacaaggagatctttaaggctttactcccttaaaggctttactcccatcatgatgggataaccatcatgatggatttcagtgtcattctgtctttttcttcggaatgattcctgggactcgccttgtttgcaacatgtgcattgaaatatcttttcaacataactttgttcttaattgtgtttacttcctttctctgtgaatctcagtgattcctggaagctgtggttggtgggggatggggtgggaggactttggta

SEQ ID NO: 58181 - DNA, 262 bp, Homo sapiens
ggaccttgacccacatccatgttgaggaatgtcctctatgtcaaggtcagggaacagcacccacagagggtgcctctgggtccctctctgctcaactccctctctcttggttcctgcgaggctcatagggttgcagggcccagcagaaggactgagtcttcctcctggacttctggtcctggtaggctgtgccttcatgtctctcctgtcacctgcactgtaaggaactcattatgacaaacgcataaagaatatggctctg

SEQ ID NO: 58182 - DNA, 294 bp, Homo sapiens
acacacacacacacacagtgacatgcacacacagacttagctgcaacagtgacatgcccacaaatgctaaccacaaacatacatgctgggtgacacccaaagctgtgaacatacacatagcctgatacaggcgcagggacacattcacttgcacacacatataccaatatgcatgtacagtgatagacatacaccggcacacacatgtgacaaacgtgtcgctcaccaaaacaagcatgcactcacacgctcaccccaggcactcacacctcagtgtacaatacccactcctcg

SEQ ID NO: 58183 - DNA, 729 bp, Homo sapiens
ggatcagcctggatgtgtcaaacactgcctgccaggcttagagctcagtgcatttcttcccttttattcctgctgatgggattgctggccatgaccggtgagaggaatcaaggaacccattactatgagttctcaggattcatcttcaaatctcaaatgatgtggtcaattaaaccaaattaaaaacaagctcttgttaaaagcaagttaaaaacaagctcttgaccttgagaagaaatgattggtattaggaagactgttgagctgatactgcccttcattcattctctaccctggtgcttggatacaggagcaaagtaagaaaataatcacagctttattgagggctctatgagcaaggcttggtgaggatggaagagaatggagctatcagttgatgagaacctactaggtgttgagctccttacattcattgcctatttaaaactttctaacaacttcatgtgtaagcgttgtcccgatttaaaaaaaaaaatagatgtggaaactgaacctggagaaggtgtgtaatttgtccaaggttgcacaggcaaaggggcaaaattcagctttaaacccaggactgtttccacagctccaagttccctttattcatgggatttgtaagatggagcccctgccactgtagcatttataacttactttggagaataagattcctgaaagtacgtttaataaaaaaaaaagatgtccagctatgtacggcag

SEQ ID NO: 58184 - DNA, 859 bp, Homo sapiens
gaatgattctgtccaaagaggttaatcattaaaatgctcagaggagacctcagcaggcccttgaagaacacagcaatttaagaagtaaaaaggaggatgtaggggaatgttagtcagggtcaagccaaacattgaattcagcatggcaaatgaaatttactgtaagtggtctctgtgctgagatacatattactgtttgtgcaaatttagttccgttaacttttcccaaaacttcttcaccaccttatcttggagcttaattctaactctctctactatgtccatactatgggaatgtcttcaagataatattgtcttgttaaaattcggcttcagacttcaggacttttacattcttggatggggatctaaacaagacatgaaccaatcataaggaaatatggctccttctccattattttaaacaagaaaatattattgttattgtagctgtttgagagacaaggagattaaacttgctacggttaagaaatttgaaagcagatttttttagaggcagacaataaggaagagtgtttttggacatactttgctcaaacctttcctgtgtttgagtattccacccaaacagaactttctccattgagccatttgctgtcctgtcagctaaaaaataaaaaataaaaaaaacaataaaacaaaacaaaacaaagagcaaaaaccattttatcttcttgatactgtggcacttgatgtgcaacagagagactacattcttgcaatcggtcagaagcagaacttgaccaatatgaaacaatacatatcctaagaaaacaacatgcacagataatttgcagaaagtttagaacaacaacaataaaatattttaatttgctct

SEQ ID NO: 58185 - DNA, 283 bp, Homo sapiens
aaaagggggaagaaggaggagagaagccttctcccctccccagttggactaggggcagtgttaattttgaaaaggtgtgggtccctgtgtcctcttccaggggtccaagggaacaggagaggtcactgggcctgttttctccctcctgaccctgcatctcccaccccgtgtatcatagggaactttcaccttaaaatctttctaagcaaagtgtgaataggatttttactccctttgtacagtattctgagaaacgcaaataaaagggcaacatgtttctgtt

SEQ ID NO: 58186 - DNA, 699 bp, Homo sapiens
tgattcggccggagctgccagcggggaggctgcagccgcgggttgttacagctgctggagcagcagcggcccccgctcccgggaaccgttcccgggccgttgatcttcggccccacacgaacagcagagaggggcagcaggatgaatgtgggcacagcgcacagcgaggtgaaccccaacacgcgggtgatgaacagccgtggcatctggctctcctacgtgctggccatcggtctcctccacatcgtgctgctgagcatcccgtttgtgagtgtccctgtcgtctggaccctcaccaacctcattcacaacatgggcatgtatatcttcctgcacacggtgaaggggacaccctttgagaccccggaccagggcaaggcgaggctgctaacccactgggagcagatggattatggggtccagttcacggcctctcggaagttcttgaccatcacacccatcgtgctaagtattcacatacacacagaaaatacgggtgtgaaaagaagaattttctgtacaaattaagctgcatactttgggtaaaagtgataaaaggctgtagtgccaataaaagctgcttttaaaataagtgtggctcggaatattataagatattggggaacaatacaaatcaagaaaatttctgggcttagagtgcttcatagatttatttaggactctcccccttgcccctcg

SEQ ID NO: 58187 - DNA, 2110 bp, Homo sapiens
tgattcggccggagctgccagcggggaggctgcagccgcgggttgttacagctgctggagcagcagcggcccccgctcccgggaaccgttcccgggccgttgatcttcggccccacacgaacagcagagaggggcagcaggatgaatgtgggcacagcgcacagcgaggtgaaccccaacacgcgggtgatgaacagccgtggcatctggctctcctacgtgctggccatcggtctcctccacatcgtgctgctgagcatcccgtttgtgagtgtccctgtcgtctggaccctcaccaacctcattcacaacatgggcatgtatatcttcctgcacacggtgaaggggacaccctttgagaccccggaccagggcaaggcgaggctgctaacccactgggagcagatggattatggggtccagttcacggcctctcggaagttcttgaccatcacacccatcgtgctgtacttcctcaccagcttctacactaagtacgaccagatccattttgtgctcaacaccgtgtccctgatgagcgtgcttatccccaagctgccccagctccacggagtccggatttttggaatcaataagtactgagagtgcagccccttcccctgcccagggtggcaggggaggggtagggtaaaaggcatgtgctgcaacactgaagacagaaagaagaagcctctggacactgccagagatgggggttgagcctctggcctaatttcccccctcgcttcccccagtagccaacttggagtagcttgtagtggggttggggtaggccccctgggctctgaccttttctgaattttttgatcttttccttttgctttttgaatagagactccatggagttggtcatggaatgggctgggctcctgggctgaacatggaccacgcagttgcgacaggaggccaggggaaaaacccctgctcacttgtttgccctcaggcagccaaagcactttaacccctgcatagggagcagagggcggtacggcttctggattgtttcactgtgattcctaggttttttcgatgccacgcagtgtgtgcttttgtgtatggaagcaagtgtgggatgggtctttgcctttctgggtagggagctgtctaatccaagtcccaggcttttggcagcttctctgcaacccaccgtgggtcctggttgggagtggggagggtcaggttggggaaagatggggtagagtgtagatggcttggttccagaggtgagggggccagggctgctgccatcctggcctggtggaggttggggagctgtaggagagctagtgagtcgagacttagaagaatggggccacatagcagcagaggactggtgtaagggagggaggggtagggacagaagctagacccaatctcctttgggatgtgggcagggagggaagcaggcttggagggttaatttacccacagaatgtgatagtaataggggagggaggctgctgtgggtttaactcctgggttggctgttgggtagacaggtggggaaaaggcccgtgagtcattgtaagcacaggtccaacttggccctgactcctgcgggggtatggggaagctgtgacagaaacgatgggtgctgtggtcctctgcaggccctcaccccttaacttcctcatacagactggcactgggcagggcctctcatgtggcagccacatgtggcgttgtgaggccaccccatgtggggtctgtggtgagagtcctgtaggatccctgctcaagcagcacagaggaaggggcaagacgtggcctgtaggcactgtctcagcctgcagagaagaaagtgaggccgggagcctgagcctgggctggagccttctcccctccccagttggactaggggcagtgttaattttgaaaaggtgtgggtccctgtgtcctcttccaggggtccaagggaacaggagaggtcactgggcctgttttctccctcctgaccctgcatctcccaccccgtgtatcatagggaactttcaccttaaaatctttctaagcaaagtgtgaataggatttttactccctttgtacagtattctgagaaacgcaaataaaagggcaacatgtttctgtt

SEQ ID NO: 58188 - DNA, 1847 bp, Homo sapiens
ctcctagccctcttacctcgtctggaccctcaccaacctcattcacaacatgggcatgtatatcttcctgcacacggtgaaggggacaccctttgagaccccggaccagggcaaggcgaggctgctaacccactgggagcagatggattatggggtccagttcacggcctctcggaagttcttgaccatcacacccatcgtgctgtacttcctcaccagcttctacactaagtacgaccagatccattttgtgctcaacaccgtgtccctgatgagcgtgcttatccccaagctgccccagctccacggagtccggatttttggaatcaataagtactgagagtgcagccccttcccctgcccagggtggcaggggaggggtagggtaaaaggcatgtgctgcaacactgaagacagaaagaagaagcctctggacactgccagagatgggggttgagcctctggcctaatttcccccctcgcttcccccagtagccaacttggagtagcttgtagtggggttggggtaggccccctgggctctgaccttttctgaattttttgatcttttccttttgctttttgaatagagactccatggagttggtcatggaatgggctgggctcctgggctgaacatggaccacgcagttgcgacaggaggccaggggaaaaacccctgctcacttgtttgccctcaggcagccaaagcactttaacccctgcatagggagcagagggcggtacggcttctggattgtttcactgtgattcctaggttttttcgatgccacgcagtgtgtgcttttgtgtatggaagcaagtgtgggatgggtctttgcctttctgggtagggagctgtctaatccaagtcccaggcttttggcagcttctctgcaacccaccgtgggtcctggttgggagtggggagggtcaggttggggaaagatggggtagagtgtagatggcttggttccagaggtgagggggccagggctgctgccatcctggcctggtggaggttggggagctgtaggagagctagtgagtcgagacttagaagaatggggccacatagcagcagaggactggtgtaagggagggaggggtagggacagaagctagacccaatctcctttgggatgtgggcagggagggaagcaggcttggagggttaatttacccacagaatgtgatagtaataggggagggaggctgctgtgggtttaactcctgggttggctgttgggtagacaggtggggaaaaggcccgtgagtcattgtaagcacaggtccaacttggccctgactcctgcgggggtatggggaagctgtgacagaaacgatgggtgctgtggtcctctgcaggccctcaccccttaacttcctcatacagactggcactgggcagggcctctcatgtggcagccacatgtggcgttgtgaggccaccccatgtggggtctgtggtgagagtcctgtaggatccctgctcaagcagcacagaggaaggggcaagacgtggcctgtaggcactgtctcagcctgcagagaagaaagtgaggccgggagcctgagcctgggctggagccttctcccctccccagttggactaggggcagtgttaattttgaaaaggtgtgggtccctgtgtcctcttccaggggtccaagggaacaggagaggtcactgggcctgttttctccctcctgaccctgcatctcccaccccgtgtatcatagggaactttcaccttaaaatctttctaagcaaagtgtgaataggatttttactccctttgtacagtattctgagaaacgcaaataaaagggcaacatgtttctgtt

SEQ ID NO: 58189 - DNA, 2149 bp, Homo sapiens
tgattcggccggagctgccagcggggaggctgcagccgcgggttgttacagctgctggagcagcagcggcccccgctcccgggaaccgttcccgggccgttgatcttcggccccacacgaacagcagagaggggcagcaggatgaatgtgggcacagcgcacagcgaggtgaaccccaacacgcgggtgatgaacagccgtggcatctggctctcctacgtgctggccatcggtctcctccacatcgtgctgctgagcatcccgtttgtgagtgtccctgtcgtctggaccctcaccaacctcattcacaacatgggcatgtatatcttcctgcacacggtgaaggggacaccctttgagaccccggaccagggcaaggcgaggctgctaacccactgggagcagatggattatggggtccagttcacggcctctcggaagttcttgaccatcacacccatcgtgctgtacttcctcaccagcttctacactaagtacgaccagatccattttgtgctcaacaccgtgtccctgatgagcgtgcttatccccaagctgccccagctccacggagtccggatttttggaatcaataagtactgagagtgcagccccttcccctgcccagggtggcaggggaggggtagggtaaaaggcatgtgctgcaacactgaagacagaaagaagaagcctctggacactgccagagatgggggttgagcctctggcctaatttcccccctcgcttcccccagtagccaacttggagtagcttgtagtggggttggggtaggccccctgggctctgaccttttctgaattttttgatcttttccttttgctttttgaatagagactccatggagttggtcatggaatgggctgggctcctgggctgaacatggaccacgcagttgcgacaggaggccaggggaaaaacccctgctcacttgtttgccctcaggcagccaaagcactttaacccctgcatagggagcagagggcggtacggcttctggattgtttcactgtgattcctaggttttttcgatgccacgcagtgtgtgcttttgtgtatggaagcaagtgtgggatgggtctttgcctttctgggtagggagctgtctaatccaagtcccaggcttttggcagcttctctgcaacccaccgtgggtcctggttgggagtggggagggtcaggttggggaaagatggggtagagtgtagatggcttggttccagaggtgagggggccagggctgctgccatcctggcctggtggaggttggggagctgtaggagagctagtgagtcgagacttagaagaatggggccacatagcagcagaggactggtgtaagggagggaggggtagggacagaagctagacccaatctcctttgggatgtgggcagggagggaagcaggcttggagggttaatttacccacagaatgtgatagtaataggggagggaggctgctgtgggtttaactcctgggttggctgttgggtagacaggtggggaaaaggcccgtgagtcattgtaagcacaggtccaacttggccctgactcctgcgggggtatggggaagctgtgacagaaacgatgggtgctgtggtcctctgcaggccctcaccccttaacttcctcatacagactggcactgggcagggcctctcatgtggcagccacatgtggcgttgtgaggccaccccatgtggggtctgtggtgagagtcctgtaggatccctgctcaagcagcacagaggaaggggcaagacgtggcctgtaggcactgtctcagcctgcagagaagaaagtgaggccgggagcctgagcctgggctggagccttctcccctccccagttggactaggggcagtgttaattttgaaaaggtgtgggtccctgtgtcctcttccaggggtccaagggaacaggagaggtcactgggcctgttttctccctcctgaccctgcatctcccaccccgtgtatcatagggaactttcaccttaaaatctttctaagcaaagtgtgaataggatttttactccctttgtacagtattctgagaaacgcaaataaaagggcaacatgtttctgttaaagaagaagagacagggaaagagaatagcaggggaata

SEQ ID NO: 58190 - DNA, 1966 bp, Homo sapiens
tgattcggccggagctgccagcggggaggctgcagccgcgggttgttacagctgctggagcagcagcggcccccgctcccgggaaccgttcccgggccgttgatcttcggccccacacgaacagcagagaggggcagcaggatgaatgtgggcacagcgcacagcgaggtgaaccccaacacgcgggtgatgaacagccgtggcatctggctctcctacgtgctggccatcggtctcctccacatcgtgctgctgagcatcccgtttgtgagtgtccctgtcgtctggaccctcaccaacctcattcacaacatgggcatgtatatcttcctgcacacggtgaaggggacaccctttgagaccccggaccagggcaaggcgaggctgctaacccactgggagcagatggattatggggtccagttcacggcctctcggaagttcttgaccatcacacccatcgtgctgtacttcctcaccagcttctacactaagtacgaccagatccattttgtgctcaacaccgtgtccctgatgagcgtgcttatccccaagctgccccagctccacggagtccggatttttggaatcaataagtactgagagtgcagccccttcccctgcccagggtggcaggggaggggtagggtaaaaggcatgtgctgcaacactgaagacagaaagaagaagcctctggacactgccagagatggggcatggagttggtcatggaatgggctgggctcctgggctgaacatggaccacgcagttgcgacaggaggccaggggaaaaacccctgctcacttgtttgccctcaggcagccaaagcactttaacccctgcatagggagcagagggcggtacggcttctggattgtttcactgtgattcctaggttttttcgatgccacgcagtgtgtgcttttgtgtatggaagcaagtgtgggatgggtctttgcctttctgggtagggagctgtctaatccaagtcccaggcttttggcagcttctctgcaacccaccgtgggtcctggttgggagtggggagggtcaggttggggaaagatggggtagagtgtagatggcttggttccagaggtgagggggccagggctgctgccatcctggcctggtggaggttggggagctgtaggagagctagtgagtcgagacttagaagaatggggccacatagcagcagaggactggtgtaagggagggaggggtagggacagaagctagacccaatctcctttgggatgtgggcagggagggaagcaggcttggagggttaatttacccacagaatgtgatagtaataggggagggaggctgctgtgggtttaactcctgggttggctgttgggtagacaggtggggaaaaggcccgtgagtcattgtaagcacaggtccaacttggccctgactcctgcgggggtatggggaagctgtgacagaaacgatgggtgctgtggtcctctgcaggccctcaccccttaacttcctcatacagactggcactgggcagggcctctcatgtggcagccacatgtggcgttgtgaggccaccccatgtggggtctgtggtgagagtcctgtaggatccctgctcaagcagcacagaggaaggggcaagacgtggcctgtaggcactgtctcagcctgcagagaagaaagtgaggccgggagcctgagcctgggctggagccttctcccctccccagttggactaggggcagtgttaattttgaaaaggtgtgggtccctgtgtcctcttccaggggtccaagggaacaggagaggtcactgggcctgttttctccctcctgaccctgcatctcccaccccgtgtatcatagggaactttcaccttaaaatctttctaagcaaagtgtgaataggatttttactccctttgtacagtattctgagaaacgcaaataaaagggcaacatgtttctgtt

SEQ ID NO: 58191 - DNA, 1906 bp, Homo sapiens
tgattcggccggagctgccagcggggaggctgcagccgcgggttgttacagctgctggagcagcagcggcccccgctcccgggaaccgttcccgggccgttgatcttcggccccacacgaacagcagagaggggcagcaggatgaatgtgggcacagcgcacagcgaggtgaaccccaacacgcgggtgatgaacagccgtggcatctggctctcctacgtgctggccatcggtctcctccacatcgtgctgctgagcatcccgtttgtgagtgtccctgtcgtctggaccctcaccaacctcattcacaacatgggcatgtatatcttcctgcacacggtgaaggggacaccctttgagaccccggaccagggcaaggcgaggctgctaacccactgggagcagatggattatggggtccagttcacggcctctcggaagttcttgaccatcacacccatcgtgctgtacttcctcaccagcttctacactaagtacgaccagatccattttgtgctcaacaccgtgtccctgatgagcgtgcttatccccaagctgccccagctccacggagtccggatttttggaatcaataagtactgagagtgcagccccttcccctgcccagggtggcaggggaggggtagggtaaaagcatggagttggtcatggaatgggctgggctcctgggctgaacatggaccacgcagttgcgacaggaggccaggggaaaaacccctgctcacttgtttgccctcaggcagccaaagcactttaacccctgcatagggagcagagggcggtacggcttctggattgtttcactgtgattcctaggttttttcgatgccacgcagtgtgtgcttttgtgtatggaagcaagtgtgggatgggtctttgcctttctgggtagggagctgtctaatccaagtcccaggcttttggcagcttctctgcaacccaccgtgggtcctggttgggagtggggagggtcaggttggggaaagatggggtagagtgtagatggcttggttccagaggtgagggggccagggctgctgccatcctggcctggtggaggttggggagctgtaggagagctagtgagtcgagacttagaagaatggggccacatagcagcagaggactggtgtaagggagggaggggtagggacagaagctagacccaatctcctttgggatgtgggcagggagggaagcaggcttggagggttaatttacccacagaatgtgatagtaataggggagggaggctgctgtgggtttaactcctgggttggctgttgggtagacaggtggggaaaaggcccgtgagtcattgtaagcacaggtccaacttggccctgactcctgcgggggtatggggaagctgtgacagaaacgatgggtgctgtggtcctctgcaggccctcaccccttaacttcctcatacagactggcactgggcagggcctctcatgtggcagccacatgtggcgttgtgaggccaccccatgtggggtctgtggtgagagtcctgtaggatccctgctcaagcagcacagaggaaggggcaagacgtggcctgtaggcactgtctcagcctgcagagaagaaagtgaggccgggagcctgagcctgggctggagccttctcccctccccagttggactaggggcagtgttaattttgaaaaggtgtgggtccctgtgtcctcttccaggggtccaagggaacaggagaggtcactgggcctgttttctccctcctgaccctgcatctcccaccccgtgtatcatagggaactttcaccttaaaatctttctaagcaaagtgtgaataggatttttactccctttgtacagtattctgagaaacgcaaataaaagggcaacatgtttctgtt

SEQ ID NO: 58192 - DNA, 1752 bp, Homo sapiens
tgattcggccggagctgccagcggggaggctgcagccgcgggttgttacagctgctggagcagcagcggcccccgctcccgggaaccgttcccgggccgttgatcttcggccccacacgaacagcagagaggggcagcaggatgaatgtgggcacagcgcacagcgaggtgaaccccaacacgcgggtgatgaacagccgtggcatctggctctcctacgtgctggccatcggtctcctccacatcgtgctgctgagcatcccgtttgtgagtgtccctgtcgtctggaccctcaccaacctcattcacaacatgggcatgtatatcttcctgcacacggtgaaggggacaccctttgagaccccggaccagggcaaggcgaggctgctaacccactgggagcagatggattatggggtccagttcacggcctctcggaagttcttgaccatcacacccatcgtgctgtacttcctcaccagcttctacactaagtacgaccagatccattttgtgctcaacaccgtgtccctgatgagcgtgcttatccccaagctgccccagctccacggagtccggatttttggaatcaataagtactgagagtgcagccccttcccctgcccagggtggcaggggaggggtagggtaaaaggcatgtgctgcaacactgaagacagaaagaagaagcctctggacactgccagagatgggggttgagcctctggcctaatttcccccctcgcttcccccagtagccaacttggagtagcttgtagtggggttggggtaggccccctgggctctgaccttttctgaattttttgatcttttccttttgctttttgaatagagactccatggagttggtcatggaatgggctgggctcctgggctgaacatggaccacgcagttgcgacaggaggccaggggaaaaacccctgctcacttgtttgccctcaggcagccaaagcactttaacccctgcatagggagcagagggcggtacggcttctggattgtttcactgtgattcctaggttttttcgatgccacgcagtgtgtgcttttgtgtatggaagcaagtgtgggatgggtctttgcctttctgggtagggagctgtctaatccaagtcccaggcttttggcagcttctctgcaacccaccgtgggtcctggttgggagtggggagggtcaggttggggaaagatggggtagagtgtagatggcttggttccagaggtgagggggccagggctgctgccatcctggcctggtggaggttggggagctgtaggagagctagtgagtcgagacttagaagaatggggccacatagcagcagaggactggtgtaagggagggaggggtagggacagaagctagacccaatctcctttgggatgtgggcagggagggaagcaggcttggagggttaatttacccacagaatgtgatagtaataggggagggagcctgagcctgggctggagccttctcccctccccagttggactaggggcagtgttaattttgaaaaggtgtgggtccctgtgtcctcttccaggggtccaagggaacaggagaggtcactgggcctgttttctccctcctgaccctgcatctcccaccccgtgtatcatagggaactttcaccttaaaatctttctaagcaaagtgtgaataggatttttactccctttgtacagtattctgagaaacgcaaataaaagggcaacatgtttctgtt

SEQ ID NO: 58193 - DNA, 2032 bp, Homo sapiens
  misc_feature (1765)..(1765): n is a, c, g, or t
  misc_feature (1779)..(1779): n is a, c, g, or t
  misc_feature (1816)..(1816): n is a, c, g, or t
  misc_feature (1838)..(1838): n is a, c, g, or t
  misc_feature (1850)..(1850): n is a, c, g, or t
  misc_feature (1937)..(1937): n is a, c, g, or t
  misc_feature (1942)..(1942): n is a, c, g, or t
  misc_feature (2013)..(2013): n is a, c, g, or t
tgattcggccggagctgccagcggggaggctgcagccgcgggttgttacagctgctggagcagcagcggcccccgctcccgggaaccgttcccgggccgttgatcttcggccccacacgaacagcagagaggggcagcaggatgaatgtgggcacagcgcacagcgaggtgaaccccaacacgcgggtgatgaacagccgtggcatctggctctcctacgtgctggccatcggtctcctccacatcgtgctgctgagcatcccgtttgtgagtgtccctgtcgtctggaccctcaccaacctcattcacaacatgggcatgtatatcttcctgcacacggtgaaggggacaccctttgagaccccggaccagggcaaggcgaggctgctaacccactgggagcagatggattatggggtccagttcacggcctctcggaagttcttgaccatcacacccatcgtgctgtacttcctcaccagcttctacactaagtacgaccagatccattttgtgctcaacaccgtgtccctgatgagcgtgcttatccccaagctgccccagctccacggagtccggatttttggaatcaataagtactgagagtgcagccccttcccctgcccagggtggcaggggaggggtagggtaaaaggcatgtgctgcaacactgaagacagaaagaagaagcctctggacactgccagagatgggggttgagcctctggcctaatttcccccctcgcttcccccagtagccaacttggagtagcttgtagtggggttggggtaggccccctgggctctgaccttttctgaattttttgatcttttccttttgctttttgaatagagactccatggagttggtcatggaatgggctgggctcctgggctgaacatggaccacgcagttgcgacaggaggccaggggaaaaacccctgctcacttgtttgccctcaggcagccaaagcactttaacccctgcatagggagcagagggcggtacggcttctggattgtttcactgtgattcctaggttttttcgatgccacgcagtgtgtgcttttgtgtatggaagcaagtgtgggatgggtctttgcctttctgggtagggagctgtctaatccaagtcccaggcttttggcagcttctctgcaacccaccgtgggtcctggttgggagtggggagggtcaggttggggaaagatggggtagagtgtagatggcttggttccagaggtgagggggccagggctgctgccatcctggcctggtggaggttggggagctgtaggagagctagtgagtcgagacttagaagaatggggccacatagcagcagaggactggtgtaagggagggaggggtagggacagaagctagacccaatctcctttgggatgtgggcagggagggaagcaggcttggagggttaatttacccacagaatgtgatagtaataggggagggaggctgctgtgggtttaactcctgggttggctgttgggtagacaggtggggaaaaggcccgtgagtcattgtaagcacaggtccaacttggccctgactcctgcgggggtatggggaagctgtgacagaaacgatgggtgctgtggtcctctgcaggccctcaccccttaacttcctcatacagactggcactgggcagggcctctcatgtggcagccacatgtggcgttgtgaggccaccccatttttcctctttgttcacattcctttcctatccccctcactccgcncatcccccgttctncccttcccctttactcactctctccccctgcctacangaaatttatccccccacccttncccttctcttgncccttctcccctccccatttccactacgctcatttttaatttttaaaattttttttccctctttcctcttccatgcttccaatttcncattntacttcactcttcctgttctctccctcctctccctccttctctccaccccttctctctatattcactctcnccttccactctttctactc

SEQ ID NO: 58194 - DNA, 764 bp, Homo sapiens
tgattcggccggagctgccagcggggaggctgcagccgcgggttgttacagctgctggagcagcagcggcccccgctcccgggaaccgttcccgggccgttgatcttcggccccacacgaacagcagagaggggcagcaggatgaatgtgggcacagcgcacagcgaggtgaaccccaacacgcgggtgatgaacagccgtggcatctggctctcctacgtgctggccatcggtctcctccacatcgtgctgctgagcatcccgtttgtgagtgtccctgtcgtctggaccctcaccaacctcattcacaacatgggcatgtatatcttcctgcacacggtgaaggggacaccctttgagaccccggaccagggcaaggcgaggctgctaacccactgggagcagatggattatggggtccagttcacggcctctcggaagttcttgaccatcacacccatcgtgctggcccggcctggggcccgcgcggatgtgggcacggtgcatagtgggggtgaagcgcaacacgcgggtgatgaacagccgtggcatctggctctcctacggttgctggccatcggtctcctcccacatcgtgctgttgagcatcccgtttgtgagtgtccctgtcgtctggaccctcaccaacctcattcacaacatgggcatgtatatcttcctgcacacggtgacggggacaccttggagacccggacaggcaagggaggtgtaaccatgggagcgaggtatgggccagtcaggct

SEQ ID NO: 58195 - DNA, 351 bp, Homo sapiens
  misc_feature (234)..(234): n is a, c, g, or t
  misc_feature (237)..(237): n is a, c, g, or t
  misc_feature (285)..(285): n is a, c, g, or t
aacagcagagaggggcagcaggatgaatgtgggcacagcgcacagcgaggtgaaccccaacacgcgggtgatgaacagccgtggcatctggctctcctacgtgctggccatcggtctcctccacatcgtgctgctgagcatcccgtttgtgagtgtccctgtcgtctggaccctcaccaacctcattcacaacatggtgagagcctgtctgctgcctgcccctgcccctgcccnctngccctgtgggctgccctttggcagggctgagggataggaggagcctgntcgggcctggcccaggtgtcagggtgatgtactgacgacatctgcctccagagcccaggcctagcc

SEQ ID NO: 58196 - DNA, 1301 bp, Homo sapiens
  misc_feature (838)..(838): n is a, c, g, or t
tcctggagcagtgacattgcaggatattttctcctcctccagccacactttgtcaccaactgctgccaactcgccaccactgctgccgacctcgcaaccactgctttgtctctgaagtgagactgctcctggtgccatgaacggagacgacacctttgcaaagagacccagggatgatgctaaagcatcagagaagagaagcaaggcctttgatgatattgccacatacttctctaagaaagagtggaaaaagatgaaatactcggagaaaatcagctatgtgtatatgaagagaaactataaggccatgactaaactaggtttcaaagtcaccctcccacctttcatgtgtaataaacaggccacagacttccaggggaatgattttgataatgaccataaccgcaggattcaggttgaacatcctcagatgactttcggcaggctccacagaatcatcccgaagatcatgcccaagaagccagcagaggacgaaaatgattcgaagggagtgtcagaagcatctggcccacaaaacgatgggaaacaactgcaccccccaggaaaagcaaatatttctgagaagattaataagagatctggacccaaaagggggaaacatgcctggacccacagactgcgtgagagaaagcagctggtgatttatgaagagatcagcgaccctgaggaagatgacgagtaactcccctgggggatacgacacatgcccttgatgagaagcagaacgtggtgacctttcacgaacatgggcatggctgcggctccctcgtcatcaggtgcatagcaagtgaaagcaagtgttcacaacggtgaaaanttgagcgtcatttttcttagtgtgccaagagttcgatgttagtgtttccattgtattttcttacagtgtgccattctgttagatactatccttataattgatgagcaagacatactgaatgcatatttcggtttgtgtatccatgcacctacgtcagaaaacaagtattgtcaggtattctctccatagaacagcactatcctcatctctccccagatgtgactactgagggcagttctgagtgtttaatttcagactttttcctctgcatttacacacacacacacacacacacgcacacacacacaccaagtaccagtataagcatctcccatctgcttttcccattgccatgcgtcctggtcaagcccccctcactctgtttcctgttcagcatgtactcccctcatccgattcccctgtatcagtcactgacagttaataaacctttgcaaacgttccc

SEQ ID NO: 58197 - DNA, 585 bp, Homo sapiens
  misc_feature (485)..(485): n is a, c, g, or t
  misc_feature (505)..(505): n is a, c, g, or t
  misc_feature (536)..(536): n is a, c, g, or t
  misc_feature (542)..(542): n is a, c, g, or t
  misc_feature (554)..(554): n is a, c, g, or t
  misc_feature (557)..(558): n is a, c, g, or t
caacagcaagatgcataccagggaccacctccacaacagggatatccaccccagcagcagcagtacccagggcagcaaggttacccaggacagcagcagggctacggtccttcacagggtggtccaggtcctcagtatcctaactacccacagggacaaggtcagcagtatggaggatatagaccaacacagcctggaccaccacagccaccccagcagaggccttatggatatgaccagatcatgcccaagaagccagcagaggacgaaaatgattcgaagggagtgtcagaagcatctggcccacaaaacgatgggaaacaactgcaccccccaggaaaagcaaatatttctgagaagattaataagagatctggacccaaaagggggaaacatgcctggacccacagactgcgtgagagaaagcagctggtgatttatgaagagatcagcgaccctgaggaagatgacgagtaactcccctnggggatacgacacatgcccntgatgagaagcagaacgtggtgacctttcangaacangggcatggctgnggnnccctcgtcatcaggtgcatagcaagtg

SEQ ID NO: 58198 - DNA, 453 bp, Homo sapiens
tttcagcatgccctcctcactaagcttagccatttctagattctgatttagtgtgagagaatgcaagtcttcctttcatttgaactgttagcggccattgtaggattgctaattgtcctaatttcagtattgctgtgtctcagggaataggtaggcccaagaaaaggaaaagagtcgggaagcgctcatcggtggagcagtcagaacacacacaacattgatcaattacgttcgtcatcttctctgggtggagttcctgttacgcccaaaacattacacacacacgcacacacacacaccaagtaccagtataagcatctcccatctgcttttcccattgccatgcgtcctggtcaagcccccctcactctgtttcctgttcagcatgtactcccctcatccgattcccctgtatcagtcactgacagttaataaacctttgcaaacgttccc

SEQ ID NO: 58199 - DNA, 1359 bp, Homo sapiens
  misc_feature (896)..(896): n is a, c, g, or t
tcctggagcagtgacattgcaggatattttctcctcctccagccacactttgtcaccaactgctgccaactcgccaccactgctgccgacctcgcaaccactgctttgtctctgaaaactgggcttgacctcctcggctcaagtgatcctcccacctcggcctcggaactacaggtgagactgctcctggtgccatgaacggagacgacacctttgcaaagagacccagggatgatgctaaagcatcagagaagagaagcaaggcctttgatgatattgccacatacttctctaagaaagagtggaaaaagatgaaatactcggagaaaatcagctatgtgtatatgaagagaaactataaggccatgactaaactaggtttcaaagtcaccctcccacctttcatgtgtaataaacaggccacagacttccaggggaatgattttgataatgaccataaccgcaggattcaggttgaacatcctcagatgactttcggcaggctccacagaatcatcccgaagatcatgcccaagaagccagcagaggacgaaaatgattcgaagggagtgtcagaagcatctggcccacaaaacgatgggaaacaactgcaccccccaggaaaagcaaatatttctgagaagattaataagagatctggacccaaaagggggaaacatgcctggacccacagactgcgtgagagaaagcagctggtgatttatgaagagatcagcgaccctgaggaagatgacgagtaactcccctgggggatacgacacatgcccttgatgagaagcagaacgtggtgacctttcacgaacatgggcatggctgcggctccctcgtcatcaggtgcatagcaagtgaaagcaagtgttcacaacggtgaaaanttgagcgtcatttttcttagtgtgccaagagttcgatgttagtgtttccattgtattttcttacagtgtgccattctgttagatactatccttataattgatgagcaagacatactgaatgcatatttcggtttgtgtatccatgcacctacgtcagaaaacaagtattgtcaggtattctctccatagaacagcactatcctcatctctccccagatgtgactactgagggcagttctgagtgtttaatttcagactttttcctctgcatttacacacacacacacacacacacgcacacacacacaccaagtaccagtataagcatctcccatctgcttttcccattgccatgcgtcctggtcaagcccccctcactctgtttcctgttcagcatgtactcccctcatccgattcccctgtatcagtcactgacagttaataaacctttgcaaacgttccc

SEQ ID NO: 58200 - DNA, 1387 bp, Homo sapiens
  misc_feature (924)..(924): n is a, c, g, or t
tcctggagcagtgacattgcaggatattttctcctcctccagccacactttgtcaccaactgctgccaactcgccaccactgctgccgacctcgcaaccactgctttgtctctgaatagagacagggtttccttatgttggcagaactgggcttgacctcctcggctcaagtgatcctcccacctcggcctcggaactacaggtgagactgctcctggtgccatgaacggagacgacacctttgcaaagagacccagggatgatgctaaagcatcagagaagagaagcaaggcctttgatgatattgccacatacttctctaagaaagagtggaaaaagatgaaatactcggagaaaatcagctatgtgtatatgaagagaaactataaggccatgactaaactaggtttcaaagtcaccctcccacctttcatgtgtaataaacaggccacagacttccaggggaatgattttgataatgaccataaccgcaggattcaggttgaacatcctcagatgactttcggcaggctccacagaatcatcccgaagatcatgcccaagaagccagcagaggacgaaaatgattcgaagggagtgtcagaagcatctggcccacaaaacgatgggaaacaactgcaccccccaggaaaagcaaatatttctgagaagattaataagagatctggacccaaaagggggaaacatgcctggacccacagactgcgtgagagaaagcagctggtgatttatgaagagatcagcgaccctgaggaagatgacgagtaactcccctgggggatacgacacatgcccttgatgagaagcagaacgtggtgacctttcacgaacatgggcatggctgcggctccctcgtcatcaggtgcatagcaagtgaaagcaagtgttcacaacggtgaaaanttgagcgtcatttttcttagtgtgccaagagttcgatgttagtgtttccattgtattttcttacagtgtgccattctgttagatactatccttataattgatgagcaagacatactgaatgcatatttcggtttgtgtatccatgcacctacgtcagaaaacaagtattgtcaggtattctctccatagaacagcactatcctcatctctccccagatgtgactactgagggcagttctgagtgtttaatttcagactttttcctctgcatttacacacacacacacacacacacgcacacacacacaccaagtaccagtataagcatctcccatctgcttttcccattgccatgcgtcctggtcaagcccccctcactctgtttcctgttcagcatgtactcccctcatccgattcccctgtatcagtcactgacagttaataaacctttgcaaacgttccc

SEQ ID NO: 58201 - DNA, 897 bp, Homo sapiens
  misc_feature (797)..(797): n is a, c, g, or t
  misc_feature (817)..(817): n is a, c, g, or t
  misc_feature (848)..(848): n is a, c, g, or t
  misc_feature (854)..(854): n is a, c, g, or t
  misc_feature (866)..(866): n is a, c, g, or t
  misc_feature (869)..(870): n is a, c, g, or t
tcctggagcagtgacattgcaggatattttctcctcctccagccacactttgtcaccaactgctgccaactcgccaccactgctgccgacctcgcaaccactgctttgtctctgaatagagacagggtttccttatgttggcagaactgggcttgacctcctcggctcaagtgatcctcccacctcggcctcggaactacaggtgagactgctcctggtgccatgaacggagacgacacctttgcaaagagacccagggatgatgctaaagcatcagagaagagaagcaaggcctttgatgatattgccacatacttctctaagaaagagtggaaaaagatgaaatactcggagaaaatcagctatgtgtatatgaagagaaactataaggccatgactaaactaggtttcaaagtcaccctcccacctttcatgtgtaataaacaggccacagacttccaggggaatgattttgataatgaccataaccgcaggattcaggttgaacatcctcagatgactttcggcaggctccacagaatcatcccgaagatcatgcccaagaagccagcagaggacgaaaatgattcgaagggagtgtcagaagcatctggcccacaaaacgatgggaaacaactgcaccccccaggaaaagcaaatatttctgagaagattaataagagatctggacccaaaagggggaaacatgcctggacccacagactgcgtgagagaaagcagctggtgatttatgaagagatcagcgaccctgaggaagatgacgagtaactcccctnggggatacgacacatgcccntgatgagaagcagaacgtggtgacctttcangaacangggcatggctgnggnnccctcgtcatcaggtgcatagcaagtg

SEQ ID NO: 58202 - DNA, 315 bp, Homo sapiens
cggtggaactgattttctcactgactatagatgttgagcccattaatgtgatacctactgccttttaattttaaaagttctcattgttttatcgttttcatcattatcatatgatttacctcttctcttgtgtcttataatccgattggtcatgctgacatactaaaccatattgtttgccactgggaaccaattcatctgtgaaaagtcatacagataggctcgaagaaagagcttggttgtgatgttgttgttgtgacaactgtctcgggggctggagttagagccagggtcccagctgccacagttcatgta

SEQ ID NO: 58203 - DNA, 432 bp, Homo sapiens
atggaggactggggaaactaccaattctagacctagtttcttatttagatcccaaaatatgccgcacacaccaaggctcctgggagccctttctagccagaaataagtataatttgtggatacttgtcaaatgaaagatcactaggctaaagctaaagaaagctgaagagaaactaatgttctagatcatgctcactagcaaggagggaaaattttactagttgatagattcataaatctttgtcagcacaaaatctgacaagacattactgtcaatgatgacaaattatttggctctataaatctcttcccctttttaacaaatccagtgtgcaatcggaaaagctctttaggacatcctgcttataggaaacggcctacgtgacctgttaaatctcaccctacttccactttcagtgatgcacttaggat

SEQ ID NO: 58204 - DNA, 463 bp, Homo sapiens
aaaagaattgtaataatacatgccccaacaccccatttcagctttttttctcatgatataatgataaatctcctcacctgtgtggcacatgagagaacttgaaacattttcttagatatcatcttacctcttcacacaaaccttctgaggttattggagcatccattcacaagtatttgtgcattttactgaggacaagtcagctcagagtagtctggggctgagctggaacttgtgtctgggctttcaactcaaaagccagtgttttctccattcctgcctcaatctggggaagagaaaactcatgattctttgcagatcgcctaaatttccccttaatttggcaacttttggctcactccgtcatcagtcctggaggagcccttcacactgatcccatgaatggccctcaacacatgcacgagcaaggagcaagcgttcgacaagtgctctcgcagtactc

SEQ ID NO: 58205 - DNA, 451 bp, Homo sapiens
ataaaatgtacttttctctagtaacaatttttgtcttaaagtctactttgtccaaaatattagtagagctactctagctgccttttgcttttatggaagagttgattttcagaggcactgataaccattctggaaagcagaacctctaactacttcttacaactcttagagatagttgtcccggttttaggtctgctttctcccccatttccaaagttaccttttggagactccgtaatgctgcgtagctttgctgcttttattgctgcttaggatcagctttcttgggtcggctaagtcattacaatgagtccttctgctttccggtttcctaaattttgtaaccgttaactccttttctattttctttttcttttgagtttattactttttaaaaactcttcactattatatcaatggcttttccaaggaaacaaaattcaagagtgat

SEQ ID NO: 58206 - DNA, 2191 bp, Homo sapiens
  misc_feature (2184)..(2186): n is a, c, g, or t
  misc_feature (2189)..(2191): n is a, c, g, or t
gaaggaagggctggacattcagattccttgacccttgacatttggaagcatgaactccagtctctcacagaaggctagaggtgaaggaacattcagacacattggtttctaagaagagtccgctgacaacatacccaaggtgtcttctgaaaattataagaaatcctgagtttctgttaggggattggctccagctccattgtccctcccccatcattcagtagtctccgcgaaagcccttagagccggtgttgctccacaggaagccaagaagcacacaggaaaaggagcttagctgctggtgctgctggcaagatggaaaccaacttctccactcctctgaatgaatatgaagaagtgtcctatgagtctgctggctacactgttctgcggatcctcccattggtggtgcttggggtcacctttgtcctcggggtcctgggcaatgggcttgtgatctgggtggctggattccggatgacacgcacagtcaccaccatctgttacctgaacctggccctggctgacttttctttcacggccacattaccattcctcattgtctccatggccatgggagaaaaatggccttttggctggttcctgtgtaagttaattcacatcgtggtggacatcaacctctttggaagtgtcttcttgattggtttcattgcactggaccgctgcatttgtgtcctgcatccagtctgggcccagaaccaccgcactgtgagtctggccatgaaggtgatcgtcggaccttggattcttgctctagtccttaccttgccagttttcctctttttgactacagtaactattccaaatggggacacatactgtactttcaactttgcatcctggggtggcacccctgaggagaggctgaaggtggccattaccatgctgacagccagagggattatccggtttgtcattggctttagcttgccgatgtccattgttgccatctgctatgggctcattgcagccaagatccacaaaaagggcatgattaaatccagccgtcccttacgggtcctcactgctgtggtggcttctttcttcatctgttggtttccctttcaactggttgcccttctgggcaccgtctggctcaaagagatgttgttctatggcaagtacaaaatcattgacatcctggttaacccaacgagctccctggccttcttcaacagctgcctcaaccccatgctttacgtctttgtgggccaagacttccgagagagactgatccactccctgcccaccagtctggagagggccctgtctgaggactcagccccaactaatgacacggctgccaattctgcttcacctcctgcagagactgagttacaggcaatgtgaggatggggtcagggatattttgagttctgttcatcctaccctaatgccagttccagcttcatctacccttgagtcatattgaggcattcaaggatgcacagctcaagtatttattcaggaaaaatgcttttgtgtccctgatttggggctaagaaatagacagtcaggctactaaaatattagtgttattttttgttttttgacttctgcctataccctggggtaagtggagttgggaaatacaagaagagaaagaccagtggggatttgtaagacttagatgagatagcgcataataaggggaagactttaaagtataaagtaaaatgtttgctgtaggttttttatagctattaaaaaaaatcagattatggaagttttcttctatttttagtttgctaagagttttctgtttctttttcttacatcatgagtggactttgcattttatcaaatgcattttctacatgtattaagatggtcatattattcttcttcttttatgtaaatcattataaataatgttcattaagttctgaatgttaaactactcttgaattcctggaataaaccacacttagtcctgatgtactttaaatatttatatctcacaggagttggttagaatttctgtgtttatgtttatatactgttatttcactttttctactatccttgctaagttttcatagaaaataaggaacaaagagaaacttgtaatggtctctgaaaaggaattgagaagtaattcctctgattctgttttctggtgttatatctttattaaatattcagaaaaattcaccagtgaannnaannn

SEQ ID NO: 58207 - DNA, 2086 bp, Homo sapiens
gaaggaagggctggacattcagattccttgacccttgacatttggaagcatgaactccagtctctcacagaaggctagaggtgaaggaacattcagacacattggtttctaagaagagtccgctgacaacatacccaaggtgtcttctgaaaattataagaaatcctgagtttctgttaggggattggctccagctccattgtccctcccccatcattcagtagtctccgcgaaagcccttagagccggtgttgctccacaggaagccaagaagcacacaggaaaaggagcttagctgctggtgctgctggcaagatggaaaccaacttctccactcctctgaatgaatatgaagaagtgtcctatgagtctgctggctacactgttctgcggatcctcccattggtggtgcttggggtcacctttgtcctcggggtcctgggcaatgggcttgtgatctgggtggctggattccggatgacacgcacagtcaccaccatctgttacctgaacctggccctggctgacttttctttcacggccacattaccattcctcattgtctccatggccatgggagaaaaatggccttttggctggttcctgtgtaagttaattcacatcgtggtggacatcaacctctttggaagtgtcttcttgattggtttcattgcactggaccgctgcatttgtgtcctgcatccagtctgggcccagaaccaccgcactgtgagtctggccatgaaggtgatcgtcggaccttggattcttgctctagtccttaccttgccagttttcctctttttgactacagtaactattccaaatggggacacatactgtactttcaactttgcatcctggggtggcacccctgaggagaggctgaaggtggccattaccatgctgacagccagagggattatccggtttgtcattggctttagcttgccgatgtccattgttgccatctgctatgggctcattgcagccaagatccacaaaaagggcatgattaaatccagccgtcccttacgggtcctcactgctgtggtggcttctttcttcatctgttggtttccctttcaactggttgcccttctgggcaccgtctggctcaaagagatgttgttctatggcaagtacaaaatcattgacatcctggttaacccaacgagctccctggccttcttcaacagctgcctcaaccccatgctttacgtctttgtgggccaagacttccgagagagactgatccactccctgcccaccagtctggagagggccctgtctgaggactcagccccaactaatgacacggctgccaattctgcttcacctcctgcagagactgagttacaggcaatgtgaggatggggtcagggatattttgagttctgttcatcctaccctaatgccagttccagcttcatctacccttgagtcatattgaggcattcaaggatgcacagctcaagtatttattcaggaaaaatgcttttgtgtccctgatttggggctaagaaatagacagtcaggctactaaaatattagtgttattttttgttttttgacttctgcctataccctggggtaagtggagttgggaaatacaagaagagaaagaccagtggggatttgtaagacttagatgagatagcgcataataaggggaagactttaaagtataaagtaaaatgtttgctgtaggttttttatagctattaaaattctttttcttacatcatgagtggactttgcattttatcaaatgcattttctacatgtattaagatggtcatattattcttcttcttttatgtaaatcattataaataatgttcattaagttctgaatgttaaactactcttgaattcctggaataaaccacacttagtcctgatgtactttaaatatttatatctcacaggagttggttagaatttctgtgtttatgtttatatactgttatttcactttttctactatccttgctaagttttcatagaaactaggcgccatacgcgaacttagaaccggacctggacaagggattgagaagtctttccccctcatactggctat

SEQ ID NO: 58208 - DNA, 2648 bp, Homo sapiens
  misc_feature (2641)..(2643): n is a, c, g, or t
  misc_feature (2646)..(2648): n is a, c, g, or t
ggcacgaggaacaacctatttgcaaagttggcgcaaacattcctgcctgacaggaccatggacacaggttgtagagatagagatggctctggctgtgcattcagcagattctgtagatagaattaataggacttggatgggattgtggtgagagaaagtgaaatgaaagataagttctagtttggaagttttaacaactgaatgtttaaactcaaatagacacaaaatattggaagagtggcaggtttgggaggatgagacaatcaactgtttggttgagccacgttaggtttgaaatgtctacgggatcccgtggggagaggttatatcagactggagcaccagagagaggccaaggctgatagtttagatgaaaagagagcatgatattttaagccctgagactggataatatcacctatagaaagactatatagagataagagaggtggggaacaagtaaaagctgcgggacactcctaaatttagagtcaaatttagagcagaaaatactagcaaaggggactgaaaagcggtggccaattgagcttcaaatgcaagtgaaagtgtgttgtgtgtacatttatcatctcatggcacaggaaaaacgtgatttaaggagaaggaagcgatccaatgggaagaagagatccaatggatcctctatcacgaagatattgagataagaaccaatatggatttgcacccactgcatttgcagccttgaggtcataagcatcctcaggaaaatgcaccaggtgctgctggcaagatggaaaccaacttctccactcctctgaatgaatatgaagaagtgtcctatgagtctgctggctacactgttctgcggatcctcccattggtggtgcttggggtcacctttgtcctcggggtcctgggcaatgggcttgtgatctgggtggctggattccggatgacacgcacagtcaccaccatctgttacctgaacctggccctggctgacttttctttcacggccacattaccattcctcattgtctccatggccatgggagaaaaatggccttttggctggttcctgtgtaagttaattcacatcgtggtggacatcaacctctttggaagtgtcttcttgattggtttcattgcactggaccgctgcatttgtgtcctgcatccagtctgggcccagaaccaccgcactgtgagtctggccatgaaggtgatcgtcggaccttggattcttgctctagtccttaccttgccagttttcctctttttgactacagtaactattccaaatggggacacatactgtactttcaactttgcatcctggggtggcacccctgaggagaggctgaaggtggccattaccatgctgacagccagagggattatccggtttgtcattggctttagcttgccgatgtccattgttgccatctgctatgggctcattgcagccaagatccacaaaaagggcatgattaaatccagccgtcccttacgggtcctcactgctgtggtggcttctttcttcatctgttggtttccctttcaactggttgcccttctgggcaccgtctggctcaaagagatgttgttctatggcaagtacaaaatcattgacatcctggttaacccaacgagctccctggccttcttcaacagctgcctcaaccccatgctttacgtctttgtgggccaagacttccgagagagactgatccactccctgcccaccagtctggagagggccctgtctgaggactcagccccaactaatgacacggctgccaattctgcttcacctcctgcagagactgagttacaggcaatgtgaggatggggtcagggatattttgagttctgttcatcctaccctaatgccagttccagcttcatctacccttgagtcatattgaggcattcaaggatgcacagctcaagtatttattcaggaaaaatgcttttgtgtccctgatttggggctaagaaatagacagtcaggctactaaaatattagtgttattttttgttttttgacttctgcctataccctggggtaagtggagttgggaaatacaagaagagaaagaccagtggggatttgtaagacttagatgagatagcgcataataaggggaagactttaaagtataaagtaaaatgtttgctgtaggttttttatagctattaaaaaaaatcagattatggaagttttcttctatttttagtttgctaagagttttctgtttctttttcttacatcatgagtggactttgcattttatcaaatgcattttctacatgtattaagatggtcatattattcttcttcttttatgtaaatcattataaataatgttcattaagttctgaatgttaaactactcttgaattcctggaataaaccacacttagtcctgatgtactttaaatatttatatctcacaggagttggttagaatttctgtgtttatgtttatatactgttatttcactttttctactatccttgctaagttttcatagaaaataaggaacaaagagaaacttgtaatggtctctgaaaaggaattgagaagtaattcctctgattctgttttctggtgttatatctttattaaatattcagaaaaattcaccagtgaannnaannn

SEQ ID NO: 58209 - DNA, 428 bp, Homo sapiens
cagctacttgggaggctgaagcaggagaattgcttgaacctgggaggcggaggttgcagtgagcctagatcacgccactgcactccggcctgggcaacagagcaagactccatcttaaaaaactaaaaaaaaataaaaaatacaggccaggcgcaatagctcacgcctgtaatcaatgctcatctttccagaattgggaggctgagccgggcagatcacctgaggtcaggggttcgaaaacagcctgaccaacatggagaaaccccgtctctactaaaaaaatacaaaattagcggggtgtggtggcacatgcctgtaatcccagctacttgggaggctgaggcaggagaatcgcttgaacccgggagacagaggttgcggtgagccaagcccccttgcgccattgcactccagcctgggcaacaaga

SEQ ID NO: 58210 - DNA, 791 bp, Homo sapiens
ggtgttagtggcttggttggccagcagcttgctgttactgcaggaccctcctgggcagaggagaccctccagggaaatacacactattttatgtgctggttttgggcctaacgcctcatgggcattcttagccctgggagaccagtgtatgagctgggattgcctcacactaagaatagcaggaacccctagaagtctagggccattgtggctttggggagcccaggctccttgtttttttctgctgtgttattctgaaggcagctcaggatcccaggatactgtgatagtccttcacctccagcctcagtccaggcagggacaagcaacgcacctgcatcgggaaagcaaaactcagcaattgtggtcgacctccgcttgcagcctattggccagaggcaggtcacgtgaccactaggtgggtggtaatctggaaagcgttgggcgcactgctgtccctggacaaaatccagattcttgttagtgaggcagatgagaagaacggatgctggcaggcaaagagcagtgtctgtcacagctcagctgggctgtggcctccagctgttcacagggatattggggctttggcattcaaggggctcaaaggggaaccccctggggataggtctttgtttttcttttcctgtagggcagtggtattgaaccttggttgtgggttagaatcacctagagaacagtgagggaaaaagtgtctgtgcctcacctctgggtcaggagtgaggctaggcaaaggaatactttaaagaacttccctgtgattaaaaagaaaa

SEQ ID NO: 58211 - DNA, 430 bp, Homo sapiens
aatgagcatctccaggccctcctcactccggatgagccggacaagtcccaggggcaggacctccaagaacagctggctgaggggtgtagactggcacagcaccttgtccaaaagctcagcccagaaaatgatgaagatgaggatgaagatgttcaagttgaggaggatgagaaagtgctggaatcatcttcccccagggagatgcagaaggctgaagaaagcaaagtccctgaggactcactggaggaatgtgccatcacttgttcaaatagccacggcccttgtgactccaaccagcctcacaagaacatcaaaatcacatttgaggaagacaaagtcaactcatctctggttgtagacagagaatactctcatgatgaatgtcaggatgctctaaacattctcccaggtagcctctattttccttgtg

SEQ ID NO: 58212 - DNA, 2222 bp, Homo sapiens
ctcatccttcttggtgttctgtcatgggccatgggcttgctatggccagccttactgaggccaagcagcttatgggatgttctttattgtgtgtgatggtattggtttgtttggtagataagtgggaggaaaagtactgttgctacactattataggcatgtttgatactagcagctaacactggtcactccaaagcactgtttctataggaacattgaagctattaagatgttttgattatcctaattacataatgaccgatttgagatagaggcctttaaatacattccatgccctccccagaaaatagtctgtgggagtcagttgccttggtgccaggtatgtgttctgatgtaggtcatgagtctttctacttaatgggaagggaagaacatttgtttccaggatgactttctggccagaataccggaaagcttttaggaagcttcgttcacatgctatttaaatgcacaaaatagacagtaaggatttatctgttcagtttttcttcccagtgaattaatttcagcttatatgggtgtcttcatttgaacatgaggaatattaggttatattttcagcagtggttttttcctttgccctttaaggagtggggataatgtccacggtggcccagcctcttgctgatggcaccttccctgcattgctgcctcccgatgatgtggttcttttcttgtgcctgtggctttgggaatgtaacatctctttcctcctttccttcccttttcctcttcacctgaggtcctaaatactctctgtaattactgtgttcttcacggtaattagacatcattcagtgaataaattactgtagtcaaagacagtatgggctggcagtttgtgtaattgcaagttcataaagagaattgagggtccagttgggagaactattagtcagttcttttatatgctgataaatgatccctcgagttcagttagtattctgtccagagtgtttagctcactttcttagcagtgtgtaagctttctccatgtcagaagcaagcctgctctttgataaatctgtcttcctgaaaatctaaatcatgcttttgtctttagatctacacagaaatgaccctccttggatcagttttctttccagtctaatcatctttggaactaaaacttgttctaactcgtctcttggcattcagctactcctagatcttttggttttatcccctggcctcagagccatttatattcccagagtaggcagtacaggatctcgtgttgatttgctgtggttacccagtgtcttctctacatggcataaagcggcaaagcccaccattaggtgaggcggtcccgagttgaggtagagtggggcagaggaagatggcagtgaatatcaaacagtagaccgccatcaacttctaacagccagtacacacactgtttcattttgaggtaacgttcagttttgcattttgtttaaatattgaaggcctagacaaagaactagaaaaaaaaaagcagtttccaggcccatccatattgtaatttttctttatctgcagatattgcctgtagtctaaagatctctttggaagacaaagcattggctatatatcttttgccttttccatgcatctaaatcttctctggagattatctccctactgtgtaggttaagggcagtctcgacttttccttttttgagtcctgtgtggctctttgaatcagcgtgaaactgaggctccagctccctgtgttgtgtgtgtgtgccatccatgggcttgggtgtcagtttgtcacaggtatctgccagcattcaaggttttggatcatttcatgaggatctttcctttgactgggtgctgtgaggacacacctgggtctgtgcctgagattgccaggcaagattaaggaaagttttcatgtggcttttgttttgaggttattctcaaaaccttaatttcttatattttctgttgactaaggcaccagtaacccattcttcaccctccatttgtatggcaatttaaaagtctttggctttgctctgaatttaattaaaactgccttttatgaacagacttcgagttttgccattttgggcaagcccttccgcttgtcccttcctagtggctaataaagtaaaaaaacccacactactttgttctctttttctcatattcattgggctgttgtattcagccagtctcatgctttccctgggtcttcacggattgct

SEQ ID NO: 58213 - DNA, 1421 bp, Homo sapiens
ttgggagaactattctctttatgaacttgcaattacacaaactggaccctcaattctctttgtgtaattgcaagttcataaagagaattgagggtccagttgggagaactattagtcagttcttttatatgctgataaatgatccctcgagttcagttagtattctgtccagagtgtttagctcactttcttagcagtgtgtaagctttctccatgtcagaagcaagcctgctctttgataaatctgtcttcctgaaaatctaaatcatgcttttgtctttagatctacacagaaatgaccctccttggatcagttttctttccagtctaatcatctttggaactaaaacttgttctaactcgtctcttggcattcagctactcctagatcttttggttttatcccctggcctcagagccatttatattcccagagtaggcagtacaggatctcgtgttgatttgctgtggttacccagtgtcttctctacatggcataaagcggcaaagcccaccattaggtgaggcggtcccgagttgaggtagagtggggcagaggaagatggcagtgaatatcaaacagtagaccgccatcaacttctaacagccagtacacacactgtttcattttgaggtaacgttcagttttgcattttgtttaaatattgaaggcctagacaaagaactagaaaaaaaaaagcagtttccaggcccatccatattgtaatttttctttatctgcagatattgcctgtagtctaaagatctctttggaagacaaagcattggctatatatcttttgccttttccatgcatctaaatcttctctggagattatctccctactgtgtaggttaagggcagtctcgacttttccttttttgagtcctgtgtggctctttgaatcagcgtgaaactgaggctccagctccctgtgttgtgtgtgtgtgccatccatgggcttgggtgtcagtttgtcacaggtatctgccagcattcaaggttttggatcatttcatgaggatctttcctttgactgggtgctgtgaggacacacctgggtctgtgcctgagattgccaggcaagattaaggaaagttttcatgtggcttttgttttgaggttattctcaaaaccttaatttcttatattttctgttgactaaggcaccagtaacccattcttcaccctccatttgtatggcaatttaaaagtctttggctttgctctgaatttaattaaaactgccttttatgaacagacttcgagttttgccattttgggcaagcccttccgcttgtcccttcctagtggctaataaagtaaaaaaacccacactactttgttctctttttctcatattcattgggctgttgtattcagccagtctcatgctttccctgggtcttcacggattgct

SEQ ID NO: 58214 - DNA, 207 bp, Homo sapiens
ctcctcgacctcccaaagtgctgggattacaggcatgggccactgcgtccagccctgtatatgggtttttaattaaggtactatcttttctgtggtcgtaagaagggaactttaaaattactcctgtttgtaaatgtaaatatactagattttcttatccaaaagaatgttagctcatttaaagtgattatttcaacagtgctgttg

SEQ ID NO: 58215 - DNA, 253 bp, Homo sapiens
tactatattgtttctgttatcgaattataaatacataatccctgtgagcctagttcatttatgatgtaattgattctttgtgaacagcagaacttaaactcatattgctgctacacaagaataagaagccaggcatggtggtgcacacctgtagttccagctacttgggaggctgaggcgagaggatcgttggagctcgggaatttgagaccagcctaagcaatataacgagactctgtcactttaaaaagaa

SEQ ID NO: 58216 - DNA, 1693 bp, Homo sapiens
agggggcggggcacgcgcacctgccgtagagtgctgaaggtcctgccaacggctctcttggcgtctcaacgttcggatcagcagcttttttccattctctctctccacttcttcagtgagcagccatgagttggactgtgcctgttgtgcgggccagccagagaatgagctcggtgggagcgaatttcctatgcctggggatggccctgtgtctgcgtcaagcaacgcgcatcccgctcaacggcacctggctcttcacacccgtgagcaagatggcgactgtgaagagtgagcttattgagcgtttcacttccgagaagcccgttcatcacagtaaggtctccatcataggaactggatcggtgggcatggcctgcgctatcagcatcttattaaaaggcttgagtgatgaacttgcccttgtggatcttgatgaagacaaactgaagggtgagacgatggatcttcaacatggcagccctttcacgaaaatgccaaatattgtttgtagcaaagattactttgtcacagcaaactccaacctagtgattatcacagcaggtgcacgccaagaaaagggagaaacgcgccttaatttagtccagcgaaatgtggccatcttcaagttaatgatttccagtattgtccagtacagcccccactgcaaactgattattgtttccaatccagtggatatcttaacttatgtagcttggaagttgagtgcatttcccaaaaaccgtattattggaagcggctgtaatctggatactgctcgttttcgtttcttgattggacaaaagcttggtatccattctgaaagctgccatggatggatcctcggagagcatggagactcaagtgttcctgtgtggagtggagtgaacatagctggtgtccctttgaaggatctgaactctgatataggaactgataaagatcctgagcaatggaaaaatgtccacaaagaagtgactgcaactgcctatgagattattaaaatgaaaggttatacttcttgggccattggcctatctgtggccgatttaacagaaagtattttgaagaatcttaggagaatacatccagtttccaccataattaagggcctctatggaatagatgaagaagtattcctcagtattccttgtatcctgggagagaacggtattaccaaccttataaagataaagctgacccctgaagaagaggcccatctgaaaaaaagtgcaaaaacactctgggaaattcagaataagcttaagctttaaagttgcctaaaactaccattccgaaattattgaagagatcatagatacaggattatataacgaaattttgaataaacttgaattcctaaaagatggaaacaggaaagtaggtagagtgattttcctatttatttagtcctccagctcttttattgagcatccacgtgctggacgatacttatttacaattcctaagtatttttggtacctctgatgtagcagcacttgccatgttatatatatgtagttggcatttggttcccaaaaagtaggatgtaggtatttattgtgttctagaaattccgactcttttcattagatatatgctatttctttcattcttgctggtttatacctatgttcatttatatgctgtaaaaaagtagtagcttcttctacaatgtaaaaataaatgtacatac

SEQ ID NO: 58217 - DNA, 507 bp, Homo sapiens
gaattgatccccttaccattatgtaatggccttctttgtctcttttgatctctgctggtttaaagtctgttttatcagagactaggattgcaacccctgccttttgttttccatttgcttggtagatcttcctccatccctttattttgagcctgtgtgtgtctctgcatatgagatgggtctccagtttttctaggatggacactttcttttataaagtgtctcttctgagaagaatttgcattcaattccctcaggtgcctacaggcaccaccaacataagcccacctaaactgcatttttgtcttgattttggggggatcacactagtagtataaatttaggctctaacctgattaggtaggggctttgagtaaagaattatcaggaaagacttttcatttgtttccactctaactaaagccaaaaccaagataggtacttaataacagtctccctgagtggtagggcaacttttgttcccctcttttggcaaccaagagtgtc

SEQ ID NO: 58218 - DNA, 577 bp, Homo sapiens
  misc_feature (544)..(544): n is a, c, g, or t
caggttatggaactttattaaagcagcctgaactgctgaagatggaaattgatcatgagaagtgggagtgctgttattataaatacctaaaacaaagtgaaaatggttttgggctcagtgattggcagagattgatgaggttttatgcaaaatgctagattactgtggaaaaaatttaaaagccaattctcgtgagggctcggaaagaaatatagaagaaaacgctgtcttctcagaaaataattaaataatcatgaacagaatattgataaaatatggacagtaaaggtcattctgttggagtctcaaatggaaatgaatatgttattggaaaatggagcaaaagcaatccatgttgaaaagtggaaacaaacttttttgaattgtattcatgctcttgtgttttgcggaaggtggaacttgtgtgcagtgaaattggacatttaacccagcagatttctcagcaacatgtagaagcagcagcttggttccttctgaatctgtagagtcaaatgtagaaaaagaaaaaggtttgaagatggantggttaaggaaaaagtaaccataatttaagatc

SEQ ID NO: 58219 - DNA, 472 bp, Homo sapiens
taatctgatatatttacttacatccaaatctaaatttctgcattaaaaaaaccataatttattgtaagcaaaattaaaagacaacttcaaggttggagaaagcatgaaacacaggaaacacagggttaacattgctaatctgcatattgccccaatcaattagttataaaatgacaatacaacaggaaaaagcaggcaaatgatattatagtagaattttcaccacatctgtttttcttccctgtaagagaaaaatgctttaccaccctggtgagctcagacatggccatatgatttggttgggtcaatgaagtatgtcacaagcagacactttaagatttatgttttgatttgttgtgttctgtttaccttattctgcagcaaccagtgatattctgaatactatctgctcccaaccaacccaggattaaaatacaatgtgagaattaaacttttgttttaaaccactgaa

SEQ ID NO: 58220 - DNA, 365 bp, Homo sapiens
ggtacatgtgcacaacgtgcgggtttgttacatatgtatacatatgccatgttagtgtgctgcacccattaactcgtcatttagcattaggtatatctcctaatgctatccctcctccctccccctacgccacaacagtccctggtgtgtgatgttccccttcctgtgtccatgtgttctcattattcaattcccacctacgagtgagaacatgctgtgtttggttttttgtccttgcgatagccagatgcagctactcttaatgtgcatattttcatcctagaacattggagagttcctgtaaagccttgtgttccaggaggaaggagatcctgacccttctgctgatggcagcagtcacgggg

SEQ ID NO: 58221 - DNA, 306 bp, Homo sapiens
  misc_feature (4)..(5): n is a, c, g, or t
  misc_feature (59)..(59): n is a, c, g, or t
  misc_feature (130)..(130): n is a, c, g, or t
  misc_feature (304)..(304): n is a, c, g, or t
  misc_feature (306)..(306): n is a, c, g, or t
agtnngctaggggactgggatttctctgattaaatacttaatgttatcagcacatggtntaggtgcaggcaaactaccatgcattagccagtctggcccactacctgttttcaggaataaaactttgttngaatacagttacatgctttgttaatatactgtgtatggttactttcatgctacatcagagttcaatagatgtgacagagaccacctggcctgcaaaaccagaaatatttcctagctggccctttataggaaacatttactgaccacggacttatactattgttatgctagctcncn

SEQ ID NO: 58222 - DNA, 357 bp, Homo sapiens
acagacccccatccaggaaacatcctgagcactaattgaaaagcattcaagggcttactgaatttgcattcacatctggagttttcaaggccactaagctgtggaaacttgacatcaatattcaaatagatgaaaagggaccttaagcatatccatcagggagtcaccgagatgataaaggcctgagaagcagtatgctcttgtccggcatttgtgtcctttgacgactgcaccatccacccaaattttgctgccttctttataggaagggccttttcctcatgtggtgggctgcccactgtttcttctctgtgcatttgctcatgtagtttgaccacaaggaatgcttttccttct

SEQ ID NO: 58223 - DNA, 476 bp, Homo sapiens
cttcattagcagttctagcttcttatgcatttgagagtaacaaatcgaattaaatagtagtttttccttgttattttagattggcatgtgccacccactgcatagtgaactttcccagtgcgtttttaaaaaaacatttatttgtttatttttagagccaggatctttgctatgttgctatgctggatttgaactcgggctcaagtcctacctcagcctcctaagttagctgtgactacaggcgcgcaccaccacgcccggctaatttttttttaatgtattttttatagacagggttcttaccatgttgcctaggctggtcttgaactcttggacttaggcgatccgcctacctcggcctcccaaagtgctgggattacaggcctgagccaccgcggctggactgcgcccggcctagaagggcaattattttatagtaacttaatactaagacagctatcttgttagagcagtct

SEQ ID NO: 58224 - DNA, 414 bp, Homo sapiens
cttcattagcagttctagcttcttatgcatttgagagtaacaaatcgaattaaatagtagtttttccttgttattttagattggcatgtgccacccactgcatagtgaactttcccagtgcgtttttaaaaaaacatttatttgtttatttttagagccaggatctttgctatgttgctatgctggatttgaactcgggctcaagtcctacctcagcctcctaagttagctgtgactacaggcgtgtgctactgtgcccagcccagtgcttttattagtacagtcctatctgagtatttcatgaaattatttagtaaaatagaatttagattttttgtcttacatccacgtttttattctttcatacattgccctaaaatctcacgagttggtgtgatttctaaaagttaactt

SEQ ID NO: 58225 - DNA, 313 bp, Homo sapiens
  misc_feature (26)..(26): n is a, c, g, or t
  misc_feature (34)..(35): n is a, c, g, or t
  misc_feature (53)..(53): n is a, c, g, or t
  misc_feature (292)..(292): n is a, c, g, or t
gtgtgccaccacacctggctaatttntgtatttnnagtagagatagggttttnccacgtggatcaggctggtctcgaactccagacctcggttaacacagtttggttttatttggggagtggttggctatttaatccataattcaaatccactaatatcagtgagaaatgttcatacttagaatgacatatgaaaatacataaaaataaaaggcatttttaaactgaggcggatcttgcattgagccaagatcacgccactgcactccagcctgggcgacagaatgaggctncatctcaaaaaaaagggggga

SEQ ID NO: 58226 - DNA, 238 bp, Homo sapiens
gttagtcccatagaacagaatgtgttaaattaattggtgttcatgggagccagctcttaatctcaaaatcattaatataaaattttaactaactgtacatacaaaagattttggaaaaatcagtacagtcaaatccatggacattcttttattatgttattttatacatatagatgtacatatataaatctatatctacatctacctacccttctattcatctacccatctgtctatc

SEQ ID NO: 58227 - DNA, 598 bp, Homo sapiens
gtgacatagaggtatcctgccacaggaccctctgctccattcccaagtcctgactgggatatattctccttggttcctaaaattcatatctgttgattaatcccttaaactctgatggcttcctgattaaatgtagatcaaaatacccataagacaattttcagccaattaatttatggctgtgtgagtgctcactggcctttacaaatccgttctgaggacctataggatgccaaatgtcacaaaggttcactttccagttgccctctttgaaattcacatctcttctaggccaagaaaaaccaggaaattctgtggatcctccacacacactccttcaccttcttcaccagcacctgggaggtgatcaggagtgcagctgtcaaactcacagatgccgttgttctcaatttgaccagccaatatgtggagttactagacagagaacaactgaccacacgactccaagcacttcgtcaagatccgtgtattagtgtccagagagcagctgaggctgctttgcaaaccctcctgagaaggtgtaaagagacaagcattcctctgtaagccatcaagaaataaactgctggcttttcct

SEQ ID NO: 58228 - DNA, 386 bp, Homo sapiens
ataagggcggcatatgataatgtgggtgttctctgaggaagggtacaaatagtacaatattaatgaatttatgttcttagccaagaaaaaccaggaaattctgtggatcctccacacacactccttcaccttcttcaccagcacctgggaggtgatcaggagtgcagctgtcaaactcacagatgccgttgttctcaatttgaccagccaatatgtggagttactagacagagaacaactgaccacacgactccaagcacttcgtcaagatccgtgtattagtgtccagagagcagctgaggctgctttgcaaaccctcctgagaaggtgtaaagagacaagcattcctctgtaagccatcaagaaataaactgctggcttttcct

SEQ ID NO: 58229 - DNA, 1378 bp, Homo sapiens
tcccctcaggtggcctgtgctatgtatgaagtgatctcaatgggcacctctgtcaccggcttgtatccagagctgttcactctcctcctgaagctggttagctgcacactgggccagaagatgctcacttgtccctggagccataggcggcatgtgatgcagcagggagaacagcagcagatcccagacccctgcaggctttcaactgctactttaaaatgtttgcaagcccaagccatgagagaaggccttgcaaaggaatctgatgagggggacaacttatggactctactcagcagtcctagtacccaccacataggcgtatgttcactggccaggagcatggcagtgtggcaacacggagtcatactggacatcatggaacagctgctctcatctcttacctcctcctcggagaactaccggataaccggcgcagctttcttctctgagctcatgaaggaaccaatcctttggaagcatgggaatctgcgaaatgtgctgatcttgatggatcaaagtgcctgggactccaacgccactctgaggcagatggccatccgagggctcggcaacacagcatccggggctcctcacaaggtgaagaaacataagcagttaatgctagaatctatcatcagaggcctgtatcacctagctcgcactgaagtcgtctgtgaaagcttgaaggctctaaaaaaaatcctggagctgctgacagaccgagacgtgagcttctacttcaaggaaatagtgctgcaaacaaggaccttctttgaagatgagcaggatgatgtgagattgactgccatcttcttatttgaggacctggcacccctaacaggaagaaggtggaagattttttttgctgaagaaataaaaaagagcctgatttcattccttctgcacctttgggatcccaaccccaagattggagttgcttgccgtgatgtcttgatggtctgcattccctttttgggcctccaggagctctatggggtattagaccgtctccttgatcaggatctaccaagggccagggatttctacaggcaattctgtgtgaaactggccaagaaaaaccaggaaattctgtggatcctccacacacactccttcaccttcttcaccagcacctgggaggtgatcaggagtgcagctgtcaaactcacagatgccgttgttctcaatttgaccagccaatatgtggagttactagacagagaacaactgaccacacgactccaagcacttcgtcaagatccgtgtattagtgtccagagagcagctgaggctgctttgcaaaccctcctgagaaggtgtaaagagacaagcattcctctgtaagccatcaagaaataaactgctggcttttcct

SEQ ID NO: 58230 - DNA, 1489 bp, Homo sapiens
tcccctcaggtggcctgtgctatgtatgaagtgatctcaatgggcacctctgtcaccggcttgtatccagagctgttcactctcctcctgaagctggttagctgcacactgggccagaagatgctcacttgtccctggagccataggcggcatgtgatgcagcagggagaacagcagcagatcccagacccctgcaggctttcaactgctactttaaaatgtttgcaagcccaagccatgagagaaggccttgcaaaggaatctgatgagggggacaacttatggactctactcagcagtcctagtacccaccacataggcgtatgttcactggccaggagcatggcagtgtggcaacacggagtcatactggacatcatggaacagctgctctcatctcttacctcctcctcggagaactaccggataaccggcgcagctttcttctctgagctcatgaaggaaccaatcctttggaagcatgggaatctgcgaaatgtgctgatcttgatggatcaaagtgcctgggactccaacgccactctgaggcagatggccatccgagggctcggcaacacagcatccggggctcctcacaaggtgaagaaacataagcagttaatgctagaatctatcatcagaggcctgtatcacctagctcgcactgaagtcgtctgtgaaagcttgaaggctctaaaaaaaatcctggagctgctgacagaccgagacgtgagcttctacttcaaggaaatagtgctgcaaacaaggaccttctttgaagatgagcaggatgatgtgagattgactgccatcttcttatttgaggacctggcacccctaacaggaagaaggtggaagattttttttgctgaagaaataaaaaagagcctgatttcattccttctgcacctttgggatcccaaccccaagattggagttgcttgccgtgatgtcttgatggtctgcattccctttttgggcctccaggagctctatggggtattagaccgtctccttgatcaggatctaccaagggccagggatttctacaggcaattctgtgtgaaactggccaagaaaaaccaggaaattctgtggatcctccacacacactccttcaccttcttcaccagcacctgggaggtgatcaggagtgcagctgtcaaactcacagatgccgttgttctcaatttgaccagccaatatgtggagttactagacagagaacaactgaccacacacactagaatttctccagggtacaaagcaatctccagctccagccctttgcaggcatcagaaacaccaatagactacgattttccaattgcctaaacctactgatcacaaggactccaagcacttcgtcaagatccgtgtattagtgtccagagagcagctgaggctgctttgcaaaccctcctgagaaggtgtaaagagacaagcattcctctgtaagccatcaagaaataaactgctggcttttcct

SEQ ID NO: 58231 - DNA, 601 bp, Homo sapiens
  misc_feature (15)..(16): n is a, c, g, or t
ggcaccgcgctaggnnagtggagatccggctttttagtttaaatggttcttgtataactcattttcttttaaaaagacgcgattttttttgctgaagaaataaaaaagagcctgatttcattccttctgcacctttgggatcccaaccccaagattggagttgcttgccgtgatgtcttgatggtctgcattccctttttgggcctccaggagctctatggggtattagaccgtctccttgatcaggatctaccaagggccagggatttctacaggcaattctgtgtgaaactggccaagaaaaaccaggaaattctgtggatcctccacacacactccttcaccttcttcaccagcacctgggaggtgatcaggagtgcagctgtcaaactcacagatgccgttgttctcaatttgaccagccaatatgtggagttactagacagagaacaactgaccacacgactccaagcacttcgtcaagatccgtgtattagtgtccagagagcagctgaggctgctttgcaaaccctcctgagaaggtgtaaagagacaagcattcctctgtaagccatcaagaaataaactgctggcttttcct

SEQ ID NO: 58232 - DNA, 193 bp, Homo sapiens
ggaggctgaggtgagaggatcccttgagcccaggaagtcaaggttgcagcaaacagtgattgcaccactacactccagcctgggcaacacagcaagatcctgtctcaaaaaaaaaaaaaaatatcagtattgttttattaattgtaacaaacacactaaataaatgtaagatgccaacactaggggaaatagg

SEQ ID NO: 58233 - DNA, 4037 bp, Homo sapiens
  misc_feature (2425)..(2425): n is a, c, g, or t
aaagaacaagatttaaagaccaacaagatattatctgaaatagaaaaagaagaatttatgagaagtaaaaccgattgtgccactcctgattttgttcctgagcctagtcctcatgacttgcctatggatgaacatgttttaccagatgatgctgatataaattttggatactgtgaagtggaagaaaaatgtagacagtcttttgaggcttggcaagagaaacagaaggaattagaagataaagagaaacaaactctcaaagctcagagggatagagaagaaaaacaatttcaagaagaagaagaaaagcgacattgctggatgaaacaatttaaagttgaaaagaagaaattagagaacattcagaagcaagaacaggacaagatgaatgatgaactctataaagaagagaaaatttggaaagagaaatttaaacagcatgaggagtatattagaaacttgcatttacaaatggaagaagaaagaacaagatttaaagaccaacaagaaaaagaaaaaaattctttgttaaaacagcagaataatgcagctgttaaaattcaagctaaatataaagcatttgttgcctatcaaaaatatggcccaattattaaagagcaaattgaaagtaagaaaaggaaagcacaagagtggaaggaaaaggaagcaaaaatacgacaaaaggaggaagaaaatcgaaaaagattagaggaggaacaaaggataaaagaagagagaaaaaagcaaaaggaagaggaaaggaaaaggagagaaaaagaatatgaagaaaaaaagaatattgtgaaacaggaaagagagcaactaataagcaaggaaaaaataatattaagagaagatgcaagccaacagctaataataagtagtgcattaaagaagagcggatataataacaaacatttaagtcttgaagatatttcaaatgataagggtgatatagccaaaaatctagtggatgaaaattcaaagaagcaggaagatgttctcctttggctagttgaggaatcaaatatgaaagaaaatgtagatagacagactatattaaaagaatcaatacaagtaaagttaaaagaatctatatcaagccaaacaattctggcagattttaaaatggaagaaaaaaatgaaaacctagcaaaaaaacgatgttcagaagaattggtcaagcaagaaagaaaatatgaaaatacagataacaaaactgaattgggaaactctgatctaaaaggaaatctgaaagaacagtttccattgcaagaattaaagtctgatgcacaaaaagaagaaaaaatcatgaaacatgtcataaatgagaatacaggacaaaaaacccagataatattaggacataaccaagaaatcagtgaggtgaaaaccaatgaagagcagaaaataatcaaagataatcagcagaaaaagatacaaaaagtagaaaaagaagagatacaagaacagaatggattattatataaagataaggatactttagttatttcagtgaaacaaagatcactctcactaacatcagaaaattccaaagatgtaagagaaaacgtaatattacaagaaaaagaaatttattcaaaatccaaagaaattgaggagaacccaaaagacaatgcttggaatagtggcattgtgatttttaacacaactgataccatgataaatatagaaggcaaaagaaatgaccaagattatgtgttaggtagacatgctccttgtgagggcttgagtaactataatgcagaaagctccatggtatctaaagaagtcaactctcttaaatctgagattagaaatatttcagaaaaatgccatgaaaatgcacctgaacctgatagcatgacctgctgtgtatcagagtcaacccttctatattctattgaagaaaggagactagcctggataaaatcatttaaaccttggcttgaaattttcaagcaaaatcaacaaaagaaaattgttagaagaaagagacctgtgaaatgcccagccaacatgacacccgctttggataaactggaaattcttcgatgtggcccttgggatactttacagcaggttacaacagttacatttcaagatttgccaggctgtgttctctccacactggcagagtgtacaaatcttcagtttctatcccttcgacgctgtggattaacttctttgcacagcctgagtaattgtaaaaaacttaagtacattgatgcacaggaaaaccatattgaggctattgagtgtgaaaatttggaaaatctctgtgttgttcttcttaataaaaatcaactgacttctcttcatggtttggatggctgtactaatattcagtgtcttgaactttcatataataaaattactcgaattggatattccttctttctggaagaaaaacttgttgacaatncagggttctgccatcacttgggcacctccacttcttacttatccctggcacaagtctggattccaactggattatgttggtcctggatacctattacctcacttacaaaaaattcagattgtaatttccttatctcccacttatactggaattgtggtttagaatctttgaaaaatcttcaacaactaattttggaccacaatcagttaattaatacaaaaggtctttgtgatacacctaccattgtatacctagattgctcccataatcatcttactgatgtagagggcgttgaaaattgtggattgctccaaatattgaagttacagggaaattatctgagtgagcttccatccttggagaatcttgttttactaagagaattgcacttggatgataacagcatttcaactgtggaagcattttcttcatactggctgcctttactacaaaatattactatctctcaaaacagcttgactaaaatcgtaccactttttcattttgtttcattggaaaagctagatgtcagccacaattgtctttctgatcttaaaagtgccataaaatggtttgatgcatgctattctctccatgaattgtctcttactggaaacccacttcttcaagaaacaaactggagggattctctacttaaagtgttgcctgctctgagaatcctcaatggcaatatactaaactctaattcagaaagccgcactgaagaacacaatcaactgggatcagcaggtttcctggcactttgtcagtctcagattcgagaattcaacttgctaattgaaaattatataactggaaaaggagatgtatttaccttggatactgcagaaaatctctgtcattattttaagaaattgatgatacttagtactgaataccgacatgcacacgaacgaggggatgtaactatcaccaagaaagatgaatcagaagcccagaaaaatcatttggcccctacaaacagtgacagcactctgcaaaatggagtcttctactcttgtgcacgtgaaggtgagccagactcaccagatattcctgagaaatggatggactctgtctccagccactccccattaagcaaatccgccacatgtgaaaatatggaaggaagacatcaggaaatattagtatgtcagaagagagaagacagcaaggcaagcagtattcccaccataagaatcccatttaaggaagtagtaatgacaaattctttgctgaggaatcaccaaaatattgagcctagtgaaaaaatgtaagatatataaataatgtttcttttatagatgtatgtttactccttttgatggatgatattagtcaatggtacctagtaatttgctgaaggattcaaatcacaatcatatttcataccgattccattatgttttcgtgaggtgcattatgttttcatgaggtgcacaaatcattaattatagtgcatattaatttgattaaattctcatttaatttctagtagtatttaaatgagtaaatgtgagtttttttctgccttgtaatttctaaataattaatatgttttaaggagaaataaaatatcacagtctaaaaataataaaaacattttctgagt

SEQ ID NO: 58234 - DNA, 1881 bp, Homo sapiens
  misc_feature (1018)..(1018): n is a, c, g, or t
gtgtgattggctgttgccatggatacgctttgtgtagcggctatgggcgctgtcttacaacaaagccaaggaatctcgctgctgagggcagttctgtgctttattatgaagaataatggacgatgatgatgcaaagctcaaagcagaaatagaagctgaattggataaactcagcatttcctccttggaaaaagaagacattgagagtgatgcaaaatcagaaacccagagtgatgatagtgatacagattcagttgaattaccagaatcagttcttcactgtattaacatcataaagaacaggagtaaagctgttgaagagctcattcttcaggacctggaagatactgatattttaagctgtagttatggagcagtttctaataatcatatgcatttaagaacaggactatcaactgaatatgaagaaagttcagagcaattaattaagatattatctgaaatagaaaaagaagaatttatgagaagtaaaaccgattgtgccactcctgattttgttcctgagcctagtcctcatgacttgcctatggatgaacatgttttaccagatgatgctgatataaattttggatactgtgaagtggaagaaaaatgtagacagtcttttgaggcttggcaagagaaacagaaggaattagaagataaagagaaacaaactctcaaagctcagagggatagagaagaaaaacaatttcaagaagaagaagaaaagcgacattgctggatgaaacaatttaaagttgaaaagaagaaattagagaacattcagaaggtattttgcttttgtttttcatgtatttttaaaatcagtagctacctctgaagaatattgatatttggattgtgttgcagattgagcttaatagtatgacttttaattactctctgatagaggaagaaattgactgtgaattaacagtatttaatatgaggtccttgattagtttttattgaaattcattggaaggtcagacacacttctgatcttgggggccantggagtctatgaatttcaagggtcatcatggatagcctgaaatttacaatataaattgttgtttttctttatatgcttctaaacattggaaaaagcaatgaaaaattcttgagtatgcattaaccttgctctgtggtctggcatatgacatgtaaaacatatttaaaagtagttcaaccatttagagtcagtctgcgccccaccttcataattaagctacttccttgaactggcaactttttggtgtgaagttttgtactgttttcatttctgtcgtatgtgttgttggtgttgttttccccctaggagatccacacaatcagatcatagtggtggtatatcggtattgagaaactggtggattttaggacaccacttgcaggtcatgagaaccttagaatatttggataacaggcatgactgacttctctatctttcatgattaaagttgatttatacattatccagaacttgctgggtttgagtgttgcatataaagaacattagcttgttcaacattttttaatcctccatgttgaggacatttcatttcttgactgtgtagaaaataaacacattaaaggctgggcgcggtggctcacgcctgtaatcccagcaccttgggaggccgagacgggtgtataacgaggtcaggagatcgagatcatcctggctaacacggtgaaaccccgtctctactaaaaatagagaaaattagccaggcatagtggcgggcgcctctagtcccagctacccgggaggctgaggcaggagaatggcgtgaacccgggaggcagaccttgcagtgagccaagatcgtgccactgcactccagcctgggcgacagagcaagactccgtctc

SEQ ID NO: 58235 - DNA, 4461 bp, Homo sapiens
  misc_feature (2849)..(2849): n is a, c, g, or t
gtgtgattggctgttgccatggatacgctttgtgtagcggctatgggcgctgtcttacaacaaagccaaggaatctcgctgctgagggcagttctgtgctttattatgaagaataatggacgatgatgatgcaaagctcaaagcagaaatagaagctgaattggataaactcagcatttcctccttggaaaaagaagacattgagagtgatgcaaaatcagaaacccagagtgatgatagtgatacagattcagttgaattaccagaatcagttcttcactgtattaacatcataaagaacaggagtaaagctgttgaagagctcattcttcaggacctggaagatactgatattttaagctgtagttatggagcagtttctaataatcatatgcatttaagaacaggactatcaactgaatatgaagaaagttcagagcaattaattaagatattatctgaaatagaaaaagaagaatttatgagaagtaaaaccgattgtgccactcctgattttgttcctgagcctagtcctcatgacttgcctatggatgaacatgttttaccagatgatgctgatataaattttggatactgtgaagtggaagaaaaatgtagacagtcttttgaggcttggcaagagaaacagaaggaattagaagataaagagaaacaaactctcaaagctcagagggatagagaagaaaaacaatttcaagaagaagaagaaaagcgacattgctggatgaaacaatttaaagttgaaaagaagaaattagagaacattcagaagcaagaacaggacaagatgaatgatgaactctataaagaagagaaaatttggaaagagaaatttaaacagcatgaggagtatattagaaacttgcatttacaaatggaagaagaaagaacaagatttaaagaccaacaagaaaaagaaaaaaattctttgttaaaacagcagaataatgcagctgttaaaattcaagctaaatataaagcatttgttgcctatcaaaaatatggcccaattattaaagagcaaattgaaagtaagaaaaggaaagcacaagagtggaaggaaaaggaagcaaaaatacgacaaaaggaggaagaaaatcgaaaaagattagaggaggaacaaaggataaaagaagagagaaaaaagcaaaaggaagaggaaaggaaaaggagagaaaaagaatatgaagaaaaaaagaatattgtgaaacaggaaagagagcaactaataagcaaggaaaaaataatattaagagaagatgcaagccaacagctaataataagtagtgcattaaagaagagcggatataataacaaacatttaagtcttgaagatatttcaaatgataagggtgatatagccaaaaatctagtggatgaaaattcaaagaagcaggaagatgttctcctttggctagttgaggaatcaaatatgaaagaaaatgtagatagacagactatattaaaagaatcaatacaagtaaagttaaaagaatctatatcaagccaaacaattctggcagattttaaaatggaagaaaaaaatgaaaacctagcaaaaaaacgatgttcagaagaattggtcaagcaagaaagaaaatatgaaaatacagataacaaaactgaattgggaaactctgatctaaaaggaaatctgaaagaacagtttccattgcaagaattaaagtctgatgcacaaaaagaagaaaaaatcatgaaacatgtcataaatgagaatacaggacaaaaaacccagataatattaggacataaccaagaaatcagtgaggtgaaaaccaatgaagagcagaaaataatcaaagataatcagcagaaaaagatacaaaaagtagaaaaagaagagatacaagaacagaatggattattatataaagataaggatactttagttatttcagtgaaacaaagatcactctcactaacatcagaaaattccaaagatgtaagagaaaacgtaatattacaagaaaaagaaatttattcaaaatccaaagaaattgaggagaacccaaaagacaatgcttggaatagtggcattgtgatttttaacacaactgataccatgataaatatagaaggcaaaagaaatgaccaagattatgtgttaggtagacatgctccttgtgagggcttgagtaactataatgcagaaagctccatggtatctaaagaagtcaactctcttaaatctgagattagaaatatttcagaaaaatgccatgaaaatgcacctgaacctgatagcatgacctgctgtgtatcagagtcaacccttctatattctattgaagaaaggagactagcctggataaaatcatttaaaccttggcttgaaattttcaagcaaaatcaacaaaagaaaattgttagaagaaagagacctgtgaaatgcccagccaacatgacacccgctttggataaactggaaattcttcgatgtggcccttgggatactttacagcaggttacaacagttacatttcaagatttgccaggctgtgttctctccacactggcagagtgtacaaatcttcagtttctatcccttcgacgctgtggattaacttctttgcacagcctgagtaattgtaaaaaacttaagtacattgatgcacaggaaaaccatattgaggctattgagtgtgaaaatttggaaaatctctgtgttgttcttcttaataaaaatcaactgacttctcttcatggtttggatggctgtactaatattcagtgtcttgaactttcatataataaaattactcgaattggatattccttctttctggaagaaaaacttgttgacaatncagggttctgccatcacttgggcacctccacttcttacttatccctggcacaagtctggattccaactggattatgttggtcctggatacctattacctcacttacaaaaaattcagattgtaatttccttatctcccacttatactggaattgtggtttagaatctttgaaaaatcttcaacaactaattttggaccacaatcagttaattaatacaaaaggtctttgtgatacacctaccattgtatacctagattgctcccataatcatcttactgatgtagagggcgttgaaaattgtggattgctccaaatattgaagttacagggaaattatctgagtgagcttccatccttggagaatcttgttttactaagagaattgcacttggatgataacagcatttcaactgtggaagcattttcttcatactggctgcctttactacaaaatattactatctctcaaaacagcttgactaaaatcgtaccactttttcattttgtttcattggaaaagctagatgtcagccacaattgtctttctgatcttaaaagtgccataaaatggtttgatgcatgctattctctccatgaattgtctcttactggaaacccacttcttcaagaaacaaactggagggattctctacttaaagtgttgcctgctctgagaatcctcaatggcaatatactaaactctaattcagaaagccgcactgaagaacacaatcaactgggatcagcaggtttcctggcactttgtcagtctcagattcgagaattcaacttgctaattgaaaattatataactggaaaaggagatgtatttaccttggatactgcagaaaatctctgtcattattttaagaaattgatgatacttagtactgaataccgacatgcacacgaacgaggggatgtaactatcaccaagaaagatgaatcagaagcccagaaaaatcatttggcccctacaaacagtgacagcactctgcaaaatggagtcttctactcttgtgcacgtgaaggtgagccagactcaccagatattcctgagaaatggatggactctgtctccagccactccccattaagcaaatccgccacatgtgaaaatatggaaggaagacatcaggaaatattagtatgtcagaagagagaagacagcaaggcaagcagtattcccaccataagaatcccatttaaggaagtagtaatgacaaattctttgctgaggaatcaccaaaatattgagcctagtgaaaaaatgtaagatatataaataatgtttcttttatagatgtatgtttactccttttgatggatgatattagtcaatggtacctagtaatttgctgaaggattcaaatcacaatcatatttcataccgattccattatgttttcgtgaggtgcattatgttttcatgaggtgcacaaatcattaattatagtgcatattaatttgattaaattctcatttaatttctagtagtatttaaatgagtaaatgtgagtttttttctgccttgtaatttctaaataattaatatgttttaaggagaaataaaatatcacagtctaaaaataataaaaacattttctgagt

SEQ ID NO: 58236 - DNA, 4727 bp, Homo sapiens
  misc_feature (2849)..(2849): n is a, c, g, or t
gtgtgattggctgttgccatggatacgctttgtgtagcggctatgggcgctgtcttacaacaaagccaaggaatctcgctgctgagggcagttctgtgctttattatgaagaataatggacgatgatgatgcaaagctcaaagcagaaatagaagctgaattggataaactcagcatttcctccttggaaaaagaagacattgagagtgatgcaaaatcagaaacccagagtgatgatagtgatacagattcagttgaattaccagaatcagttcttcactgtattaacatcataaagaacaggagtaaagctgttgaagagctcattcttcaggacctggaagatactgatattttaagctgtagttatggagcagtttctaataatcatatgcatttaagaacaggactatcaactgaatatgaagaaagttcagagcaattaattaagatattatctgaaatagaaaaagaagaatttatgagaagtaaaaccgattgtgccactcctgattttgttcctgagcctagtcctcatgacttgcctatggatgaacatgttttaccagatgatgctgatataaattttggatactgtgaagtggaagaaaaatgtagacagtcttttgaggcttggcaagagaaacagaaggaattagaagataaagagaaacaaactctcaaagctcagagggatagagaagaaaaacaatttcaagaagaagaagaaaagcgacattgctggatgaaacaatttaaagttgaaaagaagaaattagagaacattcagaagcaagaacaggacaagatgaatgatgaactctataaagaagagaaaatttggaaagagaaatttaaacagcatgaggagtatattagaaacttgcatttacaaatggaagaagaaagaacaagatttaaagaccaacaagaaaaagaaaaaaattctttgttaaaacagcagaataatgcagctgttaaaattcaagctaaatataaagcatttgttgcctatcaaaaatatggcccaattattaaagagcaaattgaaagtaagaaaaggaaagcacaagagtggaaggaaaaggaagcaaaaatacgacaaaaggaggaagaaaatcgaaaaagattagaggaggaacaaaggataaaagaagagagaaaaaagcaaaaggaagaggaaaggaaaaggagagaaaaagaatatgaagaaaaaaagaatattgtgaaacaggaaagagagcaactaataagcaaggaaaaaataatattaagagaagatgcaagccaacagctaataataagtagtgcattaaagaagagcggatataataacaaacatttaagtcttgaagatatttcaaatgataagggtgatatagccaaaaatctagtggatgaaaattcaaagaagcaggaagatgttctcctttggctagttgaggaatcaaatatgaaagaaaatgtagatagacagactatattaaaagaatcaatacaagtaaagttaaaagaatctatatcaagccaaacaattctggcagattttaaaatggaagaaaaaaatgaaaacctagcaaaaaaacgatgttcagaagaattggtcaagcaagaaagaaaatatgaaaatacagataacaaaactgaattgggaaactctgatctaaaaggaaatctgaaagaacagtttccattgcaagaattaaagtctgatgcacaaaaagaagaaaaaatcatgaaacatgtcataaatgagaatacaggacaaaaaacccagataatattaggacataaccaagaaatcagtgaggtgaaaaccaatgaagagcagaaaataatcaaagataatcagcagaaaaagatacaaaaagtagaaaaagaagagatacaagaacagaatggattattatataaagataaggatactttagttatttcagtgaaacaaagatcactctcactaacatcagaaaattccaaagatgtaagagaaaacgtaatattacaagaaaaagaaatttattcaaaatccaaagaaattgaggagaacccaaaagacaatgcttggaatagtggcattgtgatttttaacacaactgataccatgataaatatagaaggcaaaagaaatgaccaagattatgtgttaggtagacatgctccttgtgagggcttgagtaactataatgcagaaagctccatggtatctaaagaagtcaactctcttaaatctgagattagaaatatttcagaaaaatgccatgaaaatgcacctgaacctgatagcatgacctgctgtgtatcagagtcaacccttctatattctattgaagaaaggagactagcctggataaaatcatttaaaccttggcttgaaattttcaagcaaaatcaacaaaagaaaattgttagaagaaagagacctgtgaaatgcccagccaacatgacacccgctttggataaactggaaattcttcgatgtggcccttgggatactttacagcaggttacaacagttacatttcaagatttgccaggctgtgttctctccacactggcagagtgtacaaatcttcagtttctatcccttcgacgctgtggattaacttctttgcacagcctgagtaattgtaaaaaacttaagtacattgatgcacaggaaaaccatattgaggctattgagtgtgaaaatttggaaaatctctgtgttgttcttcttaataaaaatcaactgacttctcttcatggtttggatggctgtactaatattcagtgtcttgaactttcatataataaaattactcgaattggatattccttctttctggaagaaaaacttgttgacaatncagggttctgccatcacttgggcacctccacttcttacttatccctggcacaagtctggattccaactggattatgttggtcctggatacctattacctcacttacaaaaaattcagattgtaatttccttatctcccacttatactggaattgtggtttagaatctttgaaaaatcttcaacaactaattttggaccacaatcagttaattaatacaaaaggtctttgtgatacacctaccattgtatacctagattgctcccataatcatcttactgatgtagagggcgttgaaaattgtggattgctccaaatattgaagttacagggaaattatctgagtgagcttccatccttggagaatcttgttttactaagagaattgcacttggatgataacagcatttcaactgtggaagcattttcttcatactggctgcctttactacaaaatattactatctctcaaaacagcttgactaaaatcgtaccactttttcattttgtttcattggaaaagctagatgtcagccacaattgtctttctgatcttaaaagtgccataaaatggtttgatgcatgctattctctccatgaattgtctcttactggaaacccacttcttcaagaaacaaactggagggattctctacttaaagtgttgcctgctctgagaatcctcaatggcaatatactaaactctaattcagaaagccgcactgaagaacacaatcaactgggatcagcaggtttcctggcactttgtcagtctcagattcgagaattcaacttgctaattgaaaattatataactggaaaaggagatgtatttaccttggatactgcagaaaatctctgtcattattttaagaaattgatgatacttagtactgaataccgacatgcacacgaacgaggggatgtaactatcaccaagaaagatgaatcagaagcccagaaaaatcatttggcccctacaaacagtgacagcactctgcaaaatggagtcttctactcttgtgcacgtgaaggtgagccagactcaccagatattcctgagaaatggatggactctgtctccagccactccccattaagcaaatccgccacatgtgaaaatatggaaggaagacatcaggaaatattagtatgtcagaagagagaagacagcaaggcaagcagtattcccaccataagaatcccatttaaggaagtagtaatgacaaattctttgctgaggaatcaccaaaatattgagcctagtgaaaaaattatggcagctgtggtaatccagtcatactggcgtggttacctcatgcgcagacagactcatttctccacaaggctacatactgctgcaacagaaggcctgccaaattcttccatcaagaatcagactattttaaagaaaggaaaaagagaaaatattgtgaatatccgaaaacagagggagaaggctgctattcttattcaggcagtttggaagggctttattttgcgaaagaaactgacaacagctctagaggctattaagaatgaagaatccgatgaagaatacagagaaatagatttagaggattttatatttgatgaagctgccttagaagaagaatggctagcattagattccacccgcttcccttcacaaacactgcttctttcaaaccagctgcattggccaaagattcctggaaacttaaaatgggatgatacttcatttaatttaccaagtaatccagctcaagcatggttatgtaatgacaaagaaaatttgtcttcttcagaacacacacaatttaatagcagatcagaaaataaaacttcttcctggacacctgaatcaaagaccagtagaaagagtttgctaaaatctgaaa

SEQ ID NO: 58237 - DNA, 4386 bp, Homo sapiens
  misc_feature (2774)..(2774): n is a, c, g, or t
gtgtgattggctgttgccatggatacgctttgtgtagcggctatgggcgctgtcttacaacaaagccaaggaatctcgctgctgagggcagttctgtgctttattatgaagaataatggacgatgatgatgcaaagctcaaagcagaaatagaagctgaattggataaactcagcatttcctccttggaaaaagaagacattgagagtgatgcaaaatcagaaacccagagtgatgatagtgatacagattcagttgaattaccagaatcagttcttcactgtattaacatcataaagaacaggagtaaagctgttgaagagctcattcttcaggacctggaagatactgatattttaagctgtagttatggagcagtttctaataatcatatgcatttaagaacaggactatcaactgaatatgaagaaagttcagagcaattaattaagatattatctgaaatagaaaaagaagaatttatgagaagtaaaaccgattgtgccactcctgattttgttcctgagcctagtcctcatgacttgcctatggatgaacatgttttaccagatgatgctgatataaattttggatactgtgaagtggaagaaaaatgtagacagtcttttgaggcttggcaagagaaacagaaggaattagaagataaagagaaacaaactctcaaagctcagagggatagagaagaaaaacaatttcaagaagaagaagaaaagcgacattgctggatgaaacaatttaaagttgaaaagaagaaattagagaacattcagaaggagtatattagaaacttgcatttacaaatggaagaagaaagaacaagatttaaagaccaacaagaaaaagaaaaaaattctttgttaaaacagcagaataatgcagctgttaaaattcaagctaaatataaagcatttgttgcctatcaaaaatatggcccaattattaaagagcaaattgaaagtaagaaaaggaaagcacaagagtggaaggaaaaggaagcaaaaatacgacaaaaggaggaagaaaatcgaaaaagattagaggaggaacaaaggataaaagaagagagaaaaaagcaaaaggaagaggaaaggaaaaggagagaaaaagaatatgaagaaaaaaagaatattgtgaaacaggaaagagagcaactaataagcaaggaaaaaataatattaagagaagatgcaagccaacagctaataataagtagtgcattaaagaagagcggatataataacaaacatttaagtcttgaagatatttcaaatgataagggtgatatagccaaaaatctagtggatgaaaattcaaagaagcaggaagatgttctcctttggctagttgaggaatcaaatatgaaagaaaatgtagatagacagactatattaaaagaatcaatacaagtaaagttaaaagaatctatatcaagccaaacaattctggcagattttaaaatggaagaaaaaaatgaaaacctagcaaaaaaacgatgttcagaagaattggtcaagcaagaaagaaaatatgaaaatacagataacaaaactgaattgggaaactctgatctaaaaggaaatctgaaagaacagtttccattgcaagaattaaagtctgatgcacaaaaagaagaaaaaatcatgaaacatgtcataaatgagaatacaggacaaaaaacccagataatattaggacataaccaagaaatcagtgaggtgaaaaccaatgaagagcagaaaataatcaaagataatcagcagaaaaagatacaaaaagtagaaaaagaagagatacaagaacagaatggattattatataaagataaggatactttagttatttcagtgaaacaaagatcactctcactaacatcagaaaattccaaagatgtaagagaaaacgtaatattacaagaaaaagaaatttattcaaaatccaaagaaattgaggagaacccaaaagacaatgcttggaatagtggcattgtgatttttaacacaactgataccatgataaatatagaaggcaaaagaaatgaccaagattatgtgttaggtagacatgctccttgtgagggcttgagtaactataatgcagaaagctccatggtatctaaagaagtcaactctcttaaatctgagattagaaatatttcagaaaaatgccatgaaaatgcacctgaacctgatagcatgacctgctgtgtatcagagtcaacccttctatattctattgaagaaaggagactagcctggataaaatcatttaaaccttggcttgaaattttcaagcaaaatcaacaaaagaaaattgttagaagaaagagacctgtgaaatgcccagccaacatgacacccgctttggataaactggaaattcttcgatgtggcccttgggatactttacagcaggttacaacagttacatttcaagatttgccaggctgtgttctctccacactggcagagtgtacaaatcttcagtttctatcccttcgacgctgtggattaacttctttgcacagcctgagtaattgtaaaaaacttaagtacattgatgcacaggaaaaccatattgaggctattgagtgtgaaaatttggaaaatctctgtgttgttcttcttaataaaaatcaactgacttctcttcatggtttggatggctgtactaatattcagtgtcttgaactttcatataataaaattactcgaattggatattccttctttctggaagaaaaacttgttgacaatncagggttctgccatcacttgggcacctccacttcttacttatccctggcacaagtctggattccaactggattatgttggtcctggatacctattacctcacttacaaaaaattcagattgtaatttccttatctcccacttatactggaattgtggtttagaatctttgaaaaatcttcaacaactaattttggaccacaatcagttaattaatacaaaaggtctttgtgatacacctaccattgtatacctagattgctcccataatcatcttactgatgtagagggcgttgaaaattgtggattgctccaaatattgaagttacagggaaattatctgagtgagcttccatccttggagaatcttgttttactaagagaattgcacttggatgataacagcatttcaactgtggaagcattttcttcatactggctgcctttactacaaaatattactatctctcaaaacagcttgactaaaatcgtaccactttttcattttgtttcattggaaaagctagatgtcagccacaattgtctttctgatcttaaaagtgccataaaatggtttgatgcatgctattctctccatgaattgtctcttactggaaacccacttcttcaagaaacaaactggagggattctctacttaaagtgttgcctgctctgagaatcctcaatggcaatatactaaactctaattcagaaagccgcactgaagaacacaatcaactgggatcagcaggtttcctggcactttgtcagtctcagattcgagaattcaacttgctaattgaaaattatataactggaaaaggagatgtatttaccttggatactgcagaaaatctctgtcattattttaagaaattgatgatacttagtactgaataccgacatgcacacgaacgaggggatgtaactatcaccaagaaagatgaatcagaagcccagaaaaatcatttggcccctacaaacagtgacagcactctgcaaaatggagtcttctactcttgtgcacgtgaaggtgagccagactcaccagatattcctgagaaatggatggactctgtctccagccactccccattaagcaaatccgccacatgtgaaaatatggaaggaagacatcaggaaatattagtatgtcagaagagagaagacagcaaggcaagcagtattcccaccataagaatcccatttaaggaagtagtaatgacaaattctttgctgaggaatcaccaaaatattgagcctagtgaaaaaatgtaagatatataaataatgtttcttttatagatgtatgtttactccttttgatggatgatattagtcaatggtacctagtaatttgctgaaggattcaaatcacaatcatatttcataccgattccattatgttttcgtgaggtgcattatgttttcatgaggtgcacaaatcattaattatagtgcatattaatttgattaaattctcatttaatttctagtagtatttaaatgagtaaatgtgagtttttttctgccttgtaatttctaaataattaatatgttttaaggagaaataaaatatcacagtctaaaaataataaaaacattttctgagt

SEQ ID NO: 58238 - DNA, 3806 bp, Homo sapiens
  misc_feature (2194)..(2194): n is a, c, g, or t
atctgagtgagcttccatccttggagaatcttgttttactaagagaattgcacttggatgataacagcatttcaactgtggaagcattttcttcatactggctgcctttactacaaaatattactatctctcaaaacagcttgactaaaatcgtaccactttttcattttgtttcattggaaaagctagatgtcagccacaattgtctttctggagtatattagaaacttgcatttacaaatggaagaagaaagaacaagatttaaagaccaacaagaaaaagaaaaaaattctttgttaaaacagcagaataatgcagctgttaaaattcaagctaaatataaagcatttgttgcctatcaaaaatatggcccaattattaaagagcaaattgaaagtaagaaaaggaaagcacaagagtggaaggaaaaggaagcaaaaatacgacaaaaggaggaagaaaatcgaaaaagattagaggaggaacaaaggataaaagaagagagaaaaaagcaaaaggaagaggaaaggaaaaggagagaaaaagaatatgaagaaaaaaagaatattgtgaaacaggaaagagagcaactaataagcaaggaaaaaataatattaagagaagatgcaagccaacagctaataataagtagtgcattaaagaagagcggatataataacaaacatttaagtcttgaagatatttcaaatgataagggtgatatagccaaaaatctagtggatgaaaattcaaagaagcaggaagatgttctcctttggctagttgaggaatcaaatatgaaagaaaatgtagatagacagactatattaaaagaatcaatacaagtaaagttaaaagaatctatatcaagccaaacaattctggcagattttaaaatggaagaaaaaaatgaaaacctagcaaaaaaacgatgttcagaagaattggtcaagcaagaaagaaaatatgaaaatacagataacaaaactgaattgggaaactctgatctaaaaggaaatctgaaagaacagtttccattgcaagaattaaagtctgatgcacaaaaagaagaaaaaatcatgaaacatgtcataaatgagaatacaggacaaaaaacccagataatattaggacataaccaagaaatcagtgaggtgaaaaccaatgaagagcagaaaataatcaaagataatcagcagaaaaagatacaaaaagtagaaaaagaagagatacaagaacagaatggattattatataaagataaggatactttagttatttcagtgaaacaaagatcactctcactaacatcagaaaattccaaagatgtaagagaaaacgtaatattacaagaaaaagaaatttattcaaaatccaaagaaattgaggagaacccaaaagacaatgcttggaatagtggcattgtgatttttaacacaactgataccatgataaatatagaaggcaaaagaaatgaccaagattatgtgttaggtagacatgctccttgtgagggcttgagtaactataatgcagaaagctccatggtatctaaagaagtcaactctcttaaatctgagattagaaatatttcagaaaaatgccatgaaaatgcacctgaacctgatagcatgacctgctgtgtatcagagtcaacccttctatattctattgaagaaaggagactagcctggataaaatcatttaaaccttggcttgaaattttcaagcaaaatcaacaaaagaaaattgttagaagaaagagacctgtgaaatgcccagccaacatgacacccgctttggataaactggaaattcttcgatgtggcccttgggatactttacagcaggttacaacagttacatttcaagatttgccaggctgtgttctctccacactggcagagtgtacaaatcttcagtttctatcccttcgacgctgtggattaacttctttgcacagcctgagtaattgtaaaaaacttaagtacattgatgcacaggaaaaccatattgaggctattgagtgtgaaaatttggaaaatctctgtgttgttcttcttaataaaaatcaactgacttctcttcatggtttggatggctgtactaatattcagtgtcttgaactttcatataataaaattactcgaattggatattccttctttctggaagaaaaacttgttgacaatncagggttctgccatcacttgggcacctccacttcttacttatccctggcacaagtctggattccaactggattatgttggtcctggatacctattacctcacttacaaaaaattcagattgtaatttccttatctcccacttatactggaattgtggtttagaatctttgaaaaatcttcaacaactaattttggaccacaatcagttaattaatacaaaaggtctttgtgatacacctaccattgtatacctagattgctcccataatcatcttactgatgtagagggcgttgaaaattgtggattgctccaaatattgaagttacagggaaattatctgagtgagcttccatccttggagaatcttgttttactaagagaattgcacttggatgataacagcatttcaactgtggaagcattttcttcatactggctgcctttactacaaaatattactatctctcaaaacagcttgactaaaatcgtaccactttttcattttgtttcattggaaaagctagatgtcagccacaattgtctttctgatcttaaaagtgccataaaatggtttgatgcatgctattctctccatgaattgtctcttactggaaacccacttcttcaagaaacaaactggagggattctctacttaaagtgttgcctgctctgagaatcctcaatggcaatatactaaactctaattcagaaagccgcactgaagaacacaatcaactgggatcagcaggtttcctggcactttgtcagtctcagattcgagaattcaacttgctaattgaaaattatataactggaaaaggagatgtatttaccttggatactgcagaaaatctctgtcattattttaagaaattgatgatacttagtactgaataccgacatgcacacgaacgaggggatgtaactatcaccaagaaagatgaatcagaagcccagaaaaatcatttggcccctacaaacagtgacagcactctgcaaaatggagtcttctactcttgtgcacgtgaaggtgagccagactcaccagatattcctgagaaatggatggactctgtctccagccactccccattaagcaaatccgccacatgtgaaaatatggaaggaagacatcaggaaatattagtatgtcagaagagagaagacagcaaggcaagcagtattcccaccataagaatcccatttaaggaagtagtaatgacaaattctttgctgaggaatcaccaaaatattgagcctagtgaaaaaatgtaagatatataaataatgtttcttttatagatgtatgtttactccttttgatggatgatattagtcaatggtacctagtaatttgctgaaggattcaaatcacaatcatatttcataccgattccattatgttttcgtgaggtgcattatgttttcatgaggtgcacaaatcattaattatagtgcatattaatttgattaaattctcatttaatttctagtagtatttaaatgagtaaatgtgagtttttttctgccttgtaatttctaaataattaatatgttttaaggagaaataaaatatcacagtctaaaaataataaaaacattttctgagt

SEQ ID NO: 58239 - DNA, 518 bp, Homo sapiens
caccccacatacaatggtgagacagggcctgattaacaacaatagccgttctcattcaagatgagagagacaagaatgacaatatattaactttttaaaatttatattgtttaaaatacttgttatcctctgtattttctgtattttaaaacaataatatttaatatattaaaaattaattatttattagtttacctaatattttcatccaaatagtataacagtttgcagggttatcttagaagttaaagattcagatattaatttggagatcctatctcatctttctttcctctttttgaaagctttaaatagttcattaataagccattgaaataaaactaattacatttgttctttgcttcaggaaaaccatattgaggctattgagtgtgaaaatttggaaaatctctgtgttgttcttcttaataaaaatcaactgacttctcttcatggtttggatggctgtactaatattcagtgtcttgaactttcatataataaaattactcgaattg

SEQ ID NO: 58240 - DNA, 518 bp, Homo sapiens
ctagcttctcaggcaatggatagggctataaagctcccaaaagtttatgtctttgtgttaagttaccagggcaggtagagaaataccatcaggtagggtcaggattaggcaggtctgagctcagactctccttgtccggggcctgcctcagccactgtggggaacagagggtggttcccaggccaccaggataatgttccagaagaaagtataactgtctctactgtgcagaagagttcacaaagggagtgaggattagctgacagcagtaggtcccacccagctcccacacagttggtgaggctggtctcactcccacagtgtcccgctaacagcaccaggtttagatccaggcagtctgcacacagaactcagacctgacccaagccataagctcccccagagagacagcaataacagctttaaggccattcccttccccatctgcccggaaggcaggcacccagcttctgtgtttgcgtctgcagcatacttcctgctcactcctggattctgtt

SEQ ID NO: 58241 - DNA, 1586 bp, Homo sapiens
agcacttgggagcaagagtctttgtgactggcactcatggacagacagtggtgttcagggacagaacagattttggagggggtggggaggccaataaaccaagaaacgtcagaaataaaagtcgcatgaagtactctgatctctgtatttccttttttttttttttttttgtgaaatttgattttaactcttgcttttttttaatggtttggtgtctgttttttccacccccgctggcgccgagctgcgctgttttgtggttctctttttttttttttttttcttctattttttttttaaattctgaagccagaccgtctttcctcacagctccacggctgcatctccgtgggcacgcaagcttcccctggttacctgagctgctcctgccgtctcccgcctgggcttcgccgtggtgcacccgatcccggaatcgtgcgtctgcgccctgcgaaagaaggacctgctggcggagctccggccggggtctcctgcctcgcagctgggcgaggggacttggaggacagggtgaagctgcagaagacctggggtgggatggctagagaggacgccaaggactggggaaggggaagttaggaataccttacatccaatgcccacccgtgctccgcagggcaagggcagccgtcgcctcggccgcgtgcacccagctcaggctgttcccagggatttagtctggggggacaacccatggcgagatgtggtggcattttacctcagagtggagctgaagatggataaacaaggtatctgatgtatctgcctgagaaggcagagctggagaaaggcggagcgagggagcgcgtgaaaagaaagagatgccgaatgccgggtgattgtctgccgcttgctgtgcattctcattctagggaggatggcataatttataacccagcacatggatagaggaactgtaaattgtagtctggatgtccccggcgctgtcgacgaaggaactgatgggctaggtgactgtaccagtgtccccagagaaaatcgcagcctcgcagcatggatttaaatgcatgtgcatgcatgtagagacatgaaaaaaggtttctgaccattttacacaggaagtctgtcactttgctggatcgggcttgattgcagcttgtgttttcagctccagttcaacacccatttcctgactagtgagacagcatggccaaagcagctgcatgcagaattttctttttactgtgaaagcaagccccctctgttttaactccttccagttctgaatgctctgtgctttgctaggaccgattgtggggttttgttttcttcttctacaaatccctgtaaacacagctgtattcagtaatggcaaaaaaattctatcctgtaaatagaaatctgatcaatttaatcaaaataaatgtatcccagatgactttgagaccagctggctaccacaggcttcagatgctaaatgctcagtggagatgaatacagtgttatatttacatgtttcagagtgccgggatcagcctataatttgcaaaaagaaattattttctaaagacgagaggtggtcctaccagctcacagctgatggttag

SEQ ID NO: 58242 - DNA, 1887 bp, Homo sapiens
gtctgctccgggacttggaacaaaagggggaactctgatgaactctctttcctcccctctcccccggacgccggggtatctccctctcgcaactttgccgccccgactttctctgctgtcaggccgggaaaaagtgtccgaacgcctcgtggactgcagcgggggaaatgtcccttaaaagtgcgacgaagtggggaagaaggtgtaattactattatcagcatctagaaagcatcatgaatttgctggagtacttcctagcactgacctccttcattctgcgttgttcttactggatctttccatcagccaacaatatggaagtaccaatacaaggtcaaatcattcctggattcatctggagttgcttaaaagttaaatcattggaatttttgatgataccttttctatatggattacaatttgatcgctgggaattctccaccttaaagaagtaccctcaggtgactacagatgtgttaacacccagcatgttccggtaggagactttctggatggggaagatttccaggaattggcaacaagctcatttcactggtgggtttgctgaagcattatcacaagacagtcagaatgactgatgagtgctcttcaggtgtgaatcatggcaatacagtgaaagacagtgatttactgcttttgagggcgtgcatgtatatgattaacggatggaagtgcaggactccaagatttacttccttccctttccagcagaattacctgagacgagtaaaatctactggtggagtcactccattattcttatctgtggagatctagatcttgatttgaaagtttctgagaaaatcttcagctcagacttgagggtcaactttaccagctgaaggatctgcatttactgctcaaccacatctaatttgatgtcctctgcagatttaaaatgtgtgccttcttttccgtcaccaagtcatccctgggttactactgaacatccttctcaattccccccgacccatggatggctgttctccattgtctgtttcaccagatgtcctcaaaacaaacagacagaagaaggaagtggctaatggagctgtggagtccaagtgtgactgccaagaggaatccagcaaagccaaaaagcccaagcatgtagccctgcccgaagcacgccacacgcatggaaaacccagaggaaatgagtgaggatcaatgggaagaagagagccagccaggaagttgaagatttgtccaggagcagatagctgaagagagagagagagaagagagaacggcttacagctcaggtcctctctccatgcttaggaaccactacaaatgctactgccttgagtctcattttgtttccctctggaaaccacatgtgtaccttgtttgcaacagtatgggctcacaggcagaaggaattttccttgtcttggatgagacttttgacttggacttttgggttaagttctggagaccagaaggccaaaatcaaaagtatgggcaggcttgatttctttagaagactccagcggagaactgtgtctccttgcttctgattctacatctccatccatgggccactgtttcagcaacctcagccagtgcaacacaacctcagccaagaagagtatgcagagaaaggagtcccctacctgccacaaaactgttgtctgaaaactgtctcatattgtctcaagttgtcattcattgtgaattagacctgtttaacatgtaatctgcaacatgcttcactgtctaattttccagagcccctcatataaggaactgtattattggtataatcatcatggtgaagaagttggtatgtgggggagagatgacagaaacagagagtaagtcagagctggctgcctgacagataaaaaggaaatgacc

SEQ ID NO: 58243 - DNA, 487 bp, Homo sapiens
agagggaagagataatttccagaaggaaagggtgggtcaactgtatcacatgccacagagaagccaagtgaagataagcttacaaaagtgtgaatcatggcaatacagtgaaagacagtgatttactgcttttgagggcgtgcatgtatatgattaacggatggaagtgcaggactccaagatttacttccttccctttccagcagaattacctgagacgagtgagtaatgggataatttgtaataccacaggccccttttcaagggaccagtaatcaaaacaggaagatgaaactgagaagatttcaactggaagaatacaacttttgataatttctggatatacctcttaattgcaagcaggagagtcttcagagttttcctgtggttttttttgttgttgttgttgttgttgttgttgttgttgttgttgttgtttgagatggaattttgctccagcctgggtgacagagcaagattctgtctc

SEQ ID NO: 58244 - DNA, 651 bp, Homo sapiens
gaatccgccccctatagggcaagtggcccaagtaacccaaattgcgggcgccatggagggggggggattggtaagttggagtcttgctctgtcacctaggctggagtacagtggcgctatctcggctcactgcaacctctgcctcccaggttcaatgatcctcctgccttagccttcttagtagctgggaccacaggcatgtgccattgtgtctggctgtaatttgcttttttgtaggagctctttataaattctaggtagtagcattttatgtgtcttttagacattctctccaagtttgtggcttgtcagctccctttctttatgagtcatttttaatgaacaaacatgaagtcaaagcacttagtttttttttttttgagacggagtccctctctgtcacctaggctggagtacagtggcgtaatcttggatcactgcaacctctgcctcccgggttcaagtgattcttctacctcagcctcctaagtagctgggattacaggtgtgttccactacgtctagctaattcttgtatttttagtattgacagggtttcactatgtttgtcaggctagtcgtgaactcctgaccttgtgatccgccaggcctcccaaagtgctgggattacagacatgagccaccacaccc

SEQ ID NO: 58245 - DNA, 366 bp, Homo sapiens
gaggcattcagtagaaagtagtggaaaattggttgggggtcatacatctaagcttaggagcattatatgcaatcttacaatattctcaaggccaaatctcatgcatatctttatgcagcccctgtcagagactgcgtttaagaaagaagatactttaaaaaaatggttaaaatggttttttttttttttttttggagacagaatctcgaagtcttggagtctcactctgttgcccaggctggagtacactgtagtcccagctactcaggaggctgagacaggagagtcacttgagctgggcggaggctgcagtgagctgtgatcgtgccactgcacttcagccagggcaacaaagcaagacccctc

SEQ ID NO: 58246 - DNA, 2008 bp, Homo sapiens
gtctgctccgggacttggaacaaaagggggaactctgatgaactctctttcctcccctctcccccggacgccggggtatctccctctcgcaactttgccgccccgactttctctgctgtcaggccgggaaaaagtgtccgaacgcctcgtggactgcagcgggggaaatgtcccttaaaagtgcgacgaagtggggaagaaggtgtaattactattatcagcatctagaaagcatcatgaatttgctggagtacttcctagcactgacctccttcattctgcgttgttcttactggatctttccatcagccaacaatatggaagtaccaatacaaggtcaaatcattcctggattcatctggagttgcttaaaagttaaatcattggaatttttgatgataccttttctatatggattacaatttgatcgctgggaattctccaccttaaagaagtaccctcaggtgactacagatgtgttaacacccagcatgttccggtaggagactttctggatggggaagatttccaggaattggcaacaagctcatttcactggtgggtttgctgaagcattatcacaagacagtcagaatgactgatgagtgctcttcaggtgtgaatcatggcaatacagtgaaagacagtgatttactgcttttgagggcgtgcatgtatatgattaacggatggaagtgcaggactccaagatttacttccttccctttccagcagaattacctgagacgagtaaaatctactggtggagtcactccattattcttatctgtggagatctagatcttgatttgaaagtttctgagaaaatcttcagctcagacttgagggtcaactttaccagctgaaggatctgcatttactgctcaaccacatctaatttgatgtcctctgcagatttaaaatgtgtgccttcttttccgtcaccaagtcatccctgggttactactgaacatccttctcaattccccccgacccatggatggctgttctccattgtctgtttcaccagatgtcctcaaaacaaacagacagaagaaggaagtggctaatggagctgtggagtccaagtgtgactgccaagaggaatccagcaaagccaaaaagcccaagcatgtagccctgcccgaagcacgccacacgcatggaaaacccagaggaaatgagtgaggatcaatgggaagaagagagccagccaggaagttgaagatttgtccaggagcagatagctgaagagagagagagagaagagagaacggcttacagctcaggtcctctctccatgcttaggaaccactacaaatgctactgccttgagtctcattttgtttccctctggaaaccacatgtgtaccttgtttgcaacagtatggttctcgatctacacataggctggaatgcagtggtgttggtgtgataagggtcagtgcagtctcaacctcctgggctcaagtgatcctcctgcctcagccttttgagtagctgggaccacaggctcacaggcagaaggaattttccttgtcttggatgagacttttgacttggacttttgggttaagttctggagaccagaaggccaaaatcaaaagtatgggcaggcttgatttctttagaagactccagcggagaactgtgtctccttgcttctgattctacatctccatccatgggccactgtttcagcaacctcagccagtgcaacacaacctcagccaagaagagtatgcagagaaaggagtcccctacctgccacaaaactgttgtctgaaaactgtctcatattgtctcaagttgtcattcattgtgaattagacctgtttaacatgtaatctgcaacatgcttcactgtctaattttccagagcccctcatataaggaactgtattattggtataatcatcatggtgaagaagttggtatgtgggggagagatgacagaaacagagagtaagtcagagctggctgcctgacagataaaaaggaaatgacc

SEQ ID NO: 58247 - DNA, 2242 bp, Homo sapiens
agcacttgggagcaagagtctttgtgactggcactcatggacagacagtggtgttcagggacagaacagattttggagggggtggggaggccaataaaccaagaaacgtcagaaataaaagtcgcatgaagtactctgatctctgtatttccttttttttttttttttttgtgaaatttgattttaactcttgcttttttttaatggtttggtgtctgttttttccacccccgctggcgccgagctgcgctgttttgtggttctctttttttttttttttttcttctattttttttttaaattctgaagccagaccgtctttcctcacagctccacggctgcatctccgtgggcacgcaagcttcccctggttacctgagctgctcctgccgtctcccgcctgggcttcgccgtggtgcacccgatcccggaatcgtgcgtctgcgccctgcgaaagaaggacctgctggcggagctccggccggggtctcctgcctcgcagctgggcgaggggacttggaggacagggtgaagctgcagaagacctggggtgggatggctagagaggacgccaaggactggggaaggggaagttaggaataccttacatccaatgcccacccgtgctccgcagggcaagggcagccgtcgcctcggccgcgtgcacccagctcaggctgttcccagggatttagtctggggggacaacccatggcgagatgtggtggcattttacctcagagtggagctgaagatggataaacaaggtatctgatgtatctgcctgagaaggcagagctggagaaaggcggagcgagggagcgcgtgaaaagaaagagatgccgaatgccgggtgattgtctgccgcttgctgtgcattctcattctagggaggatggcataatttataacccagcacatggatagaggaactgtaaattgtagtctggatgtccccggcgctgtcgacgaaggaactgatgggctaggctcacaggcagaaggaattttccttgtcttggatgagacttttgacttggacttttgggttaagttctggagaccagaaggccaaaatcaaaagtatgggcaggcttgatttctttagaagactccagcggagaactgtgtctccttgcttctgattctacatctccatccatgggccactgtttcagcaacctcagccagtgcaacacaacctcagccaagaagagtatgcagagaaaggagtcccctacctgccacaaaactgttgtctgaaaactgtctcatattgtctcaagttgtcattcattgtgaattagacctgtttaacatgtaatctgcaacatgcttcactgtctaattttccagagcccctcatataaggaactgtattattggtataatcatcatggtgaagaagttggtatgtgggggagagatgacagaaacagagagtaagtcagagctggctgcctgacagataaaaaggaaatgaccaaaaaaaaaaaaaaagacacagaagaatactttgttgtccacacagaaaagggaagtgtaggtaagacagcagtagactaagattcttaagactcaagttctagtcttatttattagctatgggaggccttgagggagttctagaattaagtgatctctctttataaaataggaacagtaataacttcctggctaactccctggctgtctcacaatgctgtagtagtaagaaataattttataattaaagactattttagggctgattacatttttgggcagtggctcatacatgtaatttcaacattttgggaggccaaggtgggcggattgcttgagcccaggaattcaagaccaggctgggcaacacagaccttgtcactacaaaagaaaaaaacattagctaggcgtggtgatgtatgcctgtggtcccagctactcaggaagctgagacaggaggatcacctgagcctgggaggtcgaggctacagtgagccatgatcacactactgcactccagcctgggaaacagagtgagactctgtctcaaaaaaaaaaaaggaatattttacacttcaaggttctatacaaatgtaaaatatcattctattacttatttataatgctgattattctttaaatgactttaaaatgttaatctctgcttgagcctacggagaagtatgtaacaaatttgtgaaggattggcattaaagatagtcaaaataaaacatagaaattatggtaaaaaaaaaaa

SEQ ID NO: 58248 - DNA, 2061 bp, Homo sapiens
agcacttgggagcaagagtctttgtgactggcactcatggacagacagtggtgttcagggacagaacagattttggagggggtggggaggccaataaaccaagaaacgtcagaaataaaagtcgcatgaagtactctgatctctgtatttccttttttttttttttttttgtgaaatttgattttaactcttgcttttttttaatggtttggtgtctgttttttccacccccgctggcgccgagctgcgctgttttgtggttctctttttttttttttttttcttctattttttttttaaattctgaagccagaccgtctttcctcacagctccacggctgcatctccgtgggcacgcaagcttcccctggttacctgagctgctcctgccgtctcccgcctgggcttcgccgtggtgcacccgatcccggaatcgtgcgtctgcgccctgcgaaagaaggacctgctggcggagctccggccggggtctcctgcctcgcagctgggcgaggggacttggaggacagggtgaagctgcagaagacctggggtgggatggctagagaggacgccaaggactggggaaggggaagttaggaataccttacatccaatgcccacccgtgctccgcagggcaagggcagccgtcgcctcggccgcgtgcacccagctcaggctgttcccagggatttagtctggggggacaacccatggcgagatgtggtggcattttacctcagagtggagctgaagatggataaacaaggtatctgatgtatctgcctgagaaggcagagctggagaaaggcggagcgagggagcgcgtgaaaagaaagagatgccgaatgccgggtgattgtctgccgcttgctgtgcattctcattctagggaggatggcataatttataacccagcacatggatagaggaactgtaaattgtagtctggatgtccccggcgctgtcgacgaaggaactgatgggctaggctcacaggcagaaggaattttccttgtcttggatgagacttttgacttggacttttgggttaagttctggagaccagaaggccaaaatcaaaagtatgggcaggcttgatttctttagaagactccagcggagaactgtgtctccttgcttctgattctacatctccatccatgggccactgtttcagcaacctcagccagtgcaacacaacctcagccaagaagagtatgcagagaaaggagtcccctacctgccacaaaactgttgtctgaaaactgtctcatattgtctcaagttgtcattcattgtgaattagacctgtttaacatgtaatctgcaacatgcttcactgtctaattttccagagcccctcatataaggaactgtattattggtataatcatcatggtgaagaagttggtatgtgggggagagatgacagaaacagagagtaagtcagagctggctgcctgacagataaaaaggaaatgaccaaaaaaaaaaaaaaagacacagaagaatactttgttgtccacacagaaaagggaagtgtaggtaagacagcagtagactaagattcttaagactcaagttctagtcttatttattagctatgggaggccttgagggagttctagaattaagtgatctctctttataaaataggaacagtaataacttcctggctaactccctggctgtctcacaatgctgtagtagtaagaaataattttataattaaagactattttagggctgattacatttttgggcagtggctcatacatgtaatttcaacattttgggaggccaaggtgggcggattgcttgagcccaggaattcaagaccaggctgggcaacacagaccttgtcactacaaaagaaaaaaacattagctaggcgtggtgatgtatgcctgtggtcccagctactcaggaagctgagacaggaggatcacctgagcctgggaggtcgaggctacagtgaggtcgacctgggagctcaaggctgagttataattatgtcactgcattccagcctagatgacagagcgagaccttgtctaaaa

SEQ ID NO: 58249 - DNA, 2579 bp, Homo sapiens
gtctgctccgggacttggaacaaaagggggaactctgatgaactctctttcctcccctctcccccggacgccggggtatctccctctcgcaactttgccgccccgactttctctgctgtcaggccgggaaaaagtgtccgaacgcctcgtggactgcagcgggggaaatgtcccttaaaagtgcgacgaagtggggaagaaggtgtaattactattatcagcatctagaaagcatcatgaatttgctggagtacttcctagcactgacctccttcattctgcgttgttcttactggatctttccatcagccaacaatatggaagtaccaatacaaggtcaaatcattcctggattcatctggagttgcttaaaagttaaatcattggaatttttgatgataccttttctatatggattacaatttgatcgctgggaattctccaccttaaagaagtaccctcaggtgactacagatgtgttaacacccagcatgttccggtaggagactttctggatggggaagatttccaggaattggcaacaagctcatttcactggtgggtttgctgaagcattatcacaagacagtcagaatgactgatgagtgctcttcaggtgtgaatcatggcaatacagtgaaagacagtgatttactgcttttgagggcgtgcatgtatatgattaacggatggaagtgcaggactccaagatttacttccttccctttccagcagaattacctgagacgagtaaaatctactggtggagtcactccattattcttatctgtggagatctagatcttgatttgaaagtttctgagaaaatcttcagctcagacttgagggtcaactttaccagctgaaggatctgcatttactgctcaaccacatctaatttgatgtcctctgcagatttaaaatgtgtgccttcttttccgtcaccaagtcatccctgggttactactgaacatccttctcaattccccccgacccatggatggctgttctccattgtctgtttcaccagatgtcctcaaaacaaacagacagaagaaggaagtggctaatggagctgtggagtccaagtgtgactgccaagaggaatccagcaaagccaaaaagcccaagcatgtagccctgcccgaagcacgccacacgcatggaaaacccagaggaaatgagtgaggatcaatgggaagaagagagccagccaggaagttgaagatttgtccaggagcagatagctgaagagagagagagagaagagagaacggcttacagctcaggtcctctctccatgcttaggaaccactacaaatgctactgccttgagtctcattttgtttccctctggaaaccacatgtgtaccttgtttgcaacagtatggttctggagaccagaaggccaaaatcaaaagtatgggcaggcttgatttctttagaagactccagcggagaactgtgtctccttgcttctgattctacatctccatccatgggccactgtttcagcaacctcagccagtgcaacacaacctcagccaagaagagtatgcagagaaaggagtcccctacctgccacaaaactgttgtctgaaaactgtctcatattgtctcaagttgtcattcattgtgaattagacctgtttaacatgtaatctgcaacatgcttcactgtctaattttccagagcccctcatataaggaactgtattattggtataatcatcatggtgaagaagttggtatgtgggggagagatgacagaaacagagagtaagtcagagctggctgcctgacagataaaaaggaaatgaccaaaaaaaaaaaaaaagacacagaagaatactttgttgtccacacagaaaagggaagtgtaggtaagacagcagtagactaagattcttaagactcaagttctagtcttatttattagctatgggaggccttgagggagttctagaattaagtgatctctctttataaaataggaacagtaataacttcctggctaactccctggctgtctcacaatgctgtagtagtaagaaataattttataattaaagactattttagggctgattacatttttgggcagtggctcatacatgtaatttcaacattttgggaggccaaggtgggcggattgcttgagcccaggaattcaagaccaggctgggcaacacagaccttgtcactacaaaagaaaaaaacattagctaggcgtggtgatgtatgcctgtggtcccagctactcaggaagctgagacaggaggatcacctgagcctgggaggtcgaggctacagtgagccatgatcacactactgcactccagcctgggaaacagagtgagactctgtctcaaaaaaaaaaaaggaatattttacacttcaaggttctatacaaatgtaaaatatcattctattacttatttataatgctgattattctttaaatgactttaaaatgttaatctctgcttgagcctacggagaagtatgtaacaaatttgtgaaggattggcattaaagatagtcaaaataaaacatagaaattatggtaaaaaaaaaaa

SEQ ID NO: 58250 - DNA, 1315 bp, Homo sapiens
gactaggattctctcatgcttaacatgcatcttactggttctttatgaagagctttctcttggctcacaggcagaaggaattttccttgtcttggatgagacttttgacttggacttttgggttaagttctggagaccagaaggccaaaatcaaaagtatgggcaggcttgatttctttagaagactccagcggagaactgtgtctccttgcttctgattctacatctccatccatgggccactgtttcagcaacctcagccagtgcaacacaacctcagccaagaagagtatgcagagaaaggagtcccctacctgccacaaaactgttgtctgaaaactgtctcatattgtctcaagttgtcattcattgtgaattagacctgtttaacatgtaatctgcaacatgcttcactgtctaattttccagagcccctcatataaggaactgtattattggtataatcatcatggtgaagaagttggtatgtgggggagagatgacagaaacagagagtaagtcagagctggctgcctgacagataaaaaggaaatgaccaaaaaaaaaaaaaaagacacagaagaatactttgttgtccacacagaaaagggaagtgtaggtaagacagcagtagactaagattcttaagactcaagttctagtcttatttattagctatgggaggccttgagggagttctagaattaagtgatctctctttataaaataggaacagtaataacttcctggctaactccctggctgtctcacaatgctgtagtagtaagaaataattttataattaaagactattttagggctgattacatttttgggcagtggctcatacatgtaatttcaacattttgggaggccaaggtgggcggattgcttgagcccaggaattcaagaccaggctgggcaacacagaccttgtcactacaaaagaaaaaaacattagctaggcgtggtgatgtatgcctgtggtcccagctactcaggaagctgagacaggaggatcacctgagcctgggaggtcgaggctacagtgagccatgatcacactactgcactccagcctgggaaacagagtgagactctgtctcaaaaaaaaaaaaggaatattttacacttcaaggttctatacaaatgtaaaatatcattctattacttatttataatgctgattattctttaaatgactttaaaatgttaatctctgcttgagcctacggagaagtatgtaacaaatttgtgaaggattggcattaaagatagtcaaaataaaacatagaaattatggtaaaaaaaaaaa

SEQ ID NO: 58251 - DNA, 2561 bp, Homo sapiens
gtctgctccgggacttggaacaaaagggggaactctgatgaactctctttcctcccctctcccccggacgccggggtatctccctctcgcaactttgccgccccgactttctctgctgtcaggccgggaaaaagtgtccgaacgcctcgtggactgcagcgggggaaatgtcccttaaaagtgcgacgaagtggggaagaaggtgtaattactattatcagcatctagaaagcatcatgaatttgctggagtacttcctagcactgacctccttcattctgcgttgttcttactggatctttccatcagccaacaatatggaagtaccaatacaaggtcaaatcattcctggattcatctggagttgcttaaaagttaaatcattggaatttttgatgataccttttctatatggattacaatttgatcgctgggaattctccaccttaaagaagtaccctcaggtgactacagatgtgttaacacccagcatgttccggtaggagactttctggatggggaagatttccaggaattggcaacaagctcatttcactggtgggtttgctgaagcattatcacaagacagtcagaatgactgatgagtgctcttcaggtgtgaatcatggcaatacagtgaaagacagtgatttactgcttttgagggcgtgcatgtatatgattaacggatggaagtgcaggactccaagatttacttccttccctttccagcagaattacctgagacgagtaaaatctactggtggagtcactccattattcttatctgtggagatctagatcttgatttgaaagtttctgagaaaatcttcagctcagacttgagggtcaactttaccagctgaaggagctgtggagtccaagtgtgactgccaagaggaatccagcaaagccaaaaagcccaagcatgtagccctgcccgaagcacgccacacgcatggaaaacccagaggaaatgagtgaggatcaatgggaagaagagagccagccaggaagttgaagatttgtccaggagcagatagctgaagagagagagagagaagagagaacggcttacagctcaggtcctctctccatgcttaggaaccactacaaatgctactgccttgagtctcattttgtttccctctggaaaccacatgtgtaccttgtttgcaacagtatggttctcgatctacacataggctggaatgcagtggtgttggtgtgataagggtcagtgcagtctcaacctcctgggctcaagtgatcctcctgcctcagccttttgagtagctgggaccacaggctcacaggcagaaggaattttccttgtcttggatgagacttttgacttggacttttgggttaagttctggagaccagaaggccaaaatcaaaagtatgggcaggcttgatttctttagaagactccagcggagaactgtgtctccttgcttctgattctacatctccatccatgggccactgtttcagcaacctcagccagtgcaacacaacctcagccaagaagagtatgcagagaaaggagtcccctacctgccacaaaactgttgtctgaaaactgtctcatattgtctcaagttgtcattcattgtgaattagacctgtttaacatgtaatctgcaacatgcttcactgtctaattttccagagcccctcatataaggaactgtattattggtataatcatcatggtgaagaagttggtatgtgggggagagatgacagaaacagagagtaagtcagagctggctgcctgacagataaaaaggaaatgaccaaaaaaaaaaaaaaagacacagaagaatactttgttgtccacacagaaaagggaagtgtaggtaagacagcagtagactaagattcttaagactcaagttctagtcttatttattagctatgggaggccttgagggagttctagaattaagtgatctctctttataaaataggaacagtaataacttcctggctaactccctggctgtctcacaatgctgtagtagtaagaaataattttataattaaagactattttagggctgattacatttttgggcagtggctcatacatgtaatttcaacattttgggaggccaaggtgggcggattgcttgagcccaggaattcaagaccaggctgggcaacacagaccttgtcactacaaaagaaaaaaacattagctaggcgtggtgatgtatgcctgtggtcccagctactcaggaagctgagacaggaggatcacctgagcctgggaggtcgaggctacagtgagccatgatcacactactgcactccagcctgggaaacagagtgagactctgtctcaaaaaaaaaaaaggaatattttacacttcaaggttctatacaaatgtaaaatatcattctattacttatttataatgctgattattctttaaatgactttaaaatgttaatctctgcttgagcctacggagaagtatgtaacaaatttgtgaaggattggcattaaagatagtcaaaataaaacatagaaattatggtaaaaaaaaaaa

SEQ ID NO: 58252 - DNA, 1254 bp, Homo sapiens
gcgagagagagaagaggagatgcaacacacttttaaacaagatttcaggagaactcattcactatgttctggagaccagaaggccaaaatcaaaagtatgggcaggcttgatttctttagaagactccagcggagaactgtgtctccttgcttctgattctacatctccatccatgggccactgtttcagcaacctcagccagtgcaacacaacctcagccaagaagagtatgcagagaaaggagtcccctacctgccacaaaactgttgtctgaaaactgtctcatattgtctcaagttgtcattcattgtgaattagacctgtttaacatgtaatctgcaacatgcttcactgtctaattttccagagcccctcatataaggaactgtattattggtataatcatcatggtgaagaagttggtatgtgggggagagatgacagaaacagagagtaagtcagagctggctgcctgacagataaaaaggaaatgaccaaaaaaaaaaaaaaagacacagaagaatactttgttgtccacacagaaaagggaagtgtaggtaagacagcagtagactaagattcttaagactcaagttctagtcttatttattagctatgggaggccttgagggagttctagaattaagtgatctctctttataaaataggaacagtaataacttcctggctaactccctggctgtctcacaatgctgtagtagtaagaaataattttataattaaagactattttagggctgattacatttttgggcagtggctcatacatgtaatttcaacattttgggaggccaaggtgggcggattgcttgagcccaggaattcaagaccaggctgggcaacacagaccttgtcactacaaaagaaaaaaacattagctaggcgtggtgatgtatgcctgtggtcccagctactcaggaagctgagacaggaggatcacctgagcctgggaggtcgaggctacagtgagccatgatcacactactgcactccagcctgggaaacagagtgagactctgtctcaaaaaaaaaaaaggaatattttacacttcaaggttctatacaaatgtaaaatatcattctattacttatttataatgctgattattctttaaatgactttaaaatgttaatctctgcttgagcctacggagaagtatgtaacaaatttgtgaaggattggcattaaagatagtcaaaataaaacatagaaattatggtaaaaaaaaaaa

SEQ ID NO: 58253 - DNA, 1589 bp, Homo sapiens
gtctgctccgggacttggaacaaaagggggaactctgatgaactctctttcctcccctctcccccggacgccggggtatctccctctcgcaactttgccgccccgactttctctgctgtcaggccgggaaaaagtgtccgaacgcctcgtggactgcagcgggggaaatgtcccttaaaagtgcgacgaagtggggaagaaggtgtaattactattatcagcatctagaaagcatcatgaatttgctggagtacttcctagcactgacctccttcattctgcgttgttcttactggatctttccatcagccaacaatatggaagtaccaatacaaggtcaaatcattcctggattcatctggagttgcttaaaagttaaatcattggaatttttgatgataccttttctatatggattacaatttgatcgctgggaattctccaccttaaagaagtaccctcaggtgactacagatgtgttaacacccagcatgttccggtaggagactttctggatggggaagatttccaggaattggcaacaagctcatttcactggtgggtttgctgaagcattatcacaagacagtcagaatgactgatgagtgctcttcaggtgtgaatcatggcaatacagtgaaagacagtgatttactgcttttgagggcgtgcatgtatatgattaacggatggaagtgcaggactccaagatttacttccttccctttccagcagaattacctgagacgagtaaaatctactggtggagtcactccattattcttatctgtggagatctagatcttgatttgaaagtttctgagaaaatcttcagctcagacttgagggtcaactttaccagctgaaggatctgcatttactgctcaaccacatctaatttgatgtcctctgcagatttaaaatgtgtgccttcttttccgtcaccaagtcatccctgggttactactgaacatccttctcaattccccccgacccatggatggctgttctccattgtctgtttcaccagatgtcctcaaaacaaacagacagaagaaggaagtggctaatggagctgtggagtccaagtgtgactgccaagaggaatccagcaaagccaaaaagcccaagcatgtagccctgcccgaagcacgccacacgcatggaaaacccagaggaaatgagtgaggatcaatgggaagaagagagccagccaggaagttgaagatttgtccaggagcagatagctgaagagagagagagagaagagagaacggcttacagctcaggtcctctctccatgcttaggaaccactacaaatgctactgccttgagtctcattttgtttccctctggaaaccacatgtgtaccttgtttgcaacagtatggggcaccgaggaagagaaccaatggcagaggccacatgtgcaagcaagatgggagtctggagagcctcaggctaaatcacgagtgctcagccctctcctctttgtaagggcaaccgggtcatatctgccagcatagaactgctctgtccacagccctaaaatctaatacctagaacaataaatgcacttaagcacgtca

SEQ ID NO: 58254 - DNA, 1280 bp, Homo sapiens
gtctgctccgggacttggaacaaaagggggaactctgatgaactctctttcctcccctctcccccggacgccggggtatctccctctcgcaactttgccgccccgactttctctgctgtcaggccgggaaaaagtgtccgaacgcctcgtggactgcagcgggggaaatgtcccttaaaagtgcgacgaagtggggaagaaggtgtaattactattatcagcatctagaaagcatcatgaatttgctggagtacttcctagcactgacctccttcattctgcgttgttcttactggatctttccatcagccaacaatatggaagtaccaatacaaggtcaaatcattcctggattcatctggagttgcttaaaagttaaatcattggaatttttgatgataccttttctatatggattacaatttgatcgctgggaattctccaccttaaagaagtaccctcaggtgactacagatgtgttaacacccagcatgttccggtaggagactttctggatggggaagatttccaggaattggcaacaagctcatttcactggtgggtttgctgaagcattatcacaagacagtcagaatgactgatgagtgctcttcaggtgtgaatcatggcaatacagtgaaagacagtgatttactgcttttgagggcgtgcatgtatatgattaacggatggaagtgcaggactccaagatttacttccttccctttccagcagaattacctgagacgagtaaaatctactggtggagtcactccattattcttatctgtggagatctagatcttgatttgaaagtttctgagaaaatcttcagctcagacttgagggtcaactttaccagctgaaggatctgcatttactgctcaaccacatctaatttgatgtcctctgcagatttaaaatgtgtgccttcttttccgtcaccaagtcatccctgggttactactgaacatccttctcaattccccccgacccatggatggctgttctccattgtctgtttcaccagatgtcctcaaaacaaacagacagaagaaggaagtggctaatggagctgtggagtccaagtgtgactgccaagaggaatccagcaaagccaaaaagcccaagcatgtagccctgcccgaagcacgccacacgcatggaaaacccagaggaaatgagtgaggatcaatgggaagaagagagccagccagctctgtattctaagaacctggaaacaatctttattcacactgttaagacgattgagaaaaatg

SEQ ID NO: 58255 - DNA, 1385 bp, Homo sapiens
gtctgctccgggacttggaacaaaagggggaactctgatgaactctctttcctcccctctcccccggacgccggggtatctccctctcgcaactttgccgccccgactttctctgctgtcaggccgggaaaaagtgtccgaacgcctcgtggactgcagcgggggaaatgtcccttaaaagtgcgacgaagtggggaagaaggtgtaattactattatcagcatctagaaagcatcatgaatttgctggagtacttcctagcactgacctccttcattctgcgttgttcttactggatctttccatcagccaacaatatggaagtaccaatacaaggtcaaatcattcctggattcatctggagttgcttaaaagttaaatcattggaatttttgatgataccttttctatatggattacaatttgatcgctgggaattctccaccttaaagaagtaccctcaggtgactacagatgtgttaacacccagcatgttccggtaggagactttctggatggggaagatttccaggaattggcaacaagctcatttcactggtgggtttgctgaagcattatcacaagacagtcagaatgactgatgagtgctcttcaggtgtgaatcatggcaatacagtgaaagacagtgatttactgcttttgagggcgtgcatgtatatgattaacggatggaagtgcaggactccaagatttacttccttccctttccagcagaattacctgagacgagtaaaatctactggtggagtcactccattattcttatctgtggagatctagatcttgatttgaaagtttctgagaaaatcttcagctcagacttgagggtcaactttaccagctgaaggagctgtggagtccaagtgtgactgccaagaggaatccagcaaagccaaaaagcccaagcatgtagccctgcccgaagcacgccacacgcatggaaaacccagaggaaatgagtgaggatcaatgggaagaagagagccagccaggaagttgaagatttgtccaggagcagatagctgaagagagagagagagaagagagaacggcttacagctcaggtcctctctccatgcttaggaaccactacaaatgctactgccttgagtctcattttgtttccctctggaaaccacatgtgtaccttgtttgcaacagtatggggcaccgaggaagagaaccaatggcagaggccacatgtgcaagcaagatgggagtctggagagcctcaggctaaatcacgagtgctcagccctctcctctttgtaagggcaaccgggtcatatctgccagcatagaactgctctgtccacagccctaaaatctaatacctagaacaataaatgcacttaagcacgtca

SEQ ID NO: 58256 - DNA, 745 bp, Homo sapiens
gtctgctccgggacttggaacaaaagggggaactctgatgaactctctttcctcccctctcccccggacgccggggtatctccctctcgcaactttgccgccccgactttctctgctgtcaggccgggaaaaagtgtccgaacgcctcgtggactgcagcgggggaaatgtcccttaaaagtgcgacgaagtggggaagaaggtgtaattactattatcagcatctagaaagcatcatgaatttgctggagtacttcctagcactgacctccttcattctgcgttgttcttactggatctttccatcagccaacaatatggaagtaccaatacaaggtcaaatcattcctggattcatctggagttgcttaaaagttaaatcattggaatttttgatgataccttttctatatggattacaatttgatcgctgggaattctccaccttaaagaagactcttttgctatctggaaacccatgtccacctctgacttccactcaaaattgctttcctcacagtctgactgcgagagttgtgaaaaattgggatgtgcttctgaggtgggctgtggaatgccatacagaatctcgaagtcttggagtctcactctgttgcccaggctggagtacagaggttgcagtgaactgagatcgtgccactgaactccagcctgggcgacagggtgagactccgtctcaaaaaataaataaataaaaataaaaataaatacactgagtctcatg

SEQ ID NO: 58257 - DNA, 385 bp, Homo sapiens
gagatgaagtctcgttctgttgcccaagctggtctggaactcctgggctcaagcaatcctcctgcctctgcctcccaaagtgctgagatgataggcatgagccaccatgcccagcctgaagctttgggttcttgagaggatgatgtaaaatattatgatataggcaaagggacacatctgtaagctgacagtgctatgtcagagaaggatcaaagagccagcagtctcagaagagtcctgcttctgtctaatctggggagaagactgttcagtccaatgctacctgaagggccccgggcagtagaccctggtgtagaaggagaaaagtagctccaggagaagccatttaattccactgatagcaggagtcagctattctggattt

SEQ ID NO: 58258 - DNA, 533 bp, Homo sapiens
taatcccagctactggggaggctgaggcacaagaatggagaattgcctccctctgaactttttatttggtgctataaataaaccctttcaggtctgagcggcagtcaggtggatttccagttacttgcagctgaatgcatttctacctgtcactcctcctcaggaccataggttgctctggattcccaccacacacgtggagatactgaggtctggaatgcagagaaaacttccccagtgtcacgtggtggagtcatgagtttactgactcactacccagtgctctttccgctcaagacaacctcgtggtccgttcctttcattcgggctgctgtatgcatggccaacagctgctttgtaaattaaacacttcccatggaggcagtgatgatgatgaccttgcccctgaatctttccagcctcttacgtaaatcgcccctgggtcactgtctccatgcctttggacccaggacagcttccccacatcctttaaaacgatgagataaccacatgtaaacccagtgctcctggaa

SEQ ID NO: 58259 - DNA, 1879 bp, Homo sapiens
catcctcccaccatcctctaaagaggcaaagggattttttttttcttttggtcttcttttttcccccttccctgtttatcctgaaaaggatttgaagacaagcttgaaggataaaaagccttggtgcttcccaggagccgagccgaggagcagaagaggaagagccgggggctgccgtagcctttggagatggacgagcagcccaggctgatgcattcccatgctggggtcgggatggccggacaccccggcctgtcccagcacttgcaggatggggccggagggaccgagggggagggcgggaggaagcaggacattggagacattttacagcaaattatgaccatcacagaccagagtttggatgaggcgcaggccagaaaacatgctttaaactgccacagaatgaagcctgccttgtttaatgtgttgtgtgaaatcaaagaaaaaacagttttgagtatccgaggagcccaggaggaggaacccacagacccccagctgatgcggctggacaacatgctgttagcggaaggcgtggcggggcctgagaagggcggagggtcggcggcagcggcggcagcggcggcggcttctggaggggcaggttcagacaactcagtggagcattcagattacagagccaaactctcacagatcagacaaatctaccatacggagctggagaaatacgagcaggcctgcaacgagttcaccacccacgtgatgaatctcctgcgagagcaaagccggaccaggcccatctccccaaaggagattgagcggatggtcagcatcatccaccgcaagttcagctccatccagatgcagctcaagcagagcacgtgcgaggcggtgatgatcctgcgttcccgatttctggatgcgcggcggaagagacggaatttcaacaagcaagcgacagaaatcctgaatgaatatttctattcccatctcagcaacccttaccccagtgaggaagccaaagaggagttagccaagaagtgtggcatcacagtctcccaggtatcaaactggtttggaaataagcgaatccggtacaagaagaacataggtaaatttcaagaggaagccaatatttatgctgccaaaacagctgtcactgctaccaatgtgtcagcccatggaagccaagctaactcgccctcaactcccaactcggctggttcttccagttcttttaacatgtcaaactctggagatttgttcatgagcgtgcagtcactcaatggggattcttaccaaggggcccaggttggagccaacgtgcaatcacaggtggatacccttcgccatgttatcagccagacaggaggatacagtgatggactcgcagccagtcagatgtacagtccgcagggcatcagtgctaatggaggttggcaggatgctactaccccttcatcagtgacctcccctacagaaggccctggcagtgttcactctgatacctccaactgatctcccagcaatcgcatcccggctgaccctgtgccccagttggggcaggggcaggagggagggtttctctcccaacgctgaagcggtcagactggaggtcgaagcaatcagcaaacacaataagagtctccttctcttctcttctttgggatgctatttcagccaatctggacacttctttatactctcttcccttttttttctgggtagaagccacccttccctgcctccagctgtcagcctggttttcgtcatcttccctgcccctgtgcctctgtcctagactcccggggtccccgccctctctcatatcactgaaggatattttcaacaattagaggaatttaaagaggaaaaaaattacaaagaaaataataaaagtgtttgtacgttttca

SEQ ID NO: 58260 - DNA, 2050 bp, Homo sapiens
ggctaccagctgcatggagcagaggtgaacggagggctcccatctgcatcctccttctcctcagcccccggagccacgtacggcgtctccagccacacgccgcctgtcagcggggccgacagcctcctgggctcccgagggaccacagctggcagctccggggatgccctcggcaaagcactggcctcgatctactccccggatcactcaagcaataacttctcgtccagcccttctacccccgtgggctccccccagggcctggcaggaacgtcacagtggcctcgagcaggagcccccggtgccttatcgcccagctacgacgggggtctccacggcctgcagagtaagatagaagaccacctggacgaggccatccacgtgctccgcagccacgccgtgggcacagccggcgacatgcacacgctgctgcctggccacggggcgctggcctcaggtttcaccggccccatgtcactgggcgggcggcacgcaggcctggttggaggcagccaccccgaggacggcctcgcaggcagcaccagcctcatgcacaaccacgcggccctccccagccagccaggcaccctccctgacctgtctcggcctcccgactcctacagtgttttgagtatccgaggagcccaggaggaggaacccacagacccccagctgatgcggctggacaacatgctgttagcggaaggcgtggcggggcctgagaagggcggagggtcggcggcagcggcggcagcggcggcggcttctggaggggcaggttcagacaactcagtggagcattcagattacagagccaaactctcacagatcagacaaatctaccatacggagctggagaaatacgagcaggcctgcaacgagttcaccacccacgtgatgaatctcctgcgagagcaaagccggaccaggcccatctccccaaaggagattgagcggatggtcagcatcatccaccgcaagttcagctccatccagatgcagctcaagcagagcacgtgcgaggcggtgatgatcctgcgttcccgatttctggatgcgcggcggaagagacggaatttcaacaagcaagcgacagaaatcctgaatgaatatttctattcccatctcagcaacccttaccccagtgaggaagccaaagaggagttagccaagaagtgtggcatcacagtctcccaggtatcaaactggtttggaaataagcgaatccggtacaagaagaacataggtaaatttcaagaggaagccaatatttatgctgccaaaacagctgtcactgctaccaatgtgtcagcccatggaagccaagctaactcgccctcaactcccaactcggctggttcttccagttcttttaacatgtcaaactctggagatttgttcatgagcgtgcagtcactcaatggggattcttaccaaggggcccaggttggagccaacgtgcaatcacaggtggatacccttcgccatgttatcagccagacaggaggatacagtgatggactcgcagccagtcagatgtacagtccgcagggcatcagtgctaatggaggttggcaggatgctactaccccttcatcagtgacctcccctacagaaggccctggcagtgttcactctgatacctccaactgatctcccagcaatcgcatcccggctgaccctgtgccccagttggggcaggggcaggagggagggtttctctcccaacgctgaagcggtcagactggaggtcgaagcaatcagcaaacacaataagagtctccttctcttctcttctttgggatgctatttcagccaatctggacacttctttatactctcttcccttttttttctgggtagaagccacccttccctgcctccagctgtcagcctggttttcgtcatcttccctgcccctgtgcctctgtcctagactcccggggtccccgccctctctcatatcactgaaggatattttcaacaattagaggaatttaaagaggaaaaaaattacaaagaaaataataaaagtgtttgtacgttttca

SEQ ID NO: 58261 - DNA, 1553 bp, Homo sapiens
ggagctggagatctcaagggagttgaacagagaggtgtgattgagagtcagatgatgttttgagtatccgaggagcccaggaggaggaacccacagacccccagctgatgcggctggacaacatgctgttagcggaaggcgtggcggggcctgagaagggcggagggtcggcggcagcggcggcagcggcggcggcttctggaggggcaggttcagacaactcagtggagcattcagattacagagccaaactctcacagatcagacaaatctaccatacggagctggagaaatacgagcaggcctgcaacgagttcaccacccacgtgatgaatctcctgcgagagcaaagccggaccaggcccatctccccaaaggagattgagcggatggtcagcatcatccaccgcaagttcagctccatccagatgcagctcaagcagagcacgtgcgaggcggtgatgatcctgcgttcccgatttctggatgcgcggcggaagagacggaatttcaacaagcaagcgacagaaatcctgaatgaatatttctattcccatctcagcaacccttaccccagtgaggaagccaaagaggagttagccaagaagtgtggcatcacagtctcccaggtatcaaactggtttggaaataagcgaatccggtacaagaagaacataggtaaatttcaagaggaagccaatatttatgctgccaaaacagctgtcactgctaccaatgtgtcagcccatggaagccaagctaactcgccctcaactcccaactcggctggttcttccagttcttttaacatgtcaaactctggagatttgttcatgagcgtgcagtcactcaatggggattcttaccaaggggcccaggttggagccaacgtgcaatcacaggtggatacccttcgccatgttatcagccagacaggaggatacagtgatggactcgcagccagtcagatgtacagtccgcagggcatcagtgctaatggaggttggcaggatgctactaccccttcatcagtgacctcccctacagaaggccctggcagtgttcactctgatacctccaactgatctcccagcaatcgcatcccggctgaccctgtgccccagttggggcaggggcaggagggagggtttctctcccaacgctgaagcggtcagactggaggtcgaagcaatcagcaaacacaataagagtctccttctcttctcttctttgggatgctatttcagccaatctggacacttctttatactctcttcccttttttttctgggtagaagccacccttccctgcctccagctgtcagcctggttttcgtcatcttccctgcccctgtgcctctgtcctagactcccggggtccccgccctctctcatatcactgaaggatattttcaacaattagaggaatttaaagaggaaaaaaattacaaagaaaataataaaagtgtttgtacgttttcaaaaaaacaaccagaacaagaacgatcccacactctcaagtaaactacataacatggccttcttggccctca

SEQ ID NO: 58262 - DNA, 907 bp, Homo sapiens
  misc_feature (87)..(87): n is a, c, g, or t
tacgaggcctggtgtgactcggacgaggggctgacggggctgttggagtttgcagagacacggaggaggagagagcctgtgctttgnctgccgcgcggctgggggagatctggcttttgcaacagcccaccccctttgagatcactctggcccggagtgggggtggggggcagcggggggtggggggggaaagtttgcattgcaatccccctgccttcctctcctttctcccgatcaatgcatatttgcaaaaggattaagccacagatttaagcgccgggagcccatttctgccttgcaaaggagaccggactgaaaaacctaaagccagctctgatttcttttcgccaagtgggaaggatttgaagacaagcttgaaggataaaaagccttggtgcttcccaggagccgagccgaggagcagaagaggaagagccgggggctgccgtagcctttggagatggacgagcagcccaggctgatgcattcccatgctggggtcgggatggccggacaccccggcctgtcccagcacttgcaggatggggccggagggaccgagggggagggcgggaggaagcaggacattggagacattttacagcaaattatgaccatcacagaccagagtttggatgaggcgcaggccagcaactacatggcggaggagtaaaatttgaaggagcgttgttatcgaaagtgtaatcgcccatgccgagatgtggctgtgtacatatttgtgtgtgtgtgtgtgaatataggggtattcatttatatccacacaaacacacaggcatgccgaaaatactgccaactgatccaaaagcggccctcggcactttttactgctttaaaaaagtatcagagaaagcagaattgtcaagttttgaacagcattccatgcctt

SEQ ID NO: 58263 - DNA, 402 bp, Homo sapiens
  misc_feature (87)..(87): n is a, c, g, or t
tacgaggcctggtgtgactcggacgaggggctgacggggctgttggagtttgcagagacacggaggaggagagagcctgtgctttgnctgccgcgcggctgggggagatctggcttttgcaacagcccaccccctttgagatcactctggcccggagtgggggtggggggcagcggggggtggggggggaaagtttgcattgcaatccccctgccttcctctcctttctcccgatcaatgcatatttgcaaaaggattaagccacagatttaagcgccgggagcccatttctgccttgcaaaggagaccggactgaaaaacctaaagccagctctgatttcttttcgccaagtgggaaggtggtttatttttcttgctttttggagtcaacacccttcccca

SEQ ID NO: 58264 - DNA, 369 bp, Homo sapiens
acttatttgagggtgggggcaatattatcacccacagtaatagttgcccatttgatgagtgtctccatgtgccaggcactatgctaggtcctttacacaagatgcctcattgtcattgtctgctgaaaacagccacccaatctcagaggactgactttctcttcccttttttttctgggtagaagccacccttccctgcctccagctgtcagcctggttttcgtcatcttccctgcccctgtgcctctgtcctagactcccggggtccccgccctctctcatatcactgaaggatattttcaacaattagaggaatttaaagaggaaaaaaattacaaagaaaataataaaagtgtttgtacgttttca

SEQ ID NO: 58265 - DNA, 353 bp, Homo sapiens
caatcactattgtagccccagactaacgcatagctagccaactgtcaggcatagacagggtctcactatgttgccaggctgttttcgaactcctgggctcaagcaatcctcctatcttggcctcccaaactgctgggattacaagtgtgagtcactgcgcctggcctgaagattctatttcacctatgaaaacatgctttaaactgccacagaatgaagcctgccttgtttaatgtgttgtgtgaaatcaaagaaaaaacagacctcgtttcgtggactaacacacttataacacatcccaggagggcatttaaattttaaagcaacaattaaaaaatagcagtcatcaatca

SEQ ID NO: 58266 - DNA, 2150 bp, Homo sapiens
  misc_feature (87)..(87): n is a, c, g, or t
tacgaggcctggtgtgactcggacgaggggctgacggggctgttggagtttgcagagacacggaggaggagagagcctgtgctttgnctgccgcgcggctgggggagatctggcttttgcaacagcccaccccctttgagatcactctggcccggagtgggggtggggggcagcggggggtggggggggaaagtttgcattgcaatccccctgccttcctctcctttctcccgatcaatgcatatttgcaaaaggattaagccacagatttaagcgccgggagcccatttctgccttgcaaaggagaccggactgaaaaacctaaagccagctctgatttcttttcgccaagtgggaaggatttgaagacaagcttgaaggataaaaagccttggtgcttcccaggagccgagccgaggagcagaagaggaagagccgggggctgccgtagcctttggagatggacgagcagcccaggctgatgcattcccatgctggggtcgggatggccggacaccccggcctgtcccagcacttgcaggatggggccggagggaccgagggggagggcgggaggaagcaggacattggagacattttacagcaaattatgaccatcacagaccagagtttggatgaggcgcaggccagaaaacatgctttaaactgccacagaatgaagcctgccttgtttaatgtgttgtgtgaaatcaaagaaaaaacagttttgagtatccgaggagcccaggaggaggaacccacagacccccagctgatgcggctggacaacatgctgttagcggaaggcgtggcggggcctgagaagggcggagggtcggcggcagcggcggcagcggcggcggcttctggaggggcaggttcagacaactcagtggagcattcagattacagagccaaactctcacagatcagacaaatctaccatacggagctggagaaatacgagcaggcctgcaacgagttcaccacccacgtgatgaatctcctgcgagagcaaagccggaccaggcccatctccccaaaggagattgagcggatggtcagcatcatccaccgcaagttcagctccatccagatgcagctcaagcagagcacgtgcgaggcggtgatgatcctgcgttcccgatttctggatgcgcggcggaagagacggaatttcaacaagcaagcgacagaaatcctgaatgaatatttctattcccatctcagcaacccttaccccagtgaggaagccaaagaggagttagccaagaagtgtggcatcacagtctcccaggtatcaaactggtttggaaataagcgaatccggtacaagaagaacataggtaaatttcaagaggaagccaatatttatgctgccaaaacagctgtcactgctaccaatgtgtcagcccatggaagccaagctaactcgccctcaactcccaactcggctggttcttccagttcttttaacatgtcaaactctggagatttgttcatgagcgtgcagtcactcaatggggattcttaccaaggggcccaggttggagccaacgtgcaatcacaggtggatacccttcgccatgttatcagccagacaggaggatacagtgatggactcgcagccagtcagatgtacagtccgcagggcatcagtgctaatggaggttggcaggatgctactaccccttcatcagtgacctcccctacagaaggccctggcagtgttcactctgatacctccaactgatctcccagcaatcgcatcccggctgaccctgtgccccagttggggcaggggcaggagggagggtttctctcccaacgctgaagcggtcagactggaggtcgaagcaatcagcaaacacaataagagtctccttctcttctcttctttgggatgctatttcagccaatctggacacttctttatactctcttcccttttttttctgggtagaagccacccttccctgcctccagctgtcagcctggttttcgtcatcttccctgcccctgtgcctctgtcctagactcccggggtccccgccctctctcatatcactgaaggatattttcaacaattagaggaatttaaagaggaaaaaaattacaaagaaaataataaaagtgtttgtacgttttca

SEQ ID NO: 58267 - DNA, 1766 bp, Homo sapiens
catcctcccaccatcctctaaagaggcaaagggattttttttttcttttggtcttcttttttcccccttccctgtttatcctgaaaaggatttgaagacaagcttgaaggataaaaagccttggtgcttcccaggagccgagccgaggagcagaagaggaagagccgggggctgccgtagcctttggagatggacgagcagcccaggctgatgcattcccatgctggggtcgggatggccggacaccccggcctgtcccagcacttgcaggatggggccggagggaccgagggggagggcgggaggaagcaggacattggagacattttacagcaaattatgaccatcacagaccagagtttggatgaggcgcaggccagaaaacatgctttaaactgccacagaatgaagcctgccttgtttaatgtgttgtgtgaaatcaaagaaaaaacagttttgagtatccgaggagcccaggaggaggaacccacagacccccagctgatgcggctggacaacatgctgttagcggaaggcgtggcggggcctgagaagggcggagggtcggcggcagcggcggcagcggcggcggcttctggaggggcaggttcagacaactcagtggagcattcagattacagagccaaactctcacagatcagacaaatctaccatacggagctggagaaatacgagcaggcctgcaacgagttcaccacccacgtgatgaatctcctgcgagagcaaagccggaccaggcccatctccccaaaggagattgagcggatggtcagcatcatccaccgcaagttcagctccatccagatgcagctcaagcagagcacgtgcgaggcggtgatgatcctgcgttcccgatttctggatgcgcggcggaagagacggaatttcaacaagcaagcgacagaaatcctgaatgaatatttctattcccatctcagcaacccttaccccagtgaggaagccaaagaggagttagccaagaagtgtggcatcacagtctcccaggtatcaaactggtttggaaataagcgaatccggtacaagaagaacataggtaaatttcaagaggaagccaatatttatgctgccaaaacagctgtcactgctaccaatgtgtcagcccatggaagccaagctaactcgccctcaactcccaactcggctggtggatacccttcgccatgttatcagccagacaggaggatacagtgatggactcgcagccagtcagatgtacagtccgcagggcatcagtgctaatggaggttggcaggatgctactaccccttcatcagtgacctcccctacagaaggccctggcagtgttcactctgatacctccaactgatctcccagcaatcgcatcccggctgaccctgtgccccagttggggcaggggcaggagggagggtttctctcccaacgctgaagcggtcagactggaggtcgaagcaatcagcaaacacaataagagtctccttctcttctcttctttgggatgctatttcagccaatctggacacttctttatactctcttcccttttttttctgggtagaagccacccttccctgcctccagctgtcagcctggttttcgtcatcttccctgcccctgtgcctctgtcctagactcccggggtccccgccctctctcatatcactgaaggatattttcaacaattagaggaatttaaagaggaaaaaaattacaaagaaaataataaaagtgtttgtacgttttca

SEQ ID NO: 58268 - DNA, 1561 bp, Homo sapiens
gataatgaactagcacatgggctgcatcaggaagccctggggacctcgcagaagttgagagtgtggagtgggagaatgggaggagtaatatattaaccttactgatacacaaagttgctccttctttttcttgcagttttgagtatccgaggagcccaggaggaggaacccacagacccccagctgatgcggctggacaacatgctgttagcggaaggcgtggcggggcctgagaagggcggagggtcggcggcagcggcggcagcggcggcggcttctggaggggcaggttcagacaactcagtggagcattcagattacagagccaaactctcacagatcagacaaatctaccatacggagctggagaaatacgagcaggcctgcaacgagttcaccacccacgtgatgaatctcctgcgagagcaaagccggaccaggcccatctccccaaaggagattgagcggatggtcagcatcatccaccgcaagttcagctccatccagatgcagctcaagcagagcacgtgcgaggcggtgatgatcctgcgttcccgatttctggatgcgcggcggaagagacggaatttcaacaagcaagcgacagaaatcctgaatgaatatttctattcccatctcagcaacccttaccccagtgaggaagccaaagaggagttagccaagaagtgtggcatcacagtctcccaggtatcaaactggtttggaaataagcgaatccggtacaagaagaacataggtaaatttcaagaggaagccaatatttatgctgccaaaacagctgtcactgctaccaatgtgtcagcccatggaagccaagctaactcgccctcaactcccaactcggctggttcttccagttcttttaacatgtcaaactctggagatttgttcatgagcgtgcagtcactcaatggggattcttaccaaggggcccaggttggagccaacgtgcaatcacaggtggatacccttcgccatgttatcagccagacaggaggatacagtgatggactcgcagccagtcagatgtacagtccgcagggcatcagtgctaatggaggttggcaggatgctactaccccttcatcagtgacctcccctacagaaggccctggcagtgttcactctgatacctccaactgatctcccagcaatcgcatcccggctgaccctgtgccccagttggggcaggggcaggagggagggtttctctcccaacgctgaagcggtcagactggaggtcgaagcaatcagcaaacacaataagagtctccttctcttctcttctttgggatgctatttcagccaatctggacacttctttatactctcttcccttttttttctgggtagaagccacccttccctgcctccagctgtcagcctggttttcgtcatcttccctgcccctgtgcctctgtcctagactcccggggtccccgccctctctcatatcactgaaggatattttcaacaattagaggaatttaaagaggaaaaaaattacaaagaaaataataaaagtgtttgtacgttttca

SEQ ID NO: 58269 - DNA, 1676 bp, Homo sapiens
catcctcccaccatcctctaaagaggcaaagggattttttttttcttttggtcttcttttttcccccttccctgtttatcctgaaaaggatttgaagacaagcttgaaggataaaaagccttggtgcttcccaggagccgagccgaggagcagaagaggaagagccgggggctgccgtagcctttggagatggacgagcagcccaggctgatgcattcccatgctggggtcgggatggccggacaccccggcctgtcccagcacttgcaggatggggccggagggaccgagggggagggcgggaggaagcaggacattggagacattttacagcaaattatgaccatcacagaccagagtttggatgaggcgcaggccagaaaacatgctttaaactgccacagaatgaagcctgccttgtttaatgtgttgtgtgaaatcaaagaaaaaacagttttgagtatccgaggagcccaggaggaggaacccacagacccccagctgatgcggctggacaacatgctgttagcggaaggcgtggcggggcctgagaagggcggagggtcggcggcagcggcggcagcggcggcggcttctggaggggcaggttcagacaactcagtggagcattcagattacagagccaaactctcacagatcagacaaatctaccatacggagctggagaaatacgagcaggcctgcaacgagttcaccacccacgtgatgaatctcctgcgagagcaaagccggaccaggcccatctccccaaaggagattgagcggatggtcagcatcatccaccgcaagttcagctccatccagatgcagctcaagcagagcacgtgcgaggcggtgatgatcctgcgttcccgatttctggatgcgcggcggaagagacggaatttcaacaagcaagcgacagaaatcctgaatgaatatttctattcccatctcagcaacccttaccccagtgaggaagccaaagaggagttagccaagaagtgtggcatcacagtctcccaggtatcaaactggtttggaaataagcgaatccggtacaagaagaacataggtaaatttcaagaggaagccaatatttatgctgccaaaacagctgtcactgctaccaatgtgtcagcccatggaagccaagctaactcgccctcaactcccaactcggctggctaatggaggttggcaggatgctactaccccttcatcagtgacctcccctacagaaggccctggcagtgttcactctgatacctccaactgatctcccagcaatcgcatcccggctgaccctgtgccccagttggggcaggggcaggagggagggtttctctcccaacgctgaagcggtcagactggaggtcgaagcaatcagcaaacacaataagagtctccttctcttctcttctttgggatgctatttcagccaatctggacacttctttatactctcttcccttttttttctgggtagaagccacccttccctgcctccagctgtcagcctggttttcgtcatcttccctgcccctgtgcctctgtcctagactcccggggtccccgccctctctcatatcactgaaggatattttcaacaattagaggaatttaaagaggaaaaaaattacaaagaaaataataaaagtgtttgtacgttttca

SEQ ID NO: 58270 - DNA, 1224 bp, Homo sapiens
catcctcccaccatcctctaaagaggcaaagggattttttttttcttttggtcttcttttttcccccttccctgtttatcctgaaaaggatttgaagacaagcttgaaggataaaaagccttggtgcttcccaggagccgagccgaggagcagaagaggaagagccgggggctgccgtagcctttggagatggacgagcagcccaggctgatgcattcccatgctggggtcgggatggccggacaccccggcctgtcccagcacttgcaggatggggccggagggaccgagggggagggcgggaggaagcaggacattggagacattttacagcaaattatgaccatcacagaccagagtttggatgaggcgcaggccagaaaacatgctttaaactgccacagaatgaagcctgccttgtttaatgtgttgtgtgaaatcaaagaaaaaacagttttgagtatccgaggagcccaggaggaggaacccacagacccccagctgatgcggctggacaacatgctgttagcggaaggcgtggcggggcctgagaagggcggagggtcggcggcagcggcggcagcggcggcggcttctggaggggcaggttcagacaactcagtggagcattcagattacagagccaaactctcacagatcagacaaatctaccatacggagctggagaaatacgagcaggcctgcaacgagttcaccacccacgtgatgaatctcctgcgagagcaaagccggaccaggcccatctccccaaaggagattgagcggatggtcagcatcatccaccgcaagttcagctccatccagatgcagctcaagcagagcacgtgcgaggcggtgatgatcctgcgttcccgatttctggatgcgcggcggaagagacggaatttcaacaagcaagcgacagaaatcctgaatgaatatttctattcccatctcagcaacccttaccccagtgaggaagccaaagaggagttagccaagaagtgtggcatcacagtctcccaggtatcaaactggtttggaaataagcgaatccggtacaagaagaacataggtaaatttcaagaggaagccaatatttatgctgccaaaacagctgtcactgctaccaatgtgtcagcccatggaagccaagctaactcgccctcaactcccaactcggctggatacccttctgtcgtcttcttaccgtcctgtagagtt

SEQ ID NO: 58271 - DNA, 1386 bp, Homo sapiens
catcctcccaccatcctctaaagaggcaaagggattttttttttcttttggtcttcttttttcccccttccctgtttatcctgaaaaggatttgaagacaagcttgaaggataaaaagccttggtgcttcccaggagccgagccgaggagcagaagaggaagagccgggggctgccgtagcctttggagatggacgagcagcccaggctgatgcattcccatgctggggtcgggatggccggacaccccggcctgtcccagcacttgcaggatggggccggagggaccgagggggagggcgggaggaagcaggacattggagacattttacagcaaattatgaccatcacagaccagagtttggatgaggcgcaggccagaaaacatgctttaaactgccacagaatgaagcctgccttgtttaatgtgttgtgtgaaatcaaagaaaaaacagttttgagtatccgaggagcccaggaggaggaacccacagacccccagctgatgcggctggacaacatgctgttagcggaaggcgtggcggggcctgagaagggcggagggtcggcggcagcggcggcagcggcggcggcttctggaggggcaggttcagacaactcagtggagcattcagattacagagccaaactctcacagatcagacaaatctaccatacggagctggagaaatacgagcaggcctgcaacgagttcaccacccacgtgatgaatctcctgcgagagcaaagccggaccaggcccatctccccaaaggagattgagcggatggtcagcatcatccaccgcaagttcagctccatccagatgcagctcaagcagagcacgtgcgaggcggtgatgatcctgcgttcccgatttctggatgcgcggcggaagagacggaatttcaacaagcaagcgacagaaatcctgaatgaatatttctattcccatctcagcaacccttaccccagtgaggaagccaaagaggagttagccaagaagtgtggcatcacagtctcccaggtatcaaactggtttggaaataagcgaatccggtacaagaagaacataggtaaatttcaagaggaagccaatatttatgctgccaaaacagctgtcactgctaccaatgtgtcagcccatggaagccaagctaactcgccctcaactcccaactcggctggtggatacccttcgccatgttatcagccagacaggaggatacagtgatggactcgcagccagtcagatgtacagtccgcagggcatcagtaatttgcaagacctattgatggcttggatgctctggtggtacaaccagtcctctttccggatgccaatctgactttgaggagcaaggtacctcctgccacattcaccaac

SEQ ID NO: 58272 - DNA, 1193 bp, Homo sapiens
  misc_feature (87)..(87): n is a, c, g, or t
tacgaggcctggtgtgactcggacgaggggctgacggggctgttggagtttgcagagacacggaggaggagagagcctgtgctttgnctgccgcgcggctgggggagatctggcttttgcaacagcccaccccctttgagatcactctggcccggagtgggggtggggggcagcggggggtggggggggaaagtttgcattgcaatccccctgccttcctctcctttctcccgatcaatgcatatttgcaaaaggattaagccacagatttaagcgccgggagcccatttctgccttgcaaaggagaccggactgaaaaacctaaagccagctctgatttcttttcgccaagtgggaaggatttgaagacaagcttgaaggataaaaagccttggtgcttcccaggagccgagccgaggagcagaagaggaagagccgggggctgccgtagcctttggagatggacgagcagcccaggctgatgcattcccatgctggggtcgggatggccggacaccccggcctgtcccagcacttgcaggatggggccggagggaccgagggggagggcgggaggaagcaggacattggagacattttacagcaaattatgaccatcacagaccagagtttggatgaggcgcaggccagaaaacatgctttaaactgccacagaatgaagcctgccttgtttaatgtgttgtgtgaaatcaaagaaaaaacagatttattaaaacagatgtgatctaccaataatgttttacatctgatggaaagaattggaatataataatcctacttttctttaatgcattactaattcagacaggcccttctggttgttctgaattggagagagagcagacacttcagttggatttggaatcatccacttttttttgcaggtatttcgaaaaaagcctggttttggtacagctcttccagaacccacgggaagaacctgttcatcagctcatccatccgtctgctgagtaaatgcttattgagcatctactgaatgccagcactgttctttgttcttggaatacatcagtaaacaaaataagaaaaacaaaaccaaacctcctgacctcaaggagcttttattttaggaatgatgtcttttagtcatttaatagttgctgtttttattaactcttaactgtacccataaactggatactttcaactta

SEQ ID NO: 58273 - DNA, 1392 bp, Homo sapiens
  misc_feature (87)..(87): n is a, c, g, or t
tacgaggcctggtgtgactcggacgaggggctgacggggctgttggagtttgcagagacacggaggaggagagagcctgtgctttgnctgccgcgcggctgggggagatctggcttttgcaacagcccaccccctttgagatcactctggcccggagtgggggtggggggcagcggggggtggggggggaaagtttgcattgcaatccccctgccttcctctcctttctcccgatcaatgcatatttgcaaaaggattaagccacagatttaagcgccgggagcccatttctgccttgcaaaggagaccggactgaaaaacctaaagccagctctgatttcttttcgccaagtgggaaggatttgaagacaagcttgaaggataaaaagccttggtgcttcccaggagccgagccgaggagcagaagaggaagagccgggggctgccgtagcctttggagatggacgagcagcccaggctgatgcattcccatgctggggtcgggatggccggacaccccggcctgtcccagcacttgcaggatggggccggagggaccgagggggagggcgggaggaagcaggacattggagacattttacagcaaattatgaccatcacagaccagagtttggatgaggcgcaggccagaaaacatgctttaaactgccacagaatgaagcctgccttgtttaatgtgttgtgtgaaatcaaagaaaaaacagatttattaaaacagatgtgatctaccaataatgttttacatctgatggaaagaattggaatataataatcctacttttctttaatgcattactaattcagacaggcccttctggttgttctgaattggagagagagcagacacttcagttggatttggaatcatccacttttttttgcaggtatttcgaaaaaagcctggttttggtacagctcttccagaacccacgggaagaacctgttcatcagctcatccatccgtctgctgagtaaatgcttattgagcatctactgaatgccagcactgttctttgttcttggaatacatcagtaaacaaaataagaaaaacaaaaccaaacctcctgacctcaaggagcttttattttaggaatgatgtcttttagtcatttaatagttgctgtttttattaactcttaactgtacccataaactggatactttcaacttaaaaaaaaaaaagagaaactaattatgtgccctaaggatcaccaggccttaggttctacctttatttttcttctactgttaaatagcaacctcattcctcaggctgctgatggaattggtaactgagtaatcaggccactgtgctcggggacataaaacctgtggctgctgccattgcagagtcccgtcatggatcagag

SEQ ID NO: 58274 - DNA, 450 bp, Homo sapiens
gtgagatggaggcttttcttttcctttcttggggttttttgtttttcttcctcttgcagggggaaacaatgggaaccgaatcaccacagcgctttttttgaaaaatgttatttcttttctcattttgacaagcaactacatggcggaggagtaaaatttgaaggagcgttgttatcgaaagtgtaatcgcccatgccgagatgtggctgtgtacatatttgtgtgtgtgtgtgtgaatataggggtattcatttatatccacacaaacacacaggcatgccgaaaatactgccaactgatccaaaagcggccctcggcactttttactgctttaaaaaagtatcagagaaagcagaattgtcaagttttgaacagcattccatgccttcttgttgaggggactctgtaacattacgaaataaaatgtcccaagaacactttatttgcaaa

SEQ ID NO: 58275 - DNA, 335 bp, Homo sapiens
tttccaggtatatggcatagtcagcagaggtcagtgccaaagagaggaccaatacgttgagaactgaaagtgccctcatagctgagaatttagacattgtaggtaatcattttgttttgcttttgaatgacagtgataatcattttcaaattcagagagaaaaaaaggcagtggaagtggaaaagctaaagatataagaaaactaaatgttgaaacaatatcccagtgaataatttcaaacttttaaaaatgtatttattaaataaagtacatataagaaatgttgctattgggtactatgctcagtatctgggtgatgggatcaattgtacccc

SEQ ID NO: 58276 - DNA, 341 bp, Homo sapiens
atccttagcatgcctgtgttactgagaccataaacttttttgttttccttctgccttcacccagtgtgtgttaagtcttgcttgttaagctcccacacttaaatggctgcttgcagaattgcaaagggactagggagagaacaaaaacagatatgcaggtggtggttgttaaccagacaggatttctaaggagggttcaggcagtcaagtggttttgtgtatgtgttttatgttcatagttttgagttttacaatgtgtgaagcttacttttgctagcattaggtatagtttatttgaaagaatgaggctcctgaaataaacatgccagtaaactatatct

SEQ ID NO: 58277 - DNA, 1212 bp, Homo sapiens
ggcatttcaatacagtgacccaattactttctgtcaacaaattcaccagcaaaataaaggggctaacacattaatgagatttcctgagactgccctgtagagatgcttgcaatcctttgctctggagaagccaggcaccatggcatgaggcagccctgtggagaggttcatgtggtacaggaccaggcctgcagcatcacttgagagaggcaacataactcttttactgactatcacagataggaccacaaaacagccttgtaaactcatcctagaggatctaaaagagaaccccctcataacagaatggcattcccagcttgcaggctctgagactccattgagtcatgccacatgtatggaaaatgatttttggagtgttattctatctaaggaaaaacaaagcaaattttccactttcaagattaaaggacattctgtctacattaagacaagcaggtacaaagaagtaagttactgttggattaagaatatccaagacaatggtcacaacttgaaagcacatggaaaaacatgaattatttttataatgtcagctaatccacagctgtgccacctgttagtatggatgctatccaaaaggatttttgaaaccttgttatccaaatgcagaaatggcagctgaagagatgatttgtgacagcatttgctgagacgaagtctgtccactagatggataaaatcagttcccttttcatagcttgatcatctacatctgctagtgacccagtccatgagagtcaccaagaattgattccactgaggcgatggcaggcggggctttggtgttggaaaagtcagtggttgatatggacagcacagactcacataagctgctggtttattacactagaaaaataagggatcccttgacccagctcggcaagtgtgaaatcacgaaataaatgaaggttaacaaagactggtctaaggaatagttcactacaataccgcaatgctcttctcactaatactcgactctgcatttcggtacttatatctgaaagatttgcaaataatgacaacattcgtgccagacattactgcaagtgaggaacagactaaaggagaggaaggaacaaaatgccttccaagagagaaacattcattagccttactggcaagtgtctaaagcaaacaaggaaactgcaaaataattacttagttacaaataaacgcttttagcacagt

SEQ ID NO: 58278 - DNA, 1127 bp, Homo sapiens
ggaatctctctccccatctaccttagatcctttgctctggagaagccaggcaccatggcatgaggcagccctgtggagaggttcatgtggtacaggaccaggcctgcagcatcacttgagagaggcaacataactcttttactgactatcacagataggaccacaaaacagccttgtaaactcatcctagaggatctaaaagagaaccccctcataacagaatggcattcccagcttgcaggctctgagactccattgagtcatgccacatgtatggaaaatgatttttggagtgttattctatctaaggaaaaacaaagcaaattttccactttcaagattaaaggacattctgtctacattaagacaagcaggtacaaagaagtaagttactgttggattaagaatatccaagacaatggtcacaacttgaaagcacatggaaaaacatgaattatttttataatgtcagctaatccacagctgtgccacctgttagtatggatgctatccaaaaggatttttgaaaccttgttatccaaatgcagaaatggcagctgaagagatgatttgtgacagcatttgctgagacgaagtctgtccactagatggataaaatcagttcccttttcatagcttgatcatctacatctgctagtgacccagtccatgagagtcaccaagaattgattccactgaggcgatggcaggcggggctttggtgttggaaaagtcagtggttgatatggacagcacagactcacataagctgctggtttattacactagaaaaataagggatcccttgacccagctcggcaagtgtgaaatcacgaaataaatgaaggttaacaaagactggtctaaggaatagttcactacaataccgcaatgctcttctcactaatactcgactctgcatttcggtacttatatctgaaagatttgcaaataatgacaacattcgtgccagacattactgcaagtgaggaacagactaaaggagaggaaggaacaaaatgccttccaagagagaaacattcattagccttactggcaagtgtctaaagcaaacaaggaaactgcaaaataattacttagttacaaataaacgcttttagcacagt

SEQ ID NO: 58279 - DNA, 2154 bp, Homo sapiens
agcagaagcagccattatacttctaagctgtgccaactaagtggttcccatttctggagccagagatgataattaagtcattgcaagttgcctgaagagaattactcaggcaactgggaaaggcagtggaaggtctgtgaagcaaagttttcaagtagatattgctattactggcaggtgtgcaaggcgtgtagtaaaatcagtttgtggcataggtcggcccttgctgactaaatcctctctggggattgaattgatgacgactgtgacttgagttggattcgaaaatggcttcccttggcctcttgaaagagtgcagatgaagccttttccgtggatttcagtaactttccagcataccatgacgatttcttccccaaatatacacatgctcttttgctctttgtgcctgatcttcagtaatttttagttttttaacaggcagaaaaaatctagcagctaggaaagttcaagttggggtgggagtttttagtgaacttttctcccaggtgtgtggcctttatttctatttatatatgtttgtaaatggaattaccccctttctcttgcaaaataaccgcttcctggctgttggctcactttgctggaatttttctgaatccaggttaagatttccagaagtcagctttggaaaacgtgacactcctaccaaagtccagatggttagaaagttatcacataccatgggtttcagtgtttttggaaacccgtttttttctggtttttttttccccctctccattttagaatcttctcccagtcccttcgggcctagttctgtctcatcttgctttattgggttttaaaaaccggtcttatttaagcttttctaatttgtatttatgtacttatttattttttggtatgatggcagggaggggacaaagcagaaataccccttttatatgacaatgtgtgagaaaagaaactttagcttaaaactccgtaaaatgtgctcacttcagcagcacatatactaaaattaaaatgatatagagaagattagcatatagaaaaaaagaaaaaagatttccttaaaacaagaaaaccaagaatgtttttggtttgttgcggtgcccagccgaggttgaggagggatgggtattgttggtgcactgctggtttcatttggagtgtgggacattagggtgagacaaggacctggaatttaaaaaccacagaatcaaacactgtgaaccactggtctctggctaagcagatcagttttctgattttccttggaagcgttttgaatttttctgttgaagttggatttcctaatactttttttctcttagataatcagaacaaatggttgaatacattataatacaaaaatttcttcactttttattcttggttttcttgcctcgtttttcggttttaatgccaaatgattgggtcatggggtgggaaataaaaacaactttgtataaatttgtagttgtgtttgaaataatgttgtttatttattattatattgatgtaactctttttcttcagagagctgcagcacttcctagaaacactcattactctgcttgtaagttgcaactccagtgttagtagccaggtaatttcatcatcagctgggtaagaagacttattgaaaaaaacagtagccacctcacttctcagacagatgaggcactttgtgtgtgtgtgtgtgtgtgtgtgtgtgtgtgtgtgtgtctgtgtgtggtttttagctctctttctcccatcagacaatttcttttaccctaagtgagagccagagtgtgtccacttgcaagggcagcctccccaccgctccactattttaacgcttgcccttttttacatatacctcacggggtgtctgtcaccattgaaataccttccctgggtacaaaaatcccattagaaggaataagatctagtagttcagtggcacagtagagcaactatagttaacaaaaatttattgtacatttcaaaatagaggagtggaattggaatgttcctaacacaaagaaatgataaatgagccgggtgccgtggctcacacctataatcccagcactttgggaggctgaggtaggtggatcatttgagctcaggacttcaagaccagctgggcaacatgggaagaccttgactctacaaaatata

SEQ ID NO: 58280 - DNA, 384 bp, Homo sapiens
tgcccaagaacaaagttctggacaaggaatcacgactccaagttcatgttctgggtctgccgctccctggctaatgactttgcccggtcagagcttgtccggggcctgggcttcctggtcagtgaagtgaatgcttgcaaagtcctttccagcttaagaatctggacgctaccagtacatctaacaggtttatttaaaatgaaaaattctgagcatgttatgttttatgttgaaaagtacacataaaatagctgacttttaaaaataaatattttttatttatgtaaatccatgtctatacaactgcaaacttttgatctctaagttcttttttggaacacacgctttgatggatttcaataaacatgaatacattttttaaaa

SEQ ID NO: 58281 - DNA, 3911 bp, Homo sapiens
  misc_feature (170)..(170): n is a, c, g, or t
  misc_feature (1916)..(1916): n is a, c, g, or t
ggggccctgattcacgggccgctggggcagggttgggggttgggggtgcccacagggttggctagtggggttttgggggggcagtgggtgcaaggagtttggtttgtgtctgccggccggcaggcaaacgcaaccacgcggtgggggaggcggctagcgtggtggacggnccgcgtggccctgtggcagccgagccatggtttctaaactgagccagctgcagacggagctcctggcggccctgctcgagtcagggctgagcaaagaggcactgatccaggcactgggtgagccggggccctacctcctggctggagaaggccccctggacaagggggagtcctgcggcggcggtcgaggggagctggctgagctgcccaatgggctgggggagactcggggctccgaggacgagacggacgacgatggggaagacttcacgccacccatcctcaaagagctggagaacctcagccctgaggaggcggcccaccagaaagccgtggtggagacccttctgcaggaggacccgtggcgtgtggcgaagatggtcaagtcctacctgcagcagcacaacatcccacagcgggaggtggtcgataccactggcctcaaccagtcccacctgtcccaacacctcaacaagggcactcccatgaagacgcagaagcgggccgccctgtacacctggtacgtccgcaagcagcgagaggtggcgcagcagttcacccatgcagggcagggagggctgattgaagagcccacaggtgatgagctaccaaccaagaaggggcggaggaaccgtttcaagtggggcccagcatcccagcagatcctgttccaggcctatgagaggcagaagaaccctagcaaggaggagcgagagacgctagtggaggagtgcaatagggcggaatgcatccagagaggggtgtccccatcacaggcacaggggctgggctccaacctcgtcacggaggtgcgtgtctacaactggtttgccaaccggcgcaaagaagaagccttccggcacaagctggccatggacacgtacagcgggccccccccagggccaggcccgggacctgcgctgcccgctcacagctcccctggcctgcctccacctgccctctcccccagtaaggtccacggtgtgcgctatggacagcctgcgaccagtgagactgcagaagtaccctcaagcagcggcggtcccttagtgacagtgtctacacccctccaccaagtgtcccccacgggcctggagcccagccacagcctgctgagtacagaagccaagctggtctcagcagctgggggccccctcccccctgtcagcaccctgacagcactgcacagcttggagcagacatccccaggcctcaaccagcagccccagaacctcatcatggcctcacttcctggggtcatgaccatcgggcctggtgagcctgcctccctgggtcctacgttcaccaacacaggtgcctccaccctggtcatcggcctggcctccacgcaggcacagagtgtgccggtcatcaacagcatgggcagcagcctgaccaccctgcagcccgtccagttctcccagccgctgcacccctcctaccagcagccgctcatgccacctgtgcagagccatgtgacccagagccccttcatggccaccatggctcagctgcagagcccccacgccctctacagccacaagcccgaggtggcccagtacacccacacgggcctgctcccgcagactatgctcatcaccgacaccaccaacctgagcgccctggccagcctcacgcccaccaagcaggtcttcacctcagacactgaggcctccagtgagtccgggcttcacacgccggcatctcaggccaccaccctccacgtccccagccaggaccctgccngcatccagcacctgcagccggcccaccggctcagcgccagccccacagtgtcctccagcagcctggtgctgtaccagagctcagactccagcaatggccagagccacctgctgccatccaaccacagcgtcatcgagaccttcatctccacccagatggcctcttcctcccagtaaccacggcacctgggccctggggcctgtactgcctgcttggggggtgatgagggcagcagccagccctgcctggaggacctgagcctgccgagcaaccgtggcccttcctggacagctgtgcctcgctccccactctgctctgatgcatcagaaagggagggctctgaggcgccccaacccgtggaggctgctcggggtgcacaggagggggtcgtggagagctaggagcaaagcctgttcatggcagatgtaggagggactgtcgctgcttcgtgggatacagtcttcttacttggaactgaagggggcggcctatgacttgggcacccccagcctgggcctatggagagccctgggaccgctacaccactctggcagccacacttctcaggacacaggcctgtgtagctgtgacctgctgagctctgagaggccctggatcagcgtggccttgttctgtcaccaatgtacccaccgggccactccttcctgccccaactccttccagctagtgacccacatgccatttgtactgaccccatcacctactcacacaggcatttcctgggtggctactctgtgccagagcctggggctctaacgcctgagcccagggaggccgaagctaacagggaaggcaggcagggctctcctggcttcccatccccagcgattccctctcccaggccccatgacctccagctttcctgtatttgttcccaagagcatcatgcctctgaggccagcctggcctcctgcctctactgggaaggctacttcggggctgggaagtcgtccttactcctgtgggagcctcgcaacccgtgccaagtccaggtcctggtggggcagctcctctgtctcgagcgccctgcagaccctgcccttgtttggggcaggagtagctgagctcacaaggcagcaaggcccgagcagctgagcagggccggggaactggccaagctgaggtgcccaggagaagaaagaggtgaccccagggcacaggagctacctgtgtggacaggactaacactcagaagcctgggggcctggctggctgagggcagttcgcagccaccctgaggagtctgaggtcctgagcactgccaggagggacaaaggagcctgtgaacccaggacaagcatggtcccacatccctgggcctgctgctgagaacctggccttcagtgtaccgcgtctaccctgggattcaggaaaaggcctggggtgacccggcaccccctgcagcttgtagccagccggggcgagtggcacgtttatttaacttttagtaaagtcaaggagaaatgcggtggaaacttcttgcttgtccacaaatcattcagatggggtttgggcaggtagcgggaggctggggcaggccagaggcctgcgaagaggagacaggctccagcacccacgctctcacaccccacatctctgcttttcttgctctgctgagactctaatgacaaagccagatttcatcttaacctcaagcttctactttttaaaaaaattttgttttggagacagggtctcactgtcacccaggctggactgcagtggcattatacagctcactgcagccttgaactcctggactaaagggatcctcccacctcagcctcacaagcagcctcacaggcgctcactaccatgcccaactaatttttgtattcttttttttatagagacgaggtttcaccatgttgcctaggctggtctggaactcggctcaagtgatccacctgcctcggcctcccaaagtgctgggattacaggtgtgagccaccatccctggccatgagcttctac

SEQ ID NO: 58282 - DNA, 2309 bp, Homo sapiens
  misc_feature (170)..(170): n is a, c, g, or t
  misc_feature (1704)..(1704): n is a, c, g, or t
  misc_feature (1816)..(1816): n is a, c, g, or t
  misc_feature (2261)..(2262): n is a, c, g, or t
ggggccctgattcacgggccgctggggcagggttgggggttgggggtgcccacagggttggctagtggggttttgggggggcagtgggtgcaaggagtttggtttgtgtctgccggccggcaggcaaacgcaaccacgcggtgggggaggcggctagcgtggtggacggnccgcgtggccctgtggcagccgagccatggtttctaaactgagccagctgcagacggagctcctggcggccctgctcgagtcagggctgagcaaagaggcactgatccaggcactgggtgagccggggccctacctcctggctggagaaggccccctggacaagggggagtcctgcggcggcggtcgaggggagctggctgagctgcccaatgggctgggggagactcggggctccgaggacgagacggacgacgatggggaagacttcacgccacccatcctcaaagagctggagaacctcagccctgaggaggcggcccaccagaaagccgtggtggagacccttctgcaggaggacccgtggcgtgtggcgaagatggtcaagtcctacctgcagcagcacaacatcccacagcgggaggtggtcgataccactggcctcaaccagtcccacctgtcccaacacctcaacaagggcactcccatgaagacgcagaagcgggccgccctgtacacctggtacgtccgcaagcagcgagaggtggcgcagcagttcacccatgcagggcagggagggctgattgaagagcccacaggtgatgagctaccaaccaagaaggggcggaggaaccgtttcaagtggggcccagcatcccagcagatcctgttccaggcctatgagaggcagaagaaccctagcaaggaggagcgagagacgctagtggaggagtgcaatagggcggaatgcatccagagaggggtgtccccatcacaggcacaggggctgggctccaacctcgtcacggaggtgcgtgtctacaactggtttgccaaccggcgcaaagaagaagccttccggcacaagctggccatggacacgtacagcgggccccccccagggccaggcccgggacctgcgctgcccgctcacagctcccctggcctgcctccacctgccctctcccccagtaaggtccacggtgtgcgctatggacagcctgcgaccagtgagactgcagaagtaccctcaagcagcggcggtcccttagtgacagtgtctacacccctccaccaagtgtcccccacgggcctggagcccagccacagcctgctgagtacagaagccaagctggtctcagcagctgggggccccctcccccctgtcagcaccctgacagcactgcacagcttggagcagacatccccaggcctcaaccagcagccccagaacctcatcatggcctcacttcctggggtcatgaccatcgggcctggtgagcctgcctccctgggtcctacgttcaccaacacaggtgcctccaccctggtcatcggcctggcctccacgcaggcacagagtgtgccggtcatcaacagcatgggcagcagcctgaccaccctgcagcccgtccagttctcccagccgctgcacccctcctaccagcagccgctcatgccacctgtgcagagccatgtgacccagagccccttcatggccaccatggctcagctgcagagcccccacggtgagcnccctgtgccccacacagcaggagatgatgatagaggttggctgtcaatggatgcaggggaaaggggtgcctggcaggcattgcagtctgcatgtgtctctgggacaagtgtntttccgtgattgagggtgtctgcaggccagtgtgttcccatgtgaatgcacgtatctgtgtgtgtgcacgactgcttgtgtgagcagatccctagtcgtgtctgggtgtgtatcggttgtgcatgcatttgtgtgcatcctgtgtttctctgaaactcttagggccatatgaatttctaaaatctattcagattttagaaaggtaatctggggccaggcgtggtggctcatgcctgtaatcccagcactttggaaggccgaggtgggcagatcacttgaggtcaggagttcaagaccagcctggccaacacggtgaaaccccgtctctactaaaagtacaaaaattagccaggcgtggagcacgtgcctgtagtcccagctacttgggaggctgaggcagaatcgcttgaacctgggaggcggaggttgcagtgagctgagattnngccactgcactgcactccagcctgggcaacagagtgagtactctgcc

SEQ ID NO: 58283 - DNA, 100 bp, Homo sapiens
gctcagaagtggaaaaatatgaagatccattgctgatgggaatcctgccctaagcaaacggtggtgagacatggctgcttttagtgcatttattatgtga

SEQ ID NO: 58284 - DNA, 335 bp, Homo sapiens
  misc_feature (2)..(3): n is a, c, g, or t
  misc_feature (37)..(37): n is a, c, g, or t
  misc_feature (141)..(141): n is a, c, g, or t
tnnctttgcatgtggccattcctctggaaagcatctntatgcctttcatgggggattgagttcctccccacccctgctcctacgccctgtattgctagaagtggttcctctaccataaaatctatcacattagggaaaacntttatgtgtacatatgtgtctctctggctctaggtcactctactgaaacatctagaactggaggcaaaacatttcggtttgttcaccatcataccatccgtggctggcacagaggaggcactcagcaaatgaacaaaccaagctgaatgaagaagtaaactttctgaagacaggaagcttactgaagctggttc

SEQ ID NO: 58285 - DNA, 383 bp, Homo sapiens
gtggctcattgtcacatttttctagaaccatagggatgataaagcagcaagccaatggggtaatgagaggtgactagatggaagtgatgggcagtgaaggtgataccttcaaagtgcagaggccaaataatcattcatggacactgagagctgacagctgttgttagagaatgttggagatctgttcttaagcaagtgcagtggaagaattcagaagctttcatacctgcatagagaggtgatatagcctgtttgtcctgttaagaagaaaatgagaagactgtgacaacagccaaccctgaggcttttgccacagttctctggtctcactcctattagcccccaaaagggggaaaaatcccaaacacatgatctccgtaaag

SEQ ID NO: 58286 - DNA, 458 bp, Homo sapiens
acgctagtaacctccattctacttcccctttctgtgagtctccctgttgtagctacctgatgtaagtgaaatcagaccatgtttgatcttttgtgtctggcttattcacttagcatagtattttcaaggtttatccatgcgtgcaaattcccttcttttttatgacgaaatactatttaattgtgtgtgtacatgtgcacacacaatgaaatactatttcatcataaaaaggaagtttgtacacatatatacacacacaccaaattttgtttatccattcatcagttcatgggcatttgcggtttttttccacctttcgactgttgtgactttccgtttatttttaatctgaactttactccatcacttcctccctttccttttttattcgcaccataattttgaacaagcagactttgtattttcattactctggggatttttttgagggaggcttg

SEQ ID NO: 58287 - DNA, 465 bp, Homo sapiens
aggcatgtcttacatggcagcaggtgagggagagcgagagtgtgaaggaggaactgtcaaacatttacaaaaccatcagatcttgtgagaactcactcactatcacaagaacaacatgggggaaaccgcccccatgatccagtcacctcctaccaggtctctcccttgacacatgggaattatggggattacaattctagataatatctgagtgtggacacagagccaaaccatatcaccattctattgatccagtggtggagcacatgaaagacctcaaccccctgcacttgaagccccccatattgtttctgtcttcacccccaaggcaaggttctgcctgtggtagctgcatcccccagacatagtctgtcatagctgttctctgttttgacttttccctggagctgaaaagattggaaatgactgaaaacagtatctgctgattcataaagcagcaccaaa

SEQ ID NO: 58288 - DNA, 273 bp, Homo sapiens
cttgtaagtggaagccgaacaatgtgaacgcttagacacagggaggggaactacacactggggcgcgttgagggggcaaggggagggacagcatcaagaaaaatgctaatgcatactgggtttagcacctaggtgatgagttgataggtacagcaaaccaccgtggcacacatttacctaggtaacaaacctgcacatcctgcatatataccctggagcttaaatttaaaaaggctaacaaaaagaagagttctggaaattctaagtggctaa

SEQ ID NO: 58289 - DNA, 406 bp, Homo sapiens
gcttttaccaaggtaatcaggttaattaaatgagatcataaagatgagcagtaatctgataaaactggtttccttataagaagagggagagagaacaggaatatgcacatggagaaaagtctgtgagaggacacagtgagaaggcagccatcgccaagccaaggagaaaggcctcaccaaaacccaaccctgtctgtaccctgatcttcgacttccagcctccagagccactcagagttctgttatggaagccatcgcggattaacacaagttccagttttggctctagcatttactagatctcttactgagatctcttaagactgtttccttatgtacagtgtgctgatgcctagtttggaggttgtaaggattaagtgagcaaataaagtgctttatacagtca

SEQ ID NO: 58290 - DNA, 529 bp, Homo sapiens
ctcagcctggcccatgttacatcttcttcctgccccctcagcctcctcctctttactgacttctccctgttagcctttaaacatgctcaggtctctgtaaacttagagaggggttttggcatttggctaggctggtctcaaactcctgacctcaagtgatctgactgcctcagcctcccaaagtgctagtgattacaggcatgagccactgcgcccggcctcattcttccttcttgaaacagttttcatttgagcgtcaccattcctcattttccaggttttcttttgatgtatctggttgatccttctcaggctcctacaggtgctcctcctggggatgtaaagttgatgatactcatagtcctaccctaagccctgccctgtcctaactactccccctctatggatgctctaaactgcccccgtggcttatgctgggacctctgtgccagagaccctgaagactctgttgccagctcggatttcttcctgcataccaggtggaattatttcactcctgcttgtcatc

SEQ ID NO: 58291 - DNA, 332 bp, Homo sapiens
aaaattacagcaattctgcaatctcagtggaagtgttcacaatattatgccctggtaggaatgtaaacacgtctcgattatgttagttatgatgtctaaaggtatactgtccaactcttaagcactttatatgagaacactacaccaagatgaatcagcacattcagcacatgtgagaaatcaagtattttctttttatttttataaatcttagtggtttttttttttccggctcagactgtccaagacaaactccactactcgcatatccccagttgtttgtggtaggttgatgtaaatatggccacaatactgttagacttcacctccag

SEQ ID NO: 58292 - DNA, 208 bp, Homo sapiens
ttaaaaaatgtttgcactgctcagatggctttggcttcaagttgattagatatggaactggtttataatggattagaatgcaggatttgtttgctttgtaatattttaagaaagcaatgaaagaagcggcaatgacagggagagatattgtatacttacagtctgattcttttttcattaccggaaaagacaactaatttaggaatgt

SEQ ID NO: 58293 - DNA, 284 bp, Homo sapiens
tgacgttcagccatagtcctgtctactagctgagtctgggatttttataggcacaggatttggtgggggagggccatgggtagtttaggaaaaggcaacatttgagtgggaaaacagggatataagttctcactttggggcacagtttcaggcttttcagcttgagagtggggttttgctcagaacctgcccttttctgcctagaatttctctgccccctgcctctatcattgtatcagcaccactgcactccagcctgggtgacaggtgagactctgtctcaa

SEQ ID NO: 58294 - DNA, 1126 bp, Homo sapiens
ctgaaacagcaagtcataatcttgtatctctaaagatagaatacagtgcgatttggaaagacaccacaaaaactcatgatccaaaaaagattaaggctgttattaccaggaggaagagaaagaggacaaaatcaaactggatagatataatagagttgtttgttagaattgtcttcccaggagatggaaaaagacgccatcacaataggattcatgctttagttttcagctacagaaatgtaataactttgccaaagtaattacactacatagagtggcaatcgttctattaaaagtaagacccagtaatgttaggatttgttctggacaatgaaggggatgaggtttaatcttatgacttgaatgccaggtctgaaatcttttcttcaagtgatatttttatgaaactacttaggctgtgtttcacactgggtatgatttctaacctcttataacctgtacagtaatagattatgaaggatgaattatttgaaagctattttgtattatttaggagaggagctcttcaattctgaattgtctgccacttacaagcagaagaaagtttttttctttcattattttagcaactatcaataaaacagtattagaaatgcctactcttcagagatgtaatgggaataaattgtaaagtacttttgatattctaagatgaaagatggtattacacagtcaataattcaatgcttcccacattatgaattttatcaaaattatgtagagagctattagttcattccagcaacaaaacaggcttatataaaaacaaaaacctcctgggtcatgccatcctacaccaaattcctgttaaacagaggcatgatttattccagtgaccttgctatttcttcataactgtaatatgtctaatgttagacattttaaattaacattctattagataaactgagaatttaggtctctcgcaccacccaggcacatactctatctttccccacaaatatccaaatatggtaatataattggattaatacgttcatatgactatataattgttcacagctgagccacttaggtgctataattataatttctttgatacacaaattttgttttattgtgattaaaattgcctgatttctta

SEQ ID NO: 58295 - DNA, 185 bp, Homo sapiens
tgtattaatcacctagaactaacatatgtcaacattgacatgtttgcttcagagctctacatttcctttcctttccctttcccttcctccctttctttgctttcttttctttctttcccttgtttccacagtctcactctgtctcccagattggagtgcagtacatttaattaaattaattaatt

SEQ ID NO: 58296 - DNA, 1016 bp, Homo sapiens
aaagaccgaaggaagggatagagtccacctcagtgtcccaagctcaaatcatgctcagaacatgttcagaccagttctaagtctgtttggccttctggatctgtggtccagaatacttgcagaattttccttatttctagccttttgtgccatatgtgggataattcgctgaatatcatccgtgccatggataactcatacaaaggcacaaacccaagccatgtgaatggcctatttgaaaacttttttttttactgaggcaactgggacagtagctgttgaatgaactcctcttctaccaacgccagaatccagtgacgtttcaccagtatgaagatgggaaccacatgctatacttatagactacagataaacttcatatccttcttatttttattgttaacattactgttttgattctatcattcactcctatttgctgagcatctattatgggcttagtattttgcagctataatgagaagaggaattattttttaaaaaaatgactatagcactctcacattgtagagggacaggattcatatttagatatctaggtgaatttttcatttctgcaaagatggactccagaacctagtgtgaaatgggaatattgagtatgctatgtaatcaaggaatgaaggagaatggagctagatctgtaacaggagctacagaaaacaagatggcaaacaaggtcccagcagaacccagagtcgaaaacaagagaaccaggcgaatgtgagcacccaccagacccacccacagagaatcctagcgactgaagtcattttatgtttgccttcaacttgagataagtcccagaaaattggaggatgtggagaccaggatgcctcattgcacaactccaggaggcacattacagtaggtgtgcaagagggcatgacactcaagttacaaacacatcatttcatttaatcttcacaacactcctggaaaaaaggcattattatccttgtcttacagataaagaaactgagactccaagaata

SEQ ID NO: 58297 - DNA, 381 bp, Homo sapiens
cggaacgcgtgggtcgcccacgcgttctgtcgtcacccaaagtgttacatgcttaaaacacaagctacctttgtaaatacttcatctgatcagaagtgtgtcatgcttgtttgagatggagttgctgcattttaggactattgatacctttttttaattgtttttataatatttaatttgaaagaggagacccttctctctctactctttcatagactgaagtttgaatatgaaataggccttaaccatcatgttgactctcctgtcagaattttaggttggaaatttggttttattctttcatgtaattgcttatttgaacagatcacttactaaagctttagaagaagtgaaaaaaaaaacaaaacaaaacacaaaggg

SEQ ID NO: 58298 - DNA, 5312 bp, Homo sapiens
ggctacgagcggtcggctgtggcagcttctcttgtctctgacggcttgtagttatggggcaggagccgcggacgctgccgccctcccccaactggtactgcgcccgctgcagcgatgccgtgcccgggggcctctttggcttcgccgcgcggacctccgtcttccttgtccgcgtgggcccgggcgcaggcgagagtccagggacacccccgtttcgagtcataggagagttggtgggacacaccgaaagggtctctggcttcacattttctcatcaccctggtcagtacaacctctgtgccaccagctccgacgatgggactgtgaaaatatgggatgtagagacaaaaacagttgtgacagaacatgcactccatcagcatacgatatcaacattacattggtctcctcgagtaaaggacttaatagtatctggggatgaaaaaggagtagttttctgttactggtttaacagaaatgacagccagcacctctttatagaacccaggacaattttctgtcttacttgttcacctcatcatgaagatttagtagccattggctacaaggatggcatagtggtgataattgacatcagtaagaaaggagaagttattcataggcttcgaggccatgatgatgaaatccactccatagcctggtgtcccctgcctggtgaagattgtttatctataaaccaagaggaaacttcagaagaagctgaaattaccaacgggaatgctgtagcacaagctccagtaacaaaaggttgctacttagccactggaagcaaagatcaaaccattcgaatctggagctgttctagaggccgaggggtgatgattttgaaattgccctttctgaagagaagaggagggggtatagacccaactgttaaagagcgcctttggttgacactccattggcccagcaatcaaccaacacagctggtatctagctgttttggaggtgaactgttgcaatgggatctcactcaatcttggagacggaaatacaccctcttcagtgcctcatcagaagggcaaaatcattcaagaattgtgtttaatttatgtcctttacaaacagaggatgacaaacagctgttactttctacatcaatggatagagatgtaaaatgttgggacatagccaccttggagtgcagctggacccttccttcccttggtgggtttgcatacagcctggctttctcttctgtggacataggctctttggccataggtgttggggatggcatgatccgtgtatggaatacactctccataaagaacaactatgatgtgaaaaatttttggcaaggcgtgaagtccaaggttacagcgctgtgctggcacccaaccaaggaaggttgcttagcttttggaactgatgatggaaaagtgggattgtatgacacctactccaacaagcctccacagatttctagcacatatcataagaagactgtatatacgttagcctgggggccaccagtaccccccatgtcacttggaggagaaggagacagaccttcccttgctttatacagctgtggaggagaagggattgtcttacagcataatccctggaagcttagtggagaagcctttgacatcaacaaactcatcagggacaccaattcaatcaaatacaaattgcctgtacacacagagataagttggaaagcagatggcaaaatcatggctcttggcaatgaagatggatcaatagaaatatttcagattcccaacctgaaactgatctgtactatccaacagcatcacaagcttgtgaataccattagctggcatcatgagcatggcagccagccagaattgagctatctgatggcctctggctccaacaatgcagtcatttacgtgcacaacctgaagactgtcatagagagcagccctgagtctccagtgaccattacagagccctaccggaccctctcagggcatacggccaagattaccagtgtggcgtggagcccacatcatgatggaaggctggtatctgcttcctatgatggtacagcccaggtgtgggatgctctccgggaagagcccctgtgcaatttccgaggacatcaaggtcgactgctttgtgtggcatggtctcctttggatccagactgcatctattcaggggcagatgacttttgtgtgcacaagtggctcacttccatgcaagatcattcccggcctcctcaaggcaaaaaaagtattgaattggagaaaaaacggctctctcaacctaaggcaaagcccaaaaagaagaaaaagcccaccttgagaactcctgtaaagctggaatcgattgatggaaatgaagaagaaagcatgaaggagaactcaggacctgttgagaatggtgtgtcagaccaagaaggggaggagcaagcacgggagccggaattaccctgtggccttgctccagcggtttctagagaaccagttatctgcactccagtttcctcaggctttgaaaagtcaaaagtcaccattaataacaaagtcattttactgaaaaaggagccaccaaaagagaagccagaaaccttaatcaagaagagaaaagctcgttccttgcttcccctgagtacaagcctggaccacagatccaaagaggagcttcatcaggactgtttggtactagcaactgcaaagcactccagagagctgaatgaagatgtgtctgctgatgttgaggaaagatttcatctggggcttttcacagacagggctaccctgtatagaatgattgatattgaaggaaaaggtcacttagaaaatggccaccctgagttatttcaccagcttatgctttggaaaggagatctcaaaggtgttctccagactgcagcagaaagaggggagctgacagacaaccttgtggctatggcaccagcagctggctaccatgtgtggctatgggctgtggaagcttttgccaaacagctgtgttttcaggatcagtatgtcaaggctgcttctcacctactttccatccacaaagtgtatgaagcggtggagctgctcaagtcaaaccatttttacagggaagctattgcgattgccaaggcccggctgcgcccggaggacccagtcctgaaggacttgtacctcagctggggaaccgtcctagaaagagatggccactatgctgtagctgccaaatgctatttaggggccacttgtgcttatgatgcagccaaagttttggccaaaaagggggatgcggcatcacttagaacggctgcagagttggctgccatcgtaggagaggatgagttgtctgcttccctggctctcagatgtgcccaagagctgcttctggccaacaactgggtgggagcccaggaagccctgcagctgcatgaaagtctacagggtcagagattggtgttttgccttctggagctactgtccaggcatctggaggaaaagcagctttcagagggcaaaagctcctcctcttaccacacttggaacacgggcaccgaagggcctttcgtggagagggtgactgcagtgtggaagagcatcttcagccttgacacccctgagcagtatcaggaagcctttcagaagctgcagaacatcaagtacccatctgctacaaataacacacctgccaaacagctcctgcttcacatttgccatgacttgaccctggcagtgctgagccaacagatggcctcctgggacgaggctgtgcaggcgctccttcgggcggtggtccggagctatgactcagggagcttcaccatcatgcaggaagtgtactcagcctttctccctgatggctgtgaccacctaagagacaagttgggggaccatcaatcccctgccacaccagctttcaaaagtttggaggccttttttctttatgggcgtctgtatgaattctggtggtctctctccagaccttgcccaaattccagtgtctgggtaagggctggtcacagaacactctctgttgagccaagccagcagttagacactgccagcactgaagaaacggaccctgaaacttctcagccagagccaaacaggccttcagaactagacttgagactcacagaagaaggtgagcgaatgctgagtacttttaaggagctcttttcagaaaagcatgccagtctccaaaactcacagagaactgttgctgaagtccaagagaccttggcagaaatgatccgacaacaccaaaagagtcaactctgtaaatccacagcaaatggtcctgataagaatgaaccggaagtagaagcagagcagcccctctgcagttctcagagccagtgtaaagaagaaaaaaatgagccactttctctgcctgagttaaccaaaaggcttaccgaggcaaatcagagaatggcaaaatttcctgagagcattaaggcctggcccttcccagatgtgctggagtgctgcctcgtcctgcttctcatcaggtcccactttcctggctgtctggcccaggaaatgcagcagcaggcccaagagctccttcagaaatacggcaacacgaaaacttacagaagacactgccagaccttctgtatgtgaattttcacacaccttgaagaaactgccaaattgaaaatgtttgacatctttcacctctgcagttatgcctcaccagacattcactctggtccctagatgtttttgcagtaatccaaaagaatacaaacaaggattaagtttgaatcaaccctgcctacccatagacaacggtggatctgactttagactcaattgtggtctcctactggagggaagatcatgaaaagcccacagtagttattcagaactaacacctgcagagtgttggtcatctctacagccttaggcaggtttcacccaaagaggagaaacttctgtcgtcacccaaagtgttacatgcttaaaacacaagctacctttgtaaatacttcatctgatcagaagtgtgtcatgcttgtttgagatggagttgctgcattttaggactattgatacctttttttaattgtttttataatatttaatttgaaagaggagacccttctctctctactctttcatagactgaagtttgaatatgaaataggccttaaccatcatgttgactctcctgtcagaattttaggttggaaatttggttttattctttcatgtaattgcttatttgaacagatcacttactaaagctttagaagaagtgattcaaatgtgtgttttcccttcagttttataacaaatggattgatggcagtcaaatagctcaggaataaattactgtttcaatggttctta

SEQ ID NO: 58299 - DNA, 5477 bp, Homo sapiens
  misc_feature (5467)..(5467): n is a, c, g, or t
ggctacgagcggtcggctgtggcagcttctcttgtctctgacggcttgtagttatggggcaggagccgcggacgctgccgccctcccccaactggtactgcgcccgctgcagcgatgccgtgcccgggggcctctttggcttcgccgcgcggacctccgtcttccttgtccgcgtgggcccgggcgcaggcgagagtccagggacacccccgtttcgagtcataggagagttggtgggacacaccgaaagggtctctggcttcacattttctcatcaccctggtcagtacaacctctgtgccaccagctccgacgatgggactgtgaaaatatgggatgtagagacaaaaacagttgtgacagaacatgcactccatcagcatacgatatcaacattacattggtctcctcgagtaaaggacttaatagtatctggggatgaaaaaggagtagttttctgttactggtttaacagaaatgacagccagcacctctttatagaacccaggacaattttctgtcttacttgttcacctcatcatgaagatttagtagccattggctacaaggatggcatagtggtgataattgacatcagtaagaaaggagaagttattcataggcttcgaggccatgatgatgaaatccactccatagcctggtgtcccctgcctggtgaagattgtttatctataaaccaagaggaaacttcagaagaagctgaaattaccaacgggaatgctgtagcacaagctccagtaacaaaaggttgctacttagccactggaagcaaagatcaaaccattcgaatctggagctgttctagaggccgaggggtgatgattttgaaattgccctttctgaagagaagaggagggggtatagacccaactgttaaagagcgcctttggttgacactccattggcccagcaatcaaccaacacagctggtatctagctgttttggaggtgaactgttgcaatgggatctcactcaatcttggagacggaaatacaccctcttcagtgcctcatcagaagggcaaaatcattcaagaattgtgtttaatttatgtcctttacaaacagaggatgacaaacagctgttactttctacatcaatggatagagatgtaaaatgttgggacatagccaccttggagtgcagctggacccttccttcccttggtgggtttgcatacagcctggctttctcttctgtggacataggctctttggccataggtgttggggatggcatgatccgtgtatggaatacactctccataaagaacaactatgatgtgaaaaatttttggcaaggcgtgaagtccaaggttacagcgctgtgctggcacccaaccaaggaaggttgcttagcttttggaactgatgatggaaaagtgggattgtatgacacctactccaacaagcctccacagatttctagcacatatcataagaagactgtatatacgttagcctgggggccaccagtaccccccatgtcacttggaggagaaggagacagaccttcccttgctttatacagctgtggaggagaagggattgtcttacagcataatccctggaagcttagtggagaagcctttgacatcaacaaactcatcagggacaccaattcaatcaaatacaaattgcctgtacacacagagataagttggaaagcagatggcaaaatcatggctcttggcaatgaagatggatcaatagaaatatttcagattcccaacctgaaactgatctgtactatccaacagcatcacaagcttgtgaataccattagctggcatcatgagcatggcagccagccagaattgagctatctgatggcctctggctccaacaatgcagtcatttacgtgcacaacctgaagactgtcatagagagcagccctgagtctccagtgaccattacagagccctaccggaccctctcagggcatacggccaagattaccagtgtggcgtggagcccacatcatgatggaaggctggtatctgcttcctatgatggtacagcccaggtgtgggatgctctccgggaagagcccctgtgcaatttccgaggacatcaaggtcgactgctttgtgtggcatggtctcctttggatccagactgcatctattcaggggcagatgacttttgtgtgcacaagtggctcacttccatgcaagatcattcccggcctcctcaaggcaaaaaaagtattgaattggagaaaaaacggctctctcaacctaaggcaaagcccaaaaagaagaaaaagcccaccttgagaactcctgtaaagctggaatcgattgatggaaatgaagaagaaagcatgaaggagaactcaggacctgttgagaatggtgtgtcagaccaagaaggggaggagcaagcacgggagccggaattaccctgtggccttgctccagcggtttctagagaaccagttatctgcactccagtttcctcaggctttgaaaagtcaaaagtcaccattaataacaaagtcattttactgaaaaaggagccaccaaaagagaagccagaaaccttaatcaagaagagaaaagctcgttccttgcttcccctgagtacaagcctggaccacagatccaaagaggagcttcatcaggactgtttggtactagcaactgcaaagcactccagagagctgaatgaagatgtgtctgctgatgttgaggaaagatttcatctggggcttttcacagacagggctaccctgtatagaatgattgatattgaaggaaaaggtcacttagaaaatggccaccctgagttatttcaccagcttatgctttggaaaggagatctcaaaggtgttctccagactgcagcagaaagaggggagctgacagacaaccttgtggctatggcaccagcagctggctaccatgtgtggctatgggctgtggaagcttttgccaaacagctgtgttttcaggatcagtatgtcaaggctgcttctcacctactttccatccacaaagtgtatgaagcggtggagctgctcaagtcaaaccatttttacagggaagctattgcgattgccaaggcccggctgcgcccggaggacccagtcctgaaggacttgtacctcagctggggaaccgtcctagaaagagatggccactatgctgtagctgccaaatgctatttaggggccacttgtgcttatgatgcagccaaagttttggccaaaaagggggatgcggcatcacttagaacggctgcagagttggctgccatcgtaggagaggatgagttgtctgcttccctggctctcagatgtgcccaagagctgcttctggccaacaactgggtgggagcccaggaagccctgcagctgcatgaaagtctacagggtcagagattggtgttttgccttctggagctactgtccaggcatctggaggaaaagcagctttcagagggcaaaagctcctcctcttaccacacttggaacacgggcaccgaagggcctttcgtggagagggtgactgcagtgtggaagagcatcttcagccttgacacccctgagcagtatcaggaagcctttcagaagctgcagaacatcaagtacccatctgctacaaataacacacctgccaaacagctcctgcttcacatttgccatgacttgaccctggcagtgctgagccaacagatggcctcctgggacgaggctgtgcaggcgctccttcgggcggtggtccggagctatgactcagggagcttcaccatcatgcaggaagtgtactcagcctttctccctgatggctgtgaccacctaagagacaagttgggggaccatcaatcccctgccacaccagctttcaaaagtttggaggccttttttctttatgggcgtctgtatgaattctggtggtctctctccagaccttgcccaaattccagtgtctgggtaagggctggtcacagaacactctctgttgagccaagccagcagttagacactgccagcactgaagaaacggaccctgaaacttctcagccagagccaaacaggccttcagaactagacttgagactcacagaagaaggtgagcgaatgctgagtacttttaaggagctcttttcagaaaagcatgccagtctccaaaactcacagagaactgttgctgaagtccaagagaccttggcagaaatgatccgacaacaccaaaagagtcaactctgtaaatccacagcaaatggtcctgataagaatgaaccggaagtagaagcagagcagcccctctgcagttctcagagccagtgtaaagaagaaaaaaatgagccactttctctgcctgagttaaccaaaaggcttaccgaggcaaatcagagaatggcaaaatttcctgagagcattaaggcctggcccttcccagatgtgctggagtgctgcctcgtcctgcttctcatcaggtcccactttcctggctgtctggcccaggaaatgcagcagcaggcccaagagctccttcagaaatacggcaacacgaaaacttacagaagacactgccagaccttctgtatgtgaattttcacacaccttgaagaaactgccaaattgaaaatgtttgacatctttcacctctgcagttatgcctcaccagacattcactctggtccctagatgtttttgcagtaatccaaaagaatacaaacaaggattaagtttgaatcaaccctgcctacccatagacaacggtggatctgactttagactcaattgtggtctcctactggagggaagatcatgaaaagcccacagtagttattcagaactaacacctgcagagtgttggtcatctctacagccttaggcaggtttcacccaaagaggagaaacttctgtcgtcacccaaagtgttacatgcttaaaacacaagctacctttgtaaatacttcatctgatcagaagtgtgtcatgcttgtttgagatggagttgctgcattttaggactattgatacctttttttaattgtttttataatatttaatttgaaagaggagacccttctctctctactctttcatagactgaagtttgaatatgaaataggccttaaccatcatgttgactctcctgtcagaattttaggttggaaatttggttttattctttcatgtaattgcttatttgaacagatcacttactaaagctttagaagaagtgattcaaatgtgtgttttcccttcagttttataacaaatggattgatggcagtcaaatagctcaggaataaattactgtttcaatggttcttaaactttcttggatcataggatccttttgagaatcagattaaagccaaagatactctttggagaaaaatgcatattcctaattttgcatagatgacctttggattattggactctgactattgggaccctaaatactatttaattataaatctttnttttctcctc

SEQ ID NO: 58300 - DNA, 5221 bp, Homo sapiens
ggctacgagcggtcggctgtggcagcttctcttgtctctgacggcttgtagttatggggcaggagccgcggacgctgccgccctcccccaactggtactgcgcccgctgcagcgatgccgtgcccgggggcctctttggcttcgccgcgcggacctccgtcttccttgtccgcgtgggcccgggcgcaggcgagagtccagggacacccccgtttcgagtcataggagagttggtgggacacaccgaaagggtctctggcttcacattttctcatcaccctggtcagtacaacctctgtgccaccagctccgacgatgggactgtgaaaatatgggatgtagagacaaaaacagttgtgacagaacatgcactccatcagcatacgatatcaacattacattggtctcctcgagtaaaggacttaatagtatctggggatgaaaaaggagtagttttctgttactggtttaacagaaatgacagccagcacctctttatagaacccaggacaattttctgtcttacttgttcacctcatcatgaagatttagtagccattggctacaaggatggcatagtggtgataattgacatcagtaagaaaggagaagttattcataggcttcgaggccatgatgatgaaatccactccatagcctggtgtcccctgcctggtgaagattgtttatctataaaccaagaggaaacttcagaagaagctgaaattaccaacgggaatgctgtagcacaagctccagtaacaaaaggttgctacttagccactggaagcaaagatcaaaccattcgaatctggagctgttctagaggccgaggggtgatgattttgaaattgccctttctgaagagaagaggagggggtatagacccaactgttaaagagcgcctttggttgacactccattggcccagcaatcaaccaacacagctggtatctagctgttttggaggtgaactgttgcaatgggatctcactcaatcttggagacggaaatacaccctcttcagtgcctcatcagaagggcaaaatcattcaagaattgtgtttaatttatgtcctttacaaacagaggatgacaaacagctgttactttctacatcaatggatagagatgtaaaatgttgggacatagccaccttggagtgcagctggacccttccttcccttggtgggtttgcatacagcctggctttctcttctgtggacataggctctttggccataggtgttggggatggcatgatccgtgtatggaatacactctccataaagaacaactatgatgtgaaaaatttttggcaaggcgtgaagtccaaggttacagcgctgtgctggcacccaaccaaggaaggttgcttagcttttggaactgatgatggaaaagtgggattgtatgacacctactccaacaagcctccacagatttctagcacatatcataagaagactgtatatacgttagcctgggggccaccagtaccccccatgtcacttggaggagaaggagacagaccttcccttgctttatacagctgtggaggagaagggattgtcttacagcataatccctggaagcttagtggagaagcctttgacatcaacaaactcatcagggacaccaattcaatcaaatacaaattgcctgtacacacagagataagttggaaagcagatggcaaaatcatggctcttggcaatgaagatggatcaatagaaatatttcagattcccaacctgaaactgatctgtactatccaacagcatcacaagcttgtgaataccattagctggcatcatgagcatggcagccagccagaattgagctatctgatggcctctggctccaacaatgcagtcatttacgtgcacaacctgaagactgtcatagagagcagccctgagtctccagtgaccattacagagccctaccggaccctctcagggcatacggccaagattaccagtgtggcgtggagcccacatcatgatggaaggctggtatctgcttcctatgatggtacagcccaggtgtgggatgctctccgggaagagcccctgtgcaatttccgaggacatcaaggtcgactgctttgtgtggcatggtctcctttggatccagactgcatctattcaggggcagatgacttttgtgtgcacaagtggctcacttccatgcaagatcattcccggcctcctcaaggcaaaaaaagtattgaattggagaaaaaacggctctctcaacctaaggcaaagcccaaaaagaagaaaaagcccaccttgagaactcctgtaaagctggaatcgattgatggaaatgaagaagaaagcatgaaggagaactcaggacctgttgagaatggtgtgtcagaccaagaaggggaggagcaagcacgggagccggaattaccctgtggccttgctccagcggtttctagagaaccagttatctgcactccagtttcctcaggctttgaaaagtcaaaagtcaccattaataacaaagtcattttactgaaaaaggagccaccaaaagagaagccagaaaccttaatcaagaagagaaaagctcgttccttgcttcccctgagtacaagcctggaccacagatccaaagaggagcttcatcaggactgtttggtactagcaactgcaaagcactccagagagctgaatgaagatgtgtctgctgatgttgaggaaagatttcatctggggcttttcacagacagggctaccctgtatagaatgattgatattgaaggaaaaggtcacttagaaaatggccaccctgagttatttcaccagcttatgctttggaaaggagatctcaaaggtgttctccagactgcagcagaaagaggggagctgacagacaaccttgtggctatggcaccagcagctggctaccatgtgtggctatgggctgtggaagcttttgccaaacagctgtgttttcaggatcagtatgtcaaggctgcttctcacctactttccatccacaaagtgtatgaagcggtggagctgctcaagtcaaaccatttttacagggaagctattgcgattgccaaggcccggctgcgcccggaggacccagtcctgaaggacttgtacctcagctggggaaccgtcctagaaagagatggccactatgctgtagctgccaaatgctatttaggggccacttgtgcttatgatgcagccaaagttttggccaaaaagggggatgcggcatcacttagaacggctgcagagttggctgccatcgtaggagaggatgagttgtctgcttccctggctctcagatgtgcccaagagctgcttctggccaacaactgggtgggagcccaggaagccctgcagctgcatgaaagtctacagggtcagagattggtgttttgccttctggagctactgtccaggcatctggaggaaaagcagctttcagagggcaaaagctcctcctcttaccacacttggaacacgggcaccgaagggcctttcgtggagagggtgactgcagtgtggaagagcatcttcagccttgacacccctgagcagtatcaggaagcctttcagaagctgcagaacatcaagtacccatctgctacaaataacacacctgccaaacagctcctgcttcacatttgccatgacttgaccctggcagtgctgagccaacagatggcctcctgggacgaggctgtgcaggcgctccttcgggcggtggtccggagctatgactcagggagcttcaccatcatgcaggaagtgtactcagcctttctccctgatggctgtgaccacctaagagacaagttgggggaccatcaatcccctgccacaccagctttcaaaagtttggaggccttttttctttatgggcgtctgtatgaattctggtggtctctctccagaccttgcccaaattccagtgtctgggtaagggctggtcacagaacactctctgttgagccaagccagcagttagacactgccagcactgaagaaacggaccctgaaacttctcagccagagccaaacaggccttcagaactagacttgagactcacagaagaaggtgagcgaatgctgagtacttttaaggagctcttttcagaaaagcatgccagtctccaaaactcacagagaactgttgctgaagtccaagagaccttggcagaaatgatccgacaacaccaaaagagtcaactctgtaaatccacagcaaatggtcctgataagaatgaaccggaagtagaagcagagcagcccctctgcagttctcagagccagtgtaaagaagaaaaaaatgagccactttctctgcctgagttaaccaaaaggcttaccgaggcaaatcagagaatggcaaaatttcctgagagcattaaggcctggcccttcccagatgtgctggagtgctgcctcgtcctgcttctcatcaggtcccactttcctggctgtctggcccaggaaatgcagcagcaggcccaagagctccttcagaaatacggcaacacgaaaacttacagaagacactgccagaccttctgtatgtgaattttcacacaccttgaagaaactgccaaattgaaaatgtttgacatctttcacctctgcagttatgcctcaccagacattcactctggtccctagatgtttttgcagtaatccaaaagaatacaaacaaggattaagtttgaatcaaccctgcctacccatagacaacggtggatctgactttagactcaattgtggtctcctactggagggaagatcatgaaaagcccacagtagttattcagaactaacacctgcagagtgttggtcatctctacagccttaggcaggtttcacccaaagaggagaaacttctgtcgtcacccaaagtgttacatgcttaaaacacaagctacctttgtaaatacttcatctgatcagaagtgtgtcatgcttgtttgagatggagttgctgcattttaggactattgatacctttttttaattgtttttataatatttaatttgaaagaggagacccttctctctctactctttcatagactgaagtttgaatatgaaataggccttaaccatcatgttgactctcctgtcagaattttaggttggaaatttggttttattctttcatgtaattgcttatttgaacagatcacttactaaagctttagaagaagtga

SEQ ID NO: 58301 - DNA, 4478 bp, Homo sapiens
ggctacgagcggtcggctgtggcagcttctcttgtctctgacggcttgtagttatggggcaggagccgcggacgctgccgccctcccccaactggtactgcgcccgctgcagcgatgccgtgcccgggggcctctttggcttcgccgcgcggacctccgtcttccttgtccgcgtgggcccgggcgcaggcgagagtccagggacacccccgtttcgagtcataggagagttggtgggacacaccgaaagggtctctggcttcacattttctcatcaccctggtcagtacaacctctgtgccaccagctccgacgatgggactgtgaaaatatgggatgtagagacaaaaacagttgtgacagaacatgcactccatcagcatacgatatcaacattacattggtctcctcgagtaaaggacttaatagtatctggggatgaaaaaggagtagttttctgttactggtttaacagaaatgacagccagcacctctttatagaacccaggacaattttctgtcttacttgttcacctcatcatgaagatttagtagccattggctacaaggatggcatagtggtgataattgacatcagtaagaaaggagaagttattcataggcttcgaggccatgatgatgaaatccactccatagcctggtgtcccctgcctggtgaagattgtttatctataaaccaagaggaaacttcagaagaagctgaaattaccaacgggaatgctgtagcacaagctccagtaacaaaaggttgctacttagccactggaagcaaagatcaaaccattcgaatctggagctgttctagaggccgaggggtgatgattttgaaattgccctttctgaagagaagaggagggggtatagacccaactgttaaagagcgcctttggttgacactccattggcccagcaatcaaccaacacagctggtatctagctgttttggaggtgaactgttgcaatgggatctcactcaatcttggagacggaaatacaccctcttcagtgcctcatcagaagggcaaaatcattcaagaattgtgtttaatttatgtcctttacaaacagaggatgacaaacagctgttactttctacatcaatggatagagatgtaaaatgttgggacatagccaccttggagtgcagctggacccttccttcccttggtgggtttgcatacagcctggctttctcttctgtggacataggctctttggccataggtgttggggatggcatgatccgtgtatggaatacactctccataaagaacaactatgatgtgaaaaatttttggcaaggcgtgaagtccaaggttacagcgctgtgctggcacccaaccaaggaaggttgcttagcttttggaactgatgatggaaaagtgggattgtatgacacctactccaacaagcctccacagatttctagcacatatcataagaagactgtatatacgttagcctgggggccaccagtaccccccatgtcacttggaggagaaggagacagaccttcccttgctttatacagctgtggaggagaagggattgtcttacagcataatccctggaagcttagtggagaagcctttgacatcaacaaactcatcagggacaccaattcaatcaaatacaaattgcctgtacacacagagataagttggaaagcagatggcaaaatcatggctcttggcaatgaagatggatcaatagaaatatttcagattcccaacctgaaactgatctgtactatccaacagcatcacaagcttgtgaataccattagctggcatcatgagcatggcagccagccagaattgagctatctgatggcctctggctccaacaatgcagtcatttacgtgcacaacctgaagactgtcatagagagcagccctgagtctccagtgaccattacagagccctaccggaccctctcagggcatacggccaagattaccagtgtggcgtggagcccacatcatgatggaaggctggtatctgcttcctatgatggtacagcccaggtgtgggatgctctccgggaagagcccctgtgcaatttccgaggacatcaaggtcgactgctttgtgtggcatggtctcctttggatccagactgcatctattcaggggcagatgacttttgtgtgcacaagtggctcacttccatgcaagatcattcccggcctcctcaaggcaaaaaaagtattgaattggagaaaaaacggctctctcaacctaaggcaaagcccaaaaagaagaaaaagcccaccttgagaactcctgtaaagctggaatcgattgatggaaatgaagaagaaagcatgaaggagaactcaggacctgttgagaatggtgtgtcagaccaagaaggggaggagcaagcacgggagccggaattaccctgtggccttgctccagcggtttctagagaaccagttatctgcactccagtttcctcaggctttgaaaagtcaaaagtcaccattaataacaaagtcattttactgaaaaaggagccaccaaaagagaagccagaaaccttaatcaagaagagaaaagctcgttccttgcttcccctgagtacaagcctggaccacagatccaaagaggagcttcatcaggactgtttggtactagcaactgcaaagcactccagagagctgaatgaagatgtgtctgctgatgttgaggaaagatttcatctggggcttttcacagacagggctaccctgtatagaatgattgatattgaaggaaaaggtcacttagaaaatggccaccctgagttatttcaccagcttatgctttggaaaggagatctcaaaggtgttctccagactgcagcagaaagaggggagctgacagacaaccttgtggctatggcaccagcagctggctaccatgtgtggctatgggctgtggaagcttttgccaaacagctgtgttttcaggatcagtatgtcaaggctgcttctcacctactttccatccacaaagtgtatgaagcggtggagctgctcaagtcaaaccatttttacagggaagctattgcgattgccaaggcccggctgcgcccggaggacccagtcctgaaggacttgtacctcagctggggaaccgtcctagaaagagatggccactatgctgtagctgccaaatgctatttaggggccacttgtgcttatgatgcagccaaagttttggccaaaaagggggatgcggcatcacttagaacggctgcagagttggctgccatcgtaggagaggatgagttgtctgcttccctggctctcagatgtgcccaagagctgcttctggccaacaactgggtgggagcccaggaagccctgcagctgcatgaaagtctacagggtcagagattggtgttttgccttctggagctactgtccaggcatctggaggaaaagcagctttcagagggcaaaagctcctcctcttaccacacttggaacacgggcaccgaagggcctttcgtggagagggtgactgcagtgtggaagagcatcttcagccttgacacccctgagcagtatcaggaagcctttcagaagctgcagaacatcaagtacccatctgctacaaataacacacctgccaaacagctcctgcttcacatttgccatgacttgaccctggcagtgctgagccaacagatggcctcctgggacgaggctgtgcaggcgctccttcgggcggtggtccggagctatgactcagggagcttcaccatcatgcaggaagtgtactcagcctttctccctgatggctgtgaccacctaagagacaagttgggggaccatcaatcccctgccacaccagctttcaaaagtttggaggccttttttctttatgggcgtctgtatgaattctggtggtctctctccagaccttgcccaaattccagtgtctgggtaagggctggtcacagaacactctctgttgagccaagccagcagttagacactgccagcactgaagaaacggaccctgaaacttctcagccagagccaaacaggccttcagaactagacttgagactcacagaagaaggtgagcgaatgctgagtacttttaaggagctcttttcagaaaagcatgccagtctccaaaactcacagagaactgttgctgaagtccaagagaccttggcagaaatgatccgacaacaccaaaagagtcaactctgtaaatccacagcaaatggtcctgataagaatgaaccggaagtagaagcagagcagcccctctgcagttctcagagccagtggtaagtactgaggcaagtacaagacggaatgaaaaatgaccctgctggctaggaacagtggttcatgcctataatcccagcactttgggaggctgaagcaggaggatcacttggcccaggagttcaccaccagcccgggcaaaaaagcgagaccctgtctcta

SEQ ID NO: 58302 - DNA, 909 bp, Homo sapiens
ggggtggaagacaaaacagctttttattctttgatttttttataatatttacggggaacaggtggggtgtactggggagccgtatcaggtccagggtcctgatgattctccttcaaggggacagtcctgctgcctcgtcctgcttctcatcaggtcccactttcctggctgtctggcccaggaaatgcagcagcaggcccaagagctccttcagaaatacggcaacacgaaaacttacagaagacactgccagaccttctgtatgtgaattttcacacaccttgaagaaactgccaaattgaaaatgtttgacatctttcacctctgcagttatgcctcaccagacattcactctggtccctagatgtttttgcagtaatccaaaagaatacaaacaaggattaagtttgaatcaaccctgcctacccatagacaacggtggatctgactttagactcaattgtggtctcctactggagggaagatcatgaaaagcccacagtagttattcagaactaacacctgcagagtgttggtcatctctacagccttaggcaggtttcacccaaagaggagaaacttctgtcgtcacccaaagtgttacatgcttaaaacacaagctacctttgtaaatacttcatctgatcagaagtgtgtcatgcttgtttgagatggagttgctgcattttaggactattgatacctttttttaattgtttttataatatttaatttgaaagaggagacccttctctctctactctttcatagactgaagtttgaatatgaaataggccttaaccatcatgttgactctcctgtcagaattttaggttggaaatttggttttattctttcatgtaattgcttatttgaacagatcacttactaaagctttagaagaagtga

SEQ ID NO: 58303 - DNA, 203 bp, Homo sapiens
cctggctctcagatgtgcccaagagctgcttctggccaacaactgggtgggagcccaggaagccctgcagctgcatgaaagtctacaggtcagtctgttatttcatctcctagtatacaagagggaagtgtcccaaatccttttctagtcaaatccaagttaataacccagttgcacaagctgtgccaatttggcaggcccag

SEQ ID NO: 58304 - DNA, 326 bp, Homo sapiens
gaaaatgtcttttcggccatgtgcttttgggtttaggtgtgggatgctctccgggaagagcccctgtgcaatttccgaggacatcaaggtcgactgctttgtgtggcatggtctcctttggatccagactgcatctattcaggggcagatgacttttgtgtgcacaagtggctcacttccatgcaagatcattcccggcctcctcaaggtcagtcagaacctagagcttatctaattctttttctccctttcttaataattgagttgatcaggatcgagcaaggaagacattcgtgtagggcattagtgtcagtagggcaggggtc

SEQ ID NO: 58305 - DNA, 5157 bp, Homo sapiens
ggctacgagcggtcggctgtggcagcttctcttgtctctgacggcttgtagttatggggcaggagccgcggacgctgccgccctcccccaactggtactgcgcccgctgcagcgatgccgtgcccgggggcctctttggcttcgccgcgcggacctccgtcttccttgtccgcgtgggcccgggcgcaggcgagagtccagggacacccccgtttcgagtcataggagagttggtgggacacaccgaaagggtctctggcttcacattttctcatcaccctggtcagtacaacctctgtgccaccagctccgacgatgggactgtgaaaatatgggatgtagagacaaaaacagttgtgacagaacatgcactccatcagcatacgatatcaacattacattggtctcctcgagtaaaggacttaatagtatctggggatgaaaaaggagtagttttctgttactggtttaacagaaatgacagccagcacctctttatagaacccaggacaattttctgtcttacttgttcacctcatcatgaagatttagtagccattggctacaaggatggcatagtggtgataattgacatcagtaagaaaggagaagttattcataggcttcgaggccatgatgatgaaatccactccatagcctggtgtcccctgcctggtgaagattgtttatctataaaccaagaggaaacttcagaagaagctgaaattaccaacgggaatgctgtagcacaagctccagtaacaaaaggttgctacttagccactggaagcaaagatcaaaccattcgaatctggagctgttctagaggccgaggggtgatgattttgaaattgccctttctgaagagaagaggagggggtatagacccaactgttaaagagcgcctttggttgacactccattggcccagcaatcaaccaacacagctggtatctagctgttttggaggtgaactgttgcaatgggatctcactcaatcttggagacggaaatacaccctcttcagtgcctcatcagaagggcaaaatcattcaagaattgtgtttaatttatgtcctttacaaacagaggatgacaaacagctgttactttctacatcaatggatagagatgtaaaatgttgggacatagccaccttggagtgcagctggacccttccttcccttggtgggtttgcatacagcctggctttctcttctgtggacataggctctttggccataggtgttggggatggcatgatccgtgtatggaatacactctccataaagaacaactatgatgtgaaaaatttttggcaaggcgtgaagtccaaggttacagcgctgtgctggcacccaaccaaggaaggttgcttagcttttggaactgatgatggaaaagtgggattgtatgacacctactccaacaagcctccacagatttctagcacatatcataagaagactgtatatacgttagcctgggggccaccagtaccccccatgtcacttggaggagaaggagacagaccttcccttgctttatacagctgtggaggagaagggattgtcttacagcataatccctggaagcttagtggagaagcctttgacatcaacaaactcatcagggacaccaattcaatcaaatacaaattgcctgtacacacagagataagttggaaagcagatggcaaaatcatggctcttggcaatgaagatggatcaatagaaatatttcagattcccaacctgaaactgatctgtactatccaacagcatcacaagcttgtgaataccattagctggcatcatgagcatggcagccagccagaattgagctatctgatggcctctggctccaacaatgcagtcatttacgtgcacaacctgaagactgtcatagagagcagccctgagtctccagtgaccattacagagccctaccggaccctctcagggcatacggccaagattaccagtgtggcgtggagcccacatcatgatggaaggctggtatctgcttcctatgatggtacagcccaggtgtgggatgctctccgggaagagcccctgtgcaatttccgaggacatcaaggtcgactgctttgtgtggcatggtctcctttggatccagactgcatctattcaggggcagatgacttttgtgtgcacaagtggctcacttccatgcaagatcattcccggcctcctcaaggcaaaaaaagtattgaattggagaaaaaacggctctctcaacctaaggcaaagcccaaaaagaagaaaaagcccaccttgagaactcctgtaaagctggaatcgattgatggaaatgaagaagaaagcatgaaggagaactcaggacctgttgagaatggtgtgtcagaccaagaaggggaggagcaagcacgggagccggaattaccctgtggccttgctccagcggtttctagagaaccagttatctgcactccagtttcctcaggctttgaaaagtcaaaagtcaccattaataacaaagtcattttactgaaaaaggagccaccaaaagagaagccagaaaccttaatcaagaagagaaaagctcgttccttgcttcccctgagtacaagcctggaccacagatccaaagaggagcttcatcaggactgtttggtactagcaactgcaaagcactccagagagctgaatgaagatgtgtctgctgatgttgaggaaagatttcatctggggcttttcacagacagggctaccctgtatagaatgattgatattgaaggaaaaggtcacttagaaaatggccaccctgagttatttcaccagcttatgctttggaaaggagatctcaaaggtgttctccagactgcagcagaaagaggggagctgacagacaaccttgtggctatggcaccagcagctggctaccatgtgtggctatgggctgtggaagcttttgccaaacagctgtgttttcaggatcagtatgtcaaggctgcttctcacctactttccatccacaaagtgtatgaagcggtggagctgctcaagtcaaaccatttttacagggaagctattgcgattgccaaggcccggctgcgcccggaggacccagtcctgaaggacttgtacctcagctggggaaccgtcctagaaagagatggccactatgctgtagctgccaaatgctatttaggggccacttgtgcttatgatgcagccaaagttttggccaaaaagggggatgcggcatcacttagaacggctgcagagttggctgccatcgtaggagaggatgagttgtctgcttccctggctctcagatgtgcccaagagctgcttctggccaacaactgggtgggagcccaggaagccctgcagctgcatgaaagtctacagggtcagagattggtgttttgccttctggagctactgtccaggcatctggaggaaaagcagctttcagagggcaaaagctcctcctcttaccacacttggaacacgggcaccgaagggcctttcgtggagagggtgactgcagtgtggaagagcatcttcagccttgacacccctgagcagtatcaggaagcctttcagaagctgcagaacatcaagtacccatctgctacaaataacacacctgccaaacagctcctgcttcacatttgccatgacttgaccctggcagtgctgagccaacagatggcctcctgggacgaggctgtgcaggcgctccttcgggcggtggtccggagctatgactcagggagcttcaccatcatgcaggaagtgtactcagcctttctccctgatggctgtgaccacctaagagacaagttgggggaccatcaatcccctgccacaccagctttcaaaagtttggaggccttttttctttatgggcgtctgtatgaattctggtggtctctctccagaccttgcccaaattccagtgtctgggtaagggctggtcacagaacactctctgttgagccaagccagcagttagacactgccagcactgaagaaacggaccctgaaacttctcagccagagccaaacaggccttcagaactagacttgagactcacagaagaaggtgagcgaatgctgagtacttttaaggagctcttttcagaaaagcatgccagtctccaaaactcacagagaactgttgctgaagtccaagagaccttggcagaaatgatccgacaacaccaaaagagtcaactctgtaaatccacagcaaatggtcctgataagaatgaaccggaagtagaagcagagcagcccctctgcagttctcagagccagtgtaaagaagaaaaaaatgagccactttctctgcctgagttaaccaaaaggcttaccgaggcaaatcagagaatggcaaaatttcctgagagcattaaggcctggcccttcccagatgtgctggagtgctgcctcgtcctgcttctcatcaggtcccactttcctggctgtctggcccaggaaatgcagcagcaggcccaagagctccttcagaaatacggcaacacgaaaacttacagaagacactgccagaccttctgtatgtgaattttcacacaccttgaagaaactgccaaattgaaaatgtttgacatctttcacctctgcagttatgcctcaccagacattcactctggtccctagatgtttttgcagtaatccaaaagaatacaaacaaggattaagtttgaatcaaccctgcctacccatagacaacggtggatctgactttagactcaattgtggtctcctactggagggaagatcatgaaaagcccacagtagttattcagaactaacacctgcagagtgttggtcatctctacagccttaggcaggtttcacccaaagaggagaaacttctgtcgtcacccaaagtgttacatgcttaaaacacaagctacctttgtaaatacttcatctgatcagaagtgtgtcatgcttgtttgagatggagttgctgcattttaggactattgatacctttttttaattgtttttataatatttaatttgaaagaggagacccttctctctctactctttcatagactgaagtttgaatatgaaataggccttaaccatcatgttgactctccacggccgccggggaccctctgaacgc

SEQ ID NO: 58306 - DNA, 5048 bp, Homo sapiens
ggctacgagcggtcggctgtggcagcttctcttgtctctgacggcttgtagttatggggcaggagccgcggacgctgccgccctcccccaactggtactgcgcccgctgcagcgatgccgtgcccgggggcctctttggcttcgccgcgcggacctccgtcttccttgtccgcgtgggcccgggcgcaggcgagagtccagggacacccccgtttcgagtcataggagagttggtgggacacaccgaaagggtctctggcttcacattttctcatcaccctggtcagtacaacctctgtgccaccagctccgacgatgggactgtgaaaatatgggatgtagagacaaaaacagttgtgacagaacatgcactccatcagcatacgatatcaacattacattggtctcctcgagtaaaggacttaatagtatctggggatgaaaaaggagtagttttctgttactggtttaacagaaatgacagccagcacctctttatagaacccaggacaattttctgtcttacttgttcacctcatcatgaagatttagtagccattggctacaaggatggcatagtggtgataattgacatcagtaagaaaggagaagttattcataggcttcgaggccatgatgatgaaatccactccatagcctggtgtcccctgcctggtgaagattgtttatctataaaccaagaggaaacttcagaagaagctgaaattaccaacgggaatgctgtagcacaagctccagtaacaaaaggttgctacttagccactggaagcaaagatcaaaccattcgaatctggagctgttctagaggccgaggggtgatgattttgaaattgccctttctgaagagaagaggagggggtatagacccaactgttaaagagcgcctttggttgacactccattggcccagcaatcaaccaacacagctggtatctagctgttttggaggtgaactgttgcaatgggatctcactcaatcttggagacggaaatacaccctcttcagtgcctcatcagaagggcaaaatcattcaagaattgtgtttaatttatgtcctttacaaacagaggatgacaaacagctgttactttctacatcaatggatagagatgtaaaatgttgggacatagccaccttggagtgcagctggacccttccttcccttggtgggtttgcatacagcctggctttctcttctgtggacataggctctttggccataggtgttggggatggcatgatccgtgtatggaatacactctccataaagaacaactatgatgtgaaaaatttttggcaaggcgtgaagtccaaggttacagcgctgtgctggcacccaaccaaggaaggttgcttagcttttggaactgatgatggaaaagtgggattgtatgacacctactccaacaagcctccacagatttctagcacatatcataagaagactgtatatacgttagcctgggggccaccagtaccccccatgtcacttggaggagaaggagacagaccttcccttgctttatacagctgtggaggagaagggattgtcttacagcataatccctggaagcttagtggagaagcctttgacatcaacaaactcatcagggacaccaattcaatcaaatacaaattgcctgtacacacagagataagttggaaagcagatggcaaaatcatggctcttggcaatgaagatggatcaatagaaatatttcagattcccaacctgaaactgatctgtactatccaacagcatcacaagcttgtgaataccattagctggcatcatgagcatggcagccagccagaattgagctatctgatggcctctggctccaacaatgcagtcatttacgtgcacaacctgaagactgtcatagagagcagccctgagtctccagtgaccattacagagccctaccggaccctctcagggcatacggccaagattaccagtgtggcgtggagcccacatcatgatggaaggctggtatctgcttcctatgatggtacagcccagcaaaaaaagtattgaattggagaaaaaacggctctctcaacctaaggcaaagcccaaaaagaagaaaaagcccaccttgagaactcctgtaaagctggaatcgattgatggaaatgaagaagaaagcatgaaggagaactcaggacctgttgagaatggtgtgtcagaccaagaaggggaggagcaagcacgggagccggaattaccctgtggccttgctccagcggtttctagagaaccagttatctgcactccagtttcctcaggctttgaaaagtcaaaagtcaccattaataacaaagtcattttactgaaaaaggagccaccaaaagagaagccagaaaccttaatcaagaagagaaaagctcgttccttgcttcccctgagtacaagcctggaccacagatccaaagaggagcttcatcaggactgtttggtactagcaactgcaaagcactccagagagctgaatgaagatgtgtctgctgatgttgaggaaagatttcatctggggcttttcacagacagggctaccctgtatagaatgattgatattgaaggaaaaggtcacttagaaaatggccaccctgagttatttcaccagcttatgctttggaaaggagatctcaaaggtgttctccagactgcagcagaaagaggggagctgacagacaaccttgtggctatggcaccagcagctggctaccatgtgtggctatgggctgtggaagcttttgccaaacagctgtgttttcaggatcagtatgtcaaggctgcttctcacctactttccatccacaaagtgtatgaagcggtggagctgctcaagtcaaaccatttttacagggaagctattgcgattgccaaggcccggctgcgcccggaggacccagtcctgaaggacttgtacctcagctggggaaccgtcctagaaagagatggccactatgctgtagctgccaaatgctatttaggggccacttgtgcttatgatgcagccaaagttttggccaaaaagggggatgcggcatcacttagaacggctgcagagttggctgccatcgtaggagaggatgagttgtctgcttccctggctctcagatgtgcccaagagctgcttctggccaacaactgggtgggagcccaggaagccctgcagctgcatgaaagtctacagggtcagagattggtgttttgccttctggagctactgtccaggcatctggaggaaaagcagctttcagagggcaaaagctcctcctcttaccacacttggaacacgggcaccgaagggcctttcgtggagagggtgactgcagtgtggaagagcatcttcagccttgacacccctgagcagtatcaggaagcctttcagaagctgcagaacatcaagtacccatctgctacaaataacacacctgccaaacagctcctgcttcacatttgccatgacttgaccctggcagtgctgagccaacagatggcctcctgggacgaggctgtgcaggcgctccttcgggcggtggtccggagctatgactcagggagcttcaccatcatgcaggaagtgtactcagcctttctccctgatggctgtgaccacctaagagacaagttgggggaccatcaatcccctgccacaccagctttcaaaagtttggaggccttttttctttatgggcgtctgtatgaattctggtggtctctctccagaccttgcccaaattccagtgtctgggtaagggctggtcacagaacactctctgttgagccaagccagcagttagacactgccagcactgaagaaacggaccctgaaacttctcagccagagccaaacaggccttcagaactagacttgagactcacagaagaaggtgagcgaatgctgagtacttttaaggagctcttttcagaaaagcatgccagtctccaaaactcacagagaactgttgctgaagtccaagagaccttggcagaaatgatccgacaacaccaaaagagtcaactctgtaaatccacagcaaatggtcctgataagaatgaaccggaagtagaagcagagcagcccctctgcagttctcagagccagtgtaaagaagaaaaaaatgagccactttctctgcctgagttaaccaaaaggcttaccgaggcaaatcagagaatggcaaaatttcctgagagcattaaggcctggcccttcccagatgtgctggagtgctgcctcgtcctgcttctcatcaggtcccactttcctggctgtctggcccaggaaatgcagcagcaggcccaagagctccttcagaaatacggcaacacgaaaacttacagaagacactgccagaccttctgtatgtgaattttcacacaccttgaagaaactgccaaattgaaaatgtttgacatctttcacctctgcagttatgcctcaccagacattcactctggtccctagatgtttttgcagtaatccaaaagaatacaaacaaggattaagtttgaatcaaccctgcctacccatagacaacggtggatctgactttagactcaattgtggtctcctactggagggaagatcatgaaaagcccacagtagttattcagaactaacacctgcagagtgttggtcatctctacagccttaggcaggtttcacccaaagaggagaaacttctgtcgtcacccaaagtgttacatgcttaaaacacaagctacctttgtaaatacttcatctgatcagaagtgtgtcatgcttgtttgagatggagttgctgcattttaggactattgatacctttttttaattgtttttataatatttaatttgaaagaggagacccttctctctctactctttcatagactgaagtttgaatatgaaataggccttaaccatcatgttgactctcctgtcagaattttaggttggaaatttggttttattctttcatgtaattgcttatttgaacagatcacttactaaagctttagaagaagtga

SEQ ID NO: 58307 - DNA, 885 bp, Homo sapiens
ttaagaaagttcattgccaacagttgaggataaatagctctattgatttaggcaaatgaatgagaagatttaaacatcatcaagactcccaaagttggtgtaataaaagttgagatgttttgctagatgctgagagaaaaggcataaataggccatttgtgctcctgtaaacaaatgaaattttgtaatgatcaagagacagcatgatattataaaacacactttggactcatcgagacctggctcagagttgtacctaatttgcttatcagcatttggttagaccttagacaaattttataacctctctaagcccattttctttatctgtaaataaaggaaaaagatctgtttggatttgggacaggagagttgtctgttttatagggtaatgtttatgaaaataatttatcacctaggtacttagtaaataccagtttctgtctctgtttttcttcaaagctttgttgacaatgtaggatattgccaactaatcctttgacttgagtgcttagccatgccccaatccaggcagcatgaagaatgatcaagaaggggacacctagtggcagttgacctttgaggatctatctaggatcaggttactgatttgggacctctgaatcagtacatcataacatcgagagtgatctctgccaaaattaaaattctgtcagaacagtataagcagaaggaagacattaggtctttctgaaatatggagctgataacttctatcagttctgaattctgtactgtcccacccccaaatcatctatattgttgcatgtacttagctttgtgccttgaattgctatttcctttttatcttgcactcagatggtatttttagagatgtttcttcaatcaaaacaagataaagtt

SEQ ID NO: 58308 - DNA, 1952 bp, Homo sapiens
ttaagaaagttcattgccaacagttgaggataaatagctctattgatttaggcaaatgaatgagaagatttaaacatcatcaagactcccaaagttggtgtaataaaagttgagatgttttgctagatgctgagagaaaaggcataaataggccatttgtgctcctgtaaacaaatgaaattttgtaatgatcaagagacagcatgatattataaaacacactttggactcatcgagacctggctcagagttgtacctaatttgcttatcagcatttggttagaccttagacaaattttataacctctctaagcccattttctttatctgtaaataaaggaaaaagatctgtttggatttgggacaggagagttgtctgttttatagggtaatgtttatgaaaataatttatcacctaggtacttagtaaataccagtttctgtctctgtttttcttcaaagctttgttgacaatgtaggatattgccaactaatcctttgacttgagtgcttagccatgccccaatccaggcagcatgaagaatgatcaagaaggggacacctagtggcagttgacctttgaggatctatctaggatcaggttactgatttgggacctctgaatcagtacatcataacatcgagagtgatctctgccaaaattaaaattctgtcagaacagtataagcagaaggaagacattaggtctttctgaaatatggagctgataacttctatcagttctgaattctgtactgtcccacccccaaatcatctatattgttgcatgtacttagctttgtgccttgaattgctatttcctttttatcttgcactcagatggtatttttagagatgtttcttcaatcaaaacaagataaagttaaaaaaaaaaaaaaaacagtgacccttttgcataagccagaagagcagtgccttgcttcctgtgaaaaatgcttggcagttagcctgtgtaattatttagcaatcatgttaatagatgtttaagaataatggaactggagctgtactgagccaaggatggaaatgaagacatgtgagactattttttcttcatccaccgatactcttcagttacaaggatttaatttaaaagggttttaattaaatggaatccagaagctttggacgctccagtttttcttcttagagacaaaccctagctcagtttcctggagcttgactcagaatgcagcatggtactccggactgacagtgtgccagctttattcacttatctctctaccttttggcttgcgtttatttcagggctgcctgacattttgaccttatgtacaaagatggccgatacgattatttttcatcatatattacagaaaatactactcttgaaaaatactctgagaaatatgttctatggtcagataagtttgggaaacagtgaattattgttcctcctttgcagaatcacaatgcactgttagctaattaaagactctcagatgtcccactggaaagaatcatgtttagctttgtttaacctagcatttcccaaacttattagagcataaaactttgtttttgtttttttttaataagataggtagctatttccttagaacacagtttgggaaactttttgttcatttgttttaataagataccttaggtagctatttccttagaacacgagccgggtgcatgtgtcacgcctgtaatcccagcactttgggaggcccaggcgggcggatcacctgaggtcaggagatcgagatcatccggcccaacatggtgaaaccccgtctctactaaaaagacaaaaattagccagccatggtggcaggcacctgtagtcctagctactgtggaggctgaggcaggagaatcacttgaacccgggatggggaggttgcagtgagctgagatggcgccactgtactccagcctgggcgacgagcaaaaactccttc

SEQ ID NO: 58309 - DNA, 905 bp, Homo sapiens
cactctagagccacatgtatacagtgtagttttggcaaatttcattcatacctctacctcctttgctgttttccttgaaatagtaaaaattcacatgaatttgcagaaattaagttcttaggagttcttcaacagtattaaagacaggttctgttcccttttggtttcctgcctaactacaggtacagttaaacatggaattaaaagacagcctttattgtaaaattgtcatgtaacagatcctagttgatctctggtttcctggagatttatttagcatttgggagaggatcaacaaaggggcacagcaagcagatactgtagttagtattatttttcccttttttgcttactgtctatcgattagtctttaaattactagtacattttatgataaatttctttgatttattttacctccttttagaatggaagctcctcgaagggcagggaaatctgagtaggcaggcatttaaaaatatttaaaatgttcagttgggtggaagtttagttttatttgccaaattaggcttgtgacatgagaatttgacaaaggggatcaaatatttcgaaccatttaatttatggcatggaaagcttttaaaaatgatcacaaagtgctaatgatttaagtaaattaagatgaagatccacatttaaattatcaacgtgacactttaaaaaattataaaattgtcttaagttgagggaacagttggcctagtgacttacagatttttttatatgttaaaataaccctatgtgtaagtgactgttttccttatttgaaattaagaggaaaagggtgctcataagtcatctttagcagtgaacttaacagaatccagtggatcagttttcctttatgctgatgtgtagtttaatttgtgctgctgaacaagaca

SEQ ID NO: 58310 - DNA, 408 bp, Homo sapiens
aatgcgggtacaaataactgtctcttagggctgttataaagattcctccattgattcagcaattactgagttgccactgtgtgccaagcactgctctaggtgttggagatacagttgtgaacaagacagacaaaaatccctgtctccttagagcttacactacttgcatgtagtgggtgtcggatgacgaataaatgagacatagagatgtcatgtgccagatgctgacatatgctatggaggaaaataaagcaggttagggggaattgggagtgggcatgggtccatgtcaaagagggtgggcagggacagcctagttaagaaggtaatctttgaggagaggtaaggtgtttccagcagagaagctgcaggtgcaaaggccctgaggcaggaagtgtgcctagctct

SEQ ID NO: 58311 - DNA, 216 bp, Homo sapiens
aaaaaagagcccaagcagagtcagcgtgtggcccagaattggcttccaggtcatatattccttgtagcttacccagagcaatgacaggagaaaggcttgggggacaggtgggacctgggcacatcttgcatgccagcctgagagtgggcagtgggtggagagtcccaccagtgtcctgagcagggagaggatggggttccgcatccccagactgga

SEQ ID NO: 58312 - DNA, 110 bp, Homo sapiens
gaggagtctatgatgttggtcagtataaaaggagaaaaagatcctaaaaacattcctaaatattgtttgatttaaaaatatatgttggaaggcaagagagtttgataaaa

SEQ ID NO: 58313 - DNA, 325 bp, Homo sapiens
ttgccgccgcacaccccagcgccttcctaaaaagaaagaagggaggaaaaaaatgccgacgattggtagaatcatagagaagaacaccagccccagggcaggggcttcagcgaaaaatggcagcaactcgtgcgggtcctctggggcggggtttcttggaggcacctagctgccccacggggtacctcgcgccccacgcgagtcagaacctaaagtgctctctgggcaacctgagtgggtagagtgattccgtctttctctggccctgctaggcccaaaggagaggtgtgactatcgtgaggactccacctagggtggagttcct

SEQ ID NO: 58314 - DNA, 1248 bp, Homo sapiens
  misc_feature (153)..(153): n is a, c, g, or t
  misc_feature (166)..(166): n is a, c, g, or t
  misc_feature (233)..(233): n is a, c, g, or t
  misc_feature (321)..(321): n is a, c, g, or t
  misc_feature (324)..(324): n is a, c, g, or t
  misc_feature (327)..(327): n is a, c, g, or t
  misc_feature (792)..(792): n is a, c, g, or t
  misc_feature (1248)..(1248): n is a, c, g, or t
gctgggccccatcagcagagccaccaagagtccacacgtggccggtcagcaggaaggtctggacgttcagggtctttcctctaccaggtgagcactcatgaacagtctgagtccgcccatggacggaccgggaccagcactggaggaagacanggatcccaccacnagcaggcacgagacagctccaggcactcaacgtcccaagagggtcaggacaccattcatggacaccnggggtcaagcagtggaggaaggcagggatcccactacgagcaattggtagatagatctggacactcagggtctcatcacagccacacnacntcncagggaaggtctgatgcctcccatgggcactcaggatccagaagtgcaagcagacaaactcgtaacgatgaacaatcaggagacggctccaggcactcagggtcgcgtcaccatgaagcttcctctcgggccgacagctctggacactcgcaggtgggccagggacaatcagaggggcccaggacaagcaggaactggggatccagttttagccaggacagtgacagtcagggacactcagaagactctgagaggtggtctgggtctgcttccagaaaccatcatggatctgctcaggagcagctaagagatggctccagacaccccaggtcccatcaagaagacagagctggtcatgggcactctgcagacagctccagacaatcaggcactcgtcacacacagacttcctctggtggacaggctgcatcatcccatgaacaggcaagatcaagtgcaggaganagacatggatcccaccaccagcagtcagcagacagctccagacactcaggcattgggcacggacaagcttcatctgcagtcagagacagtggacaccgagggtacagtggtagtcaggccagtgacaatgagggacattcagaagactcagacacacagtcagtgtcagcccacggacaggctgggtcccatcagcagagccaccaagagtccgcacgtggccggtcaggggaaacgtctggacattcaggatctttcctctaccaggtgagcactcatgaacagtctgagtcctcccatggatggacggggcccagcactagaggaagacaaggatcccgccatgagcaggcacaagacagctccaggcactcagcatcccaagacggtcaggacaccattcgtggacacccggggtcaagcagaggaggaaggcaggggtaccaccacgagcan

SEQ ID NO: 58315 - DNA, 575 bp, Homo sapiens
aagacacaggctggacaaaggaaggtggacgggacagccagccgtgcagcagcctcacaggacacagctaccagacagagagcaccagctgacactcattcctccagcaccaggaaatgccacagcagaagagagtcttcaagatgggccagacccacttctgcagcatggttgctgggagcctgcacaggccaggcatttctctacaggtgcaattgagaactcactgaggcaaaagggcctttgtcaacccacagaagtgacaagtccaagtgcagaccaggcttcaggtccagttgctcttcaaactcaaaatcccatctctgcaggtctcagccaatcctgctcccgcctgtttttatttcctgcccagagcaagtacagaaccgagggccatcgatgggcgagaaatcactgtgcctccaagctgtatttttcaccgtaacaagtcattacttctgtgcccggagtcatttctcaggatcttaatgcattcgtttatcaatcaatacttaactgatgtctataaagcatgttcaaaatcagaggtgagagcagctcaccaggtaccgact

SEQ ID NO: 58316 - DNA, 386 bp, Homo sapiens
  misc_feature (29)..(29): n is a, c, g, or t
ggaagacgaaggaggagtaaaggcatgtntcacatggcagcaggcaagagagcgtgtgcaggggaactgccccttatgaaaccctcagatctcgtgagacttattcactaccatgaaaacggcacagggaaaacctgcccctaagcttcagttacccccgacaggtccctcacatgacacatggggactatgggagctataattcaagatgagatttgggcagggacacagccaaaccatatcagatacttaccacattagacactgacagacagctcaccacagattctgggctctattcaaggtgttgactttgatctttttccagttgtaaatgtttcatccaaaaaaactgtgattttggcataacttttttcaagagttgc

SEQ ID NO: 58317 - DNA, 458 bp, Homo sapiens
tggcttttttcaatattgtattagtttgcagatacctattactatctggggacccattaatttttttccacaaatatttatcaggctcttacagtgtacaagatgctctagtagtagagtgaacaagagaagcatggattctgtcctttgagtgcttgcctcctggaggacgagaggacaaggaaaccagcagttgcactgctgtgctagaagcacagggtgcggtagaaaatgaggggaaggacatccttgtggacaactacagtggcatctggcactacgcaagtccagacacacaggagacccaaccgctattgtcaaacagtttgccttcgcattatgggcatggaaaacagaacaacagcaaataaatcatgctcttagataactaagtaccaaagaattcagacatacgaaatgcaaacatgaggttaaacccccacctctttatgagtcaa

SEQ ID NO: 58318 - DNA, 367 bp, Homo sapiens
ataagcatatgaatttatctataggccaagttaatgacataactacaaagaaatgacttgtttcaaatgttttaaaccagtgttttggctatactaacttagtgagacatattctaaagaaaaatagagacgcaaagaagatcttacactttaatagtcaattttgtagttgtaatattactatcgatcattttgtaactctcctatatagggtgtaggatggtggaaataagtaattttgttaatgttgttaggaaccaaggctatcagtgtaaaatgaaggagttacaagcataagatgaaagaaggtaagtaaaaagctcattagtatagttcaagtttaacttgtcaggatgagctcatgatt

SEQ ID NO: 58319 - DNA, 230 bp, Homo sapiens
cgcatctcaggccacaggtccccataaaataaagtaccagcccctgcactggctcccgaagacacccaggttccctctcaggctccagacactccccacccacactgggagtttattcccaaattgaaaaaacaaaaacacgtaaatgatgattctctcccagctttctttgaaatcactatttttacatccttgactgctcttcttaaaagcaagtctgtcatttaacc

SEQ ID NO: 58320 - DNA, 318 bp, Homo sapiens
gctgctgggctggggaaaagacaactcgtctcgtccccttgtttatcacatcaaagaagggaaaaagcaagagatggcaagggacaatcaagcctcaatgattatatttatagagcagctaagggtttgcagcctcctctccatcttctggctctaggacacagctgtgttctggggctgagaagtctcagcacaggctcctcctcacagttctagctacaaatgaactgccggatgaactgttctagtttttcctgattgtccaggctggcaaaagtaggggaccaggtggagcctggggcctgcagggctcggcgt

SEQ ID NO: 58321 - DNA, 104 bp, Homo sapiens
cccaaatgtaaaaccatccttagctcacaagccacccaaaaccaggcgacaggcagatcagggtgtgagaccttggagctagagcaggaggcaggaggcgtggg

SEQ ID NO: 58322 - DNA, 715 bp, Homo sapiens
aggcctgggtctgagcccaggagatgtgagtgacttcccgcccttcaccctttgtgtgtgtggcttggactagctccctgttttcaaaggtcctgatgactccagcaggttttccacccagcagtaggcagattgctttttttgagatggagtctcgctctggcgcccaggttggggtgcagtggcgcgatcttggctcactgcagctttcctctcccaggttcaagcgattgtcctgcctcagcctcctgagtagctggtattacaggtgcccaccaccacagccggctaatttttgtgtttttactagagacagggtttcactatattggccaggtcggtctcgaactcctgacctcaggcactctgcccgtcttggcctcccaaagtgccgggattacagatgtgagccaccatgcccggccatcagattgcttttcatgtttgctgctccatggggcaatgccatggccacagccttagcgatacagggcagcagagcatgtgggctgtgtgtgtctgtgtgtgtctacacatattcttgcccacctgcagcatttcaggttaccttgtcccatcccaagccatgctgacctcgaaatgaaaacgaggccaagggagaaattaagaacacaataaaaaaggggaaggctgggcacagtggctcatgcctgtaatctcagcactttgggaggccgaggcgggcggatcacgt

SEQ ID NO: 58323 - DNA, 1228 bp, Homo sapiens
agggccgcaatcagagaacaccgccaggacttccaggacttggtctccaggactgaggtcaactgacgtgggcgtggtctgactgtgtgggcgtggccagggaatgaactcacggctctggcttaaggggtgtggtgaacgaaggatggggcgtggctgtgtcaccaagggcgtggtcatggagtagaggcccgggctcctgggtgaggccggcaagtttggagcgtggtcagacaataggggcgtggctacggctcgcggagcgcaaccaacgctctagaccagacctgggctcgagaccataactgtttggctttaacagtacgtgggcggccggaatccgggagtccggtgacccgggctgtggtctagcataaaggcggagcccagaagaaggggcggggtatgggagaagcctccccacctgcccccgcaaggcggcatctgctggtcctgctgctgctcctctctaccctggtgatcccctccgctgcagctcctatccatgatgctgacgcccaagagagctccttgggtctcacaggcctccagagcctactccaaggcttcagccgacttttcctgaaaggtaacctgcttcggggcatagacagcttattctctgcccccatggacttccggggcctccctgggaactaccacaaagaggagaaccaggagcaccagctggggaacaacaccctctccagccacctccagatcgacaagatgaccgacaacaagacaggagaggtgctgatctccgagaatgtggtggcatccattcaaccagcggaggggagcttcgagggtgatttgaaggtacccaggatggaggagaaggaggccctggtacccatccagaaggccacggacagcttccacacagaactccatccccgggtggccttctggatcattaagctgccacggcggaggtcccaccaggatgccctggagggcggccactggctcagcgagaagcgacaccgcctgcaggccatccgggatggactccgcaaggggacccacaaggacgtcctagaagaggggaccgagagctcctcccactccaggctgtccccccgaaagacccacttactgtacatcctcaggccctctcggcagctgtaggggtggggaccggggagcacctgcctgtagcccccatcagaccctgccccaagcaccatatggaaataaagttctttcttacatctaaaaaaaa

SEQ ID NO: 58324 - DNA, 1134 bp, Homo sapiens
agggccgcaatcagagaacaccgccaggacttccaggacttggtctccaggactgaggtcaactgacgtgggcgtggtctgactgtgtgggcgtggccagggaatgaactcacggctctggcttaaggggtgtggtgaacgaaggatggggcgtggctgtgtcaccaagggcgtggtcatggagtagaggcccgggctcctgggtgaggccggcaagtttggagcgtggtcagacaataggggcgtggctacggctcgcggagcgcaaccaacgctctagaccagacctgggctcgagaccataactgtttggctttaacacctccccacctgcccccgcaaggcggcatctgctggtcctgctgctgctcctctctaccctggtgatcccctccgctgcagctcctatccatgatgctgacgcccaagagagctccttgggtctcacaggcctccagagcctactccaaggcttcagccgacttttcctgaaaggtaacctgcttcggggcatagacagcttattctctgcccccatggacttccggggcctccctgggaactaccacaaagaggagaaccaggagcaccagctggggaacaacaccctctccagccacctccagatcgacaagatgaccgacaacaagacaggagaggtgctgatctccgagaatgtggtggcatccattcaaccagcggaggggagcttcgagggtgatttgaaggtacccaggatggaggagaaggaggccctggtacccatccagaaggccacggacagcttccacacagaactccatccccgggtggccttctggatcattaagctgccacggcggaggtcccaccaggatgccctggagggcggccactggctcagcgagaagcgacaccgcctgcaggccatccgggatggactccgcaaggggacccacaaggacgtcctagaagaggggaccgagagctcctcccactccaggctgtccccccgaaagacccacttactgtacatcctcaggccctctcggcagctgtaggggtggggaccggggagcacctgcctgtagcccccatcagaccctgccccaagcaccatatggaaataaagttctttcttacatctaaaaaaaa

SEQ ID NO: 58325 - DNA, 929 bp, Homo sapiens
tgcagattcctcatctacaggcgctagtggactggagacggctggcggctgtcccgggacggggaagagagctttggtgcctgagggaagatggcttagggcccggtcccttaaggcctccccacctgcccccgcaaggcggcatctgctggtcctgctgctgctcctctctaccctggtgatcccctccgctgcagctcctatccatgatgctgacgcccaagagagctccttgggtctcacaggcctccagagcctactccaaggcttcagccgacttttcctgaaaggtaacctgcttcggggcatagacagcttattctctgcccccatggacttccggggcctccctgggaactaccacaaagaggagaaccaggagcaccagctggggaacaacaccctctccagccacctccagatcgacaagatgaccgacaacaagacaggagaggtgctgatctccgagaatgtggtggcatccattcaaccagcggaggggagcttcgagggtgatttgaaggtacccaggatggaggagaaggaggccctggtacccatccagaaggccacggacagcttccacacagaactccatccccgggtggccttctggatcattaagctgccacggcggaggtcccaccaggatgccctggagggcggccactggctcagcgagaagcgacaccgcctgcaggccatccgggatggactccgcaaggggacccacaaggacgtcctagaagaggggaccgagagctcctcccactccaggctgtccccccgaaagacccacttactgtacatcctcaggccctctcggcagctgtaggggtggggaccggggagcacctgcctgtagcccccatcagaccctgccccaagcaccatatggaaataaagttctttcttacatctaaaaaaaa

SEQ ID NO: 58326 - DNA, 1247 bp, Homo sapiens
agggccgcaatcagagaacaccgccaggacttccaggacttggtctccaggactgaggtcaactgacgtgggcgtggtctgactgtgtgggcgtggccagggaatgaactcacggctctggcttaaggggtgtggtgaacgaaggatggggcgtggctgtgtcaccaagggcgtggtcatggagtagaggcccgggctcctgggtgaggccggcaagtttggagcgtggtcagacaataggggcgtggctacggctcgcggagcgcaaccaacgctctagaccagacctgggctcgagaccataactgtttggctttaacagtacgtgggcggccggaatccgggagtccggtgacccgggctgtggtctagcataaaggcggagcccagaagaaggggcggggtatgggagaagcctccccacctgcccccgcaaggcggcatctgctggtcctgctgctgctcctctctaccctggtgatcccctccgctgcagctcctatccatgatgctgacgcccaagagagctccttgggtctcacaggcctccagagcctactccaaggcttcagccgacttttcctgaaaggtaacctgcttcggggcatagacagcttattctctgcccccatggacttccggggcctccctgggaactaccacaaagaggagaaccaggagcaccagctggggaacaacaccctctccagccacctccagatcgacaagatgaccgacaacaagacaggagaggtgctgatctccgagaatgtggtggcatccattcaaccagcggaggggagcttcgagggtgatttgaaggtacccaggatggaggagaaggaggccctggtacccatccagaaggccacggacagcttccacacagaactccatccccgggtggccttctggatcattaagctgccacggcggaggtcccaccaggatgccctggagggcggccactggctcagcgagaagcgacaccgcctgcaggccatccgggatggactccgcaaggggacccacaaggacgtcctagaagaggggaccgagagctcctcccactccaggctgtccccccgaaagacccacttactgtacatcctcaggccctctcggcagctgtaggggtggggaccggggagcacctgcctgtagcccccatcagaccctgccccaagcaccatatggaaataaagttttggcctcgttggcatcagcggtggagctgctgcggccag

SEQ ID NO: 58327 - DNA, 994 bp, Homo sapiens
agggccgcaatcagagaacaccgccaggacttccaggacttggtctccaggactgaggtcaactgacgtgggcgtggtctgactgtgtgggcgtggccagggaatgaactcacggctctggcttaaggggtgtggtgaacgaaggatggggcgtggctgtgtcaccaagggcgtggtcatggagtagaggcccgggctcctgggtgaggccggcaagtttggagcgtggtcagacaataggggcgtggctacggctcgcggagcgcaaccaacgctctagaccagacctgggctcgagaccataactgtttggctttaacagtacgtgggcggccggaatccgggagtccggtgacccgggctgtggtctagcataaaggcggagcccagaagaaggggcggggtatgggagaagcctccccacctgcccccgcaaggcggcatctgctggtcctgctgctgctcctctctaccctggtgatcccctccgctgcagctcctatccatgatgctgacgcccaagagagctccttgggtctcacaggcctccagagcctactccaaggcttcagccgacttttcctgaaagtacccaggatggaggagaaggaggccctggtacccatccagaaggccacggacagcttccacacagaactccatccccgggtggccttctggatcattaagctgccacggcggaggtcccaccaggatgccctggagggcggccactggctcagcgagaagcgacaccgcctgcaggccatccgggatggactccgcaaggggacccacaaggacgtcctagaagaggggaccgagagctcctcccactccaggctgtccccccgaaagacccacttactgtacatcctcaggccctctcggcagctgtaggggtggggaccggggagcacctgcctgtagcccccatcagaccctgccccaagcaccatatggaaataaagttctttcttacatctaaaaaaaa

SEQ ID NO: 58328 - DNA, 1135 bp, Homo sapiens
agggccgcaatcagagaacaccgccaggacttccaggacttggtctccaggactgaggtcaactgacgtgggcgtggtctgactgtgtgggcgtggccagggaatgaactcacggctctggcttaaggggtgtggtgaacgaaggatggggcgtggctgtgtcaccaagggcgtggtcatggagtagaggcccgggctcctgggtgaggccggcaagtttggagcgtggtcagacaataggggcgtggctacggctcgcggagcgcaaccaacgctctagaccagacctgggctcgagaccataactgtttggctttaacagtacgtgggcggccggaatccgggagtccggtgacccgggctgtggtctagcataaaggcggagcccagaagaaggggcggggtatgggagaagcctccccacctgcccccgcaaggcggcatctgctggtcctgctgctgctcctctctaccctggtgatcccctccgctgcagctcctatccatgatgctgacgcccaagagagctccttgggtctcacaggcctccagagcctactccaaggcttcagccgacttttcctgaaaggtaacctgcttcggggcatagacagcttattctctgcccccatggacttccggggcctccctgggaactaccacaaagaggagaaccaggagcaccagctggggaacaacaccctctccagccacctccagatcgacaaggtacccaggatggaggagaaggaggccctggtacccatccagaaggccacggacagcttccacacagaactccatccccgggtggccttctggatcattaagctgccacggcggaggtcccaccaggatgccctggagggcggccactggctcagcgagaagcgacaccgcctgcaggccatccgggatggactccgcaaggggacccacaaggacgtcctagaagaggggaccgagagctcctcccactccaggctgtccccccgaaagacccacttactgtacatcctcaggccctctcggcagctgtaggggtggggaccggggagcacctgcctgtagcccccatcagaccctgccccaagcaccatatggaaataaagttctttcttacatctaaaaaaaa

SEQ ID NO: 58329 - DNA, 472 bp, Homo sapiens
  misc_feature (43)..(43): n is a, c, g, or t
caagccgggaagggggaagtctttcgcagggctgcatttgaanaggataccccagcgtatggatgggagtaaggagggccccctggtaaccctatcccagtaaggtccccaacgagcactagcttccacacagaactccatccccgggtggccttctggatcattaagctgccacggcggaggtcccaccaggatgccctggagggcggccactggctcagcgagaagcgacaccgcctgcaggccatccgggatggactccgcaaggggacccacaaggacgtcctagaagaggggaccgagagctcctcccactccaggctgtccccccgaaagacccacttactgtacatcctcaggccctctcggcagctgtaggggtggggaccggggagcacctgcctgtagcccccatcagaccctgccccaagcaccatatggaaataaagttctttcttacatctaaaaaaaa

SEQ ID NO: 58330 - DNA, 612 bp, Homo sapiens
agcaagaccctgtctcagaaaaaacaaaaacaaaacactgtaaatgtatcatgtttctcactgctttctatgttaatgctgtgtaaatacttaaaatggaatactgtataaatattatttatattttctcagatgaaaatatatactaaaacatttggtatttctgttttctgtttcattaatgtatatctgatggagtaccatttaggaatataacattattggggcagaggtcccagccattgccaaagttgaatcttttacatttccctgaatcttgaggatgactgaaaaggaagtctttgaaactgcagtttctgaaggatcacagtacaggaatgcctttataaaagctgcagagataaatacatgtacttatatggcatggatatttaaaaccactcactcagaagcatatgaaagaaattcaaccatcattcaacatagaagaagttaattttagtgcaaaagtttttaagtattaaatttcacaataaaggatcaattggcttacttgctgataaattaaaacagaaaacatttaaaatcattctaaattttgtatgatatttttattttggctaggtgcataaaaatgtgttcagattttca

SEQ ID NO: 58331 - DNA, 729 bp, Homo sapiens
ggctggaggctgtgaggcttccagcgggtcggtaccatggcgacgcgcggtggggctggggtggcaatggcggtttggtccctcttatccgcccgggccgtgaccgcgttccttctgttgttcctccctcgcttcttacaggcccagaccttctctttccctttccagcagccggagaagtgcgacaacaaccagtactttgatatctccgccctctcgtgtgttccttgtggagctaaccagaggcaagatgcccgaggaacttcatgtgtatgtctaccaggatttcagatgatctctaataatggaggacctgctattatttgtaaaaagtgcccagaaaacatggtgcgcataatttattttaaaataacttacctgtaaaaagtagtaagttaaatatctttatttttcaaaatataatttaatgtttaatgtttccccacagactttaaaattactatgctaattttatttttactagagtaagttttgggagatcagcgaaatttcatgcaaacttggagaaaacagaaatgtatttcttttaaaatctgaaatccaaaaaccacaaagctgtaaaaatttaagtttttgtttttactcgtagaataactcggttatgaagaaaattagatgaataaggcatatatagagcagtctgggatgtgtgcaatttgggatgtgtatattcttttgactgatgcaagtggagttgtcttagaccta

SEQ ID NO: 58332 - DNA, 961 bp, Homo sapiens
  misc_feature (6)..(6): n is a, c, g, or t
gccggnacccaacatcatacttccattcagggacttgatacaaaaattttagtttgaactgctattagcaggtggcaggagcgcaccttcaaatgaatcttcaaattggaaaatactgcttcaccacctggagacaaagaagaaaaaagtagaagtcactctgggcaggctacaacacttaacaaaaatttacataaaactgagttatccctatgttccactatatgtaaatactgtataacattaaatgtgtgatatgttttataaattaatactgacagtgaggccaaaaaaaatctaaatgttgctttcagcataatactttttaatgctaattaaaacagtccccatcatttgtctctgtagattattttataaactgagagctgcctgaatcttctcacattgacaaagtaatttgattccaagtttaagactagttttcagtttgatattttcatgttttgtgtgcttatggttaaataaatgttgaaagatattttcaagtttacttagaaattttaaattgtattattgctgattcaatttgcatcattctaattgctcatcctctttggcagtggattaattcactgttgggttaatatgcatctcatgaaatgatatcttttcattcctttgtatacctgtattaggtcagtatacgctttccatgaaatatatttgcatttctaatatagtttacatttattaagttataacgtatgacatttttcccaatatcattttttatacattttaattacttaatgttttaagagttctcttccagagttttgcttttcaattacgtttaaagactgtaaataacaaacagtaaggctgggcgctgtggcttacgcctgtaatcccagcactttggaaggccaaggcacgtggatcactttaggtcaggagttcaagaacagcctggccaacatggaaaaccccatctctacaa

SEQ ID NO: 58333 - DNA, 3492 bp, Homo sapiens
  misc_feature (1453)..(1453): n is a, c, g, or t
  misc_feature (1846)..(1846): n is a, c, g, or t
  misc_feature (2123)..(2123): n is a, c, g, or t
ggctggaggctgtgaggcttccagcgggtcggtaccatggcgacgcgcggtggggctggggtggcaatggcggtttggtccctcttatccgcccgggccgtgaccgcgttccttctgttgttcctccctcgcttcttacaggcccagaccttctctttccctttccagcagccggagaagtgcgacaacaaccagtactttgatatctccgccctctcgtgtgttccttgtggagctaaccagaggcaagatgcccgaggaacttcatgtgtatgtctaccaggatttcagatgatctctaataatggaggacctgctattatttgtaaaaagtgcccagaaaacatgaaaggtgttacagaagatggctggaactgcatttcttgccctagtgacttaactgccgaaggaaaatgtcactgtcccattggccatattttagtggaaagagacattaatggaacattgttgtctcaagcaacttgtgagctctgtgatggaaatgaaaactcttttatggtagtaaatgctttaggagacaggtgcgtccgatgtgagccaacatttgttaataccagcaggtcctgtgcatgttcagaacctaacattttaacagggggattatgtttcagcagcacagggaattttcctctacgtagaatttcagctgcacgttatggagaagttggcatgtctttaacttcagaatggtttgcaaagtatttgcaatcatcagcagctgcatgttgggtatatgccaatctaacatcttgtcaagctcttggaaatatgtgtgtgatgaacatgaattcttacgactttgccacatttgatgcatgtggactatttcagtttatctttgaaaatactgctggactgagcactgttcattctatttcattttggagacagaatcttccttggctgttttatggagaccagttaggattagcacctcaagtgctcagttctacctctcttcctacaaatttcagttttaaaggagaaaaccagaatacaaaactgaagtttgttgctgcttcctatgatataagaggaaattttctcaagtggcaaactttagaaggaggtgttttacagctttgtccagacacagagacaaggctaaatgctgcttattcatttggaacaacctaccaacaaaattgtgagattcctatctctaagatcttaattgactttcccactcctatattttatgatgtgtaccttgaatatactgatgaaaatcaacatcaatatattttggctgtgcctgtgttaaacctaaatcttcaacataataagatatttgtgaaccaagacagcaactctggaaagtggcttctaactcggcgcattttcttagtggatgcagtaagtggacgagaaaatgacttaggaactcagccaagagtaattcgagttgctactcaaatatcactgagtgtcnaccttgtacccaacacaataaatggaaacatctaccctcccttaatcaccattgcctacagtgacattgatatcaaagatgccaacagccagtctgtgaaggtttctttctcagtcacatatgaaatggatcatggagaagcacatgtccagacagatattgctttgggtgtattgggtgggctagctgttttagcatctcttttgaagacagcaggatggaagaggcgcattgggagtcccatgattgatttacagacagttgtgaaattcttggtgtactatgctggtgatctggccaatgttttctttatcatcacagtgggaacaggtctttactggcttattttcttcaaagcacagaagtctgtgtctgttttgctgccaatgccanttcaggaagaacgttttgtcacttatgttggatgtgcctttgctctgaaggcactacaatttttgcataagctcatatcccagattacaatagatgtattctttattgattgggagcgacctaaaggaaaggttcttaaagctgttgaaggtgagggtggtgtacgaagtgccactgttcctgtaagcatatggagaacatattttgtagcaaatgaatggaatgaaattcagactgtgagaaaaattaattcactctttcaagtacttactgtccncttctttttggaggttgtgggattcaagaacttagcattaatggactcatcttctagtctttctagaaacccacctagctacatagctccttatagctgcattttgagatatgcagtgtctgctgctctttggctagccattggaattatacaggtcgtgttctttgctgtcttttatgagagatttatagaagataaaattcgacagttcgttgatttatgctctatgagtaatatatcagtgtttctgttatcccacaaatgttttggatattacattcatggtagatcagtacatgggcatgcagatactaatatggaagaaatgaatatgaaccttaaaagagaagcggaaaatttgtgtagccagagaggtttggtacccaacacagatggtcagacttttgagattgcaatttctaaccagatgagacaacattatgacagaattcatgagacactaataaggaaaaatggtcctgctagactactgagttcatcagcaagtacttttgagcagagtataaaagcatatcatatgatgaataaatttcttggctccttcattgaccatgttcataaggaaatggattactttataaaagataagttgcttcttgaaagaattcttggaatggaattcatggaaccaatggaaaaaagcatcttttacaatgatgaaggttattctttcagcagtgtcctgtattatggaaatgaaggctactcttcttatttttgatctgctgttcttctgtgttgtggatttggcttgccaaaattttattttagcatccttccttacatatctacaacaagagatttttagatatatccgtaatacagtaggacaaaagaatttggcatccaaaacattggtggatcaaagatttttgatttaacttcctgaataaataacttaaagactcagtataatcatggccaaaaaaaagtcatgatatcaggaatataacattattggggcagaggtcccagccattgccaaagttgaatcttttacatttccctgaatcttgaggatgactgaaaaggaagtctttgaaactgcagtttctgaaggatcacagtacaggaatgcctttataaaagctgcagagataaatacatgtacttatatggcatggatatttaaaaccactcactcagaagcatatgaaagaaattcaaccatcattcaacatagaagaagttaattttagtgcaaaagtttttaagtattaaatttcacaataaaggatcaattggcttacttgctgataaattaaaacagaaaacatttaaaatcattctaaattttgtatgatatttttattttggctaggtgcataaaaatgtgttcagattttca

SEQ ID NO: 58334 - DNA, 1405 bp, Homo sapiens
ggctggaggctgtgaggcttccagcgggtcggtaccatggcgacgcgcggtggggctggggtggcaatggcggtttggtccctcttatccgcccgggccgtgaccgcgttccttctgttgttcctccctcgcttcttacaggcccagaccttctctttccctttccagcagccggagaagtgcgacaacaaccagtactttgatatctccgccctctcgtgtgttccttgtggagctaaccagaggcaagatgcccgaggaacttcatgtgtatgtctaccaggatttcagatgatctctaataatggaggacctgctattatttgtaaaaagtgcccagaaaacatgaaaggtgttacagaagatggctggaactgcatttcttgccctagtgacttaactgccgaaggaaaatgtcactgtcccattggccatattttagtggaaagagacattaatggaacattgttgtctcaagcaacttgtgagctctgtgatggaaatgaaaactcttttatggtagtaaatgctttaggagacaggtgcgtccgatgtgagccaacatttgttaataccagcaggtcctgtgcatgttcagaacctaacattttaacagggggattatgtttcagcagcacagggaattttcctctacgtagaatttcagctgcacgttatggagaagttggcatgtctttaacttcagaatggtttgcaaagtatttgcaatcatcagcagctgcatgttgggtatatgccaatctaacatcttgtcaagctcttggaaatatgtgtgtgatgaacatgaattcttacgactttgccacatttgatgcatgtggactatttcagtttatctttgaaaatactgctggactgagcactgttcattctatttcattttggagacagaatcttccttggctgttttatggagaccagttaggattagcacctcaagtgctcagttctacctctcttcctacaaatttcagttttaaaggagaaaaccagaatacaaaactgaagtttgttgctgcttcctatgatataagaggaaattttctcaagtggcaaactttagaaggaggtgttttacagctttgtccagacacagagacaaggctaaatgctgcttattcatttggaacaacctaccaacaaaattgtgagattcctatctctaagatcttaattgactttcccactcctatattttatgatgtgtaccttgaatatactgatgaaaatcaacatcaatatattttggctgtgcctgtgttaaacctaaatcttcaacataataagatatttgtgaaccaaggtaatttgcaggggaaagccttccaaatttatgaaaagttcaatcagaagacattcaagtccaaggcacggtggctcacgc

SEQ ID NO: 58335 - DNA, 225 bp, Homo sapiens
ttgctggtggacttagaaactgttgctaattttattgccagacatattgttaagaaattatactgttgctgagggtatatcctgagaaacattagtagaaccgtaaattggggctttttcgtcaagctgtcccgaatatgcttttttggacaaattagtttcttttgttgttattcatgttataaaattctgctttttcaggtaatttgcaggggaaagccttcc

SEQ ID NO: 58336 - DNA, 1258 bp, Homo sapiens
ggctggaggctgtgaggcttccagcgggtcggtaccatggcgacgcgcggtggggctggggtggcaatggcggtttggtccctcttatccgcccgggccgtgaccgcgttccttctgttgttcctccctcgcttcttacaggcccagaccttctctttccctttccagcagccggagaagtgcgacaacaaccagtactttgatatctccgccctctcgtgtgttccttgtggagctaaccagaggcaagatgcccgaggaacttcatgtgtatgtctaccaggatttcagatgatctctaataatggaggacctgctattatttgtaaaaagtgcccagaaaacatgaaaggtgttacagaagatggctggaactgcatttcttgccctagtgacttaactgccgaaggaaaatgtcactgtcccattggccatattttaggtaagaattagattccttataaagaagtagtgataaatcttcattcttgtttttgtttttatttgaaaagggcactaatttaaatagttaagtgattacttaatatttttgcagtggctcaagcaattctcctgcctcagcttcctgagtagctgggactgcacacataacaccactgcagctggctaatttttaaattttttgtagagactgggtctcgttatgttgctcagcctggtcttgaactcctggcctcgagagatcttcctgcctcagcctcctaaagtgctgggattataggcatcagtcactgtgtccagcccttaatagtgtttataaaaattatttttgtacaaattaatgatacttaaaacatcagcaggcattgagaagaaaatacaaagttttgtctgagttttttaaaactcttaatattgtaggattagatggttatttccttaacataacatgacaaaatatgtctcaactcaaaagccaacttgatacttaatagggaaaaagcgtaagcattcctgttaatgtcaggacctggaaaaggatgcaaactatgcacttaagtaagagaaaaaaaatatttatcattggaaaagaaaaggtaggccgttgttaatcctagcactttggaaggctaaggcaggtgtattgcttgagctcaagagtttgagaccagtctgggcaacatggtgaaaccgcatctctacaaataaaaaaaaaaattatttggttacggtggcatgcacctgtagtcccagctactcgagaggcaaaggtgggaagatcgcttgagcctggaag

SEQ ID NO: 58337 - DNA, 3942 bp, Homo sapiens
  misc_feature (1453)..(1453): n is a, c, g, or t
  misc_feature (1846)..(1846): n is a, c, g, or t
  misc_feature (2123)..(2123): n is a, c, g, or t
ggctggaggctgtgaggcttccagcgggtcggtaccatggcgacgcgcggtggggctggggtggcaatggcggtttggtccctcttatccgcccgggccgtgaccgcgttccttctgttgttcctccctcgcttcttacaggcccagaccttctctttccctttccagcagccggagaagtgcgacaacaaccagtactttgatatctccgccctctcgtgtgttccttgtggagctaaccagaggcaagatgcccgaggaacttcatgtgtatgtctaccaggatttcagatgatctctaataatggaggacctgctattatttgtaaaaagtgcccagaaaacatgaaaggtgttacagaagatggctggaactgcatttcttgccctagtgacttaactgccgaaggaaaatgtcactgtcccattggccatattttagtggaaagagacattaatggaacattgttgtctcaagcaacttgtgagctctgtgatggaaatgaaaactcttttatggtagtaaatgctttaggagacaggtgcgtccgatgtgagccaacatttgttaataccagcaggtcctgtgcatgttcagaacctaacattttaacagggggattatgtttcagcagcacagggaattttcctctacgtagaatttcagctgcacgttatggagaagttggcatgtctttaacttcagaatggtttgcaaagtatttgcaatcatcagcagctgcatgttgggtatatgccaatctaacatcttgtcaagctcttggaaatatgtgtgtgatgaacatgaattcttacgactttgccacatttgatgcatgtggactatttcagtttatctttgaaaatactgctggactgagcactgttcattctatttcattttggagacagaatcttccttggctgttttatggagaccagttaggattagcacctcaagtgctcagttctacctctcttcctacaaatttcagttttaaaggagaaaaccagaatacaaaactgaagtttgttgctgcttcctatgatataagaggaaattttctcaagtggcaaactttagaaggaggtgttttacagctttgtccagacacagagacaaggctaaatgctgcttattcatttggaacaacctaccaacaaaattgtgagattcctatctctaagatcttaattgactttcccactcctatattttatgatgtgtaccttgaatatactgatgaaaatcaacatcaatatattttggctgtgcctgtgttaaacctaaatcttcaacataataagatatttgtgaaccaagacagcaactctggaaagtggcttctaactcggcgcattttcttagtggatgcagtaagtggacgagaaaatgacttaggaactcagccaagagtaattcgagttgctactcaaatatcactgagtgtcnaccttgtacccaacacaataaatggaaacatctaccctcccttaatcaccattgcctacagtgacattgatatcaaagatgccaacagccagtctgtgaaggtttctttctcagtcacatatgaaatggatcatggagaagcacatgtccagacagatattgctttgggtgtattgggtgggctagctgttttagcatctcttttgaagacagcaggatggaagaggcgcattgggagtcccatgattgatttacagacagttgtgaaattcttggtgtactatgctggtgatctggccaatgttttctttatcatcacagtgggaacaggtctttactggcttattttcttcaaagcacagaagtctgtgtctgttttgctgccaatgccanttcaggaagaacgttttgtcacttatgttggatgtgcctttgctctgaaggcactacaatttttgcataagctcatatcccagattacaatagatgtattctttattgattgggagcgacctaaaggaaaggttcttaaagctgttgaaggtgagggtggtgtacgaagtgccactgttcctgtaagcatatggagaacatattttgtagcaaatgaatggaatgaaattcagactgtgagaaaaattaattcactctttcaagtacttactgtccncttctttttggaggttgtgggattcaagaacttagcattaatggactcatcttctagtctttctagaaacccacctagctacatagctccttatagctgcattttgagatatgcagtgtctgctgctctttggctagccattggaattatacaggtcgtgttctttgctgtcttttatgagagatttatagaagataaaattcgacagttcgttgatttatgctctatgagtaatatatcagtgtttctgttatcccacaaatgttttggatattacattcatggtagatcagtacatgggcatgcagatactaatatggaagaaatgaatatgaaccttaaaagagaagcggaaaatttgtgtagccagagaggtttggtacccaacacagatggtcagacttttgagattgcaatttctaaccagatgagacaacattatgacagaattcatgagacactaataaggaaaaatggtcctgctagactactgagttcatcagcaagtacttttgagcagagtataaaagcatatcatatgatgaataaatttcttggctccttcattgaccatgttcataaggaaatggattactttataaaagataagttgcttcttgaaagaattcttggaatggaattcatggaaccaatggaaaaaagcatcttttacaatgatgaaggttattctttcagcagtgtcctgtattatggaaatgaaggctactcttcttatttttgatctgctgttcttctgtgttgtggatttggcttgccaaaattttattttagcatccttccttacatatctacaacaagagatttttagatatatccgtaatacagtaggacaaaagaatttggcatccaaaacattggtggatcaaagatttttgatttaacttcctgaataaataacttaaagactcagtataatcatggccaaaaaaaagtcatgatatcaggttagtttgccatattttttaaaacttataatgcagactattctgtttttgttttttatttgcagaaagatttatttttataacttgggaatatataacctgatataatagaaaatactgttttcccattgtgtgtagtatttaatgcagtaaataataaattaatactgacagtgaggccaaaaaaaatctaaatgttgctttcagcataatactttttaatgctaattaaaacagtccccatcatttgtctctgtagattattttataaactgagagctgcctgaatcttctcacattgacaaagtaatttgattccaagtttaagactagttttcagtttgatattttcatgttttgtgtgcttatggttaaataaatgttgaaagatattttcaagtttacttagaaattttaaattgtattattgctgattcaatttgcatcattctaattgctcatcctctttggcagtggattaattcactgttgggttaatatgcatctcatgaaatgatatcttttcattcctttgtatacctgtattaggtcagtatacgctttccatgaaatatatttgcatttctaatatagtttacatttattaagttataacgtatgacatttttcccaatatcattttttatacattttaattacttaatgttttaagagttctcttccagagttttgcttttcaattacgtttaaagactgtaaataacaaacagtaaggctgggcgctgtggcttacgcctgtaatcccagcactttggaaggccaaggcacgtggatcactttaggtcaggagttcaagaacagcctggccaacatggaaaaccccatctctacaa

SEQ ID NO: 58338 - DNA, 2340 bp, Homo sapiens
  misc_feature (244)..(244): n is a, c, g, or t
  misc_feature (521)..(521): n is a, c, g, or t
agaggggaggattcccaactaagagaaaattaggaagcagttcaattttcttagatagtgaaagatgagaagagttgaaagaagaggctaccaggaacggccagaaagacagttgtgaaattcttggtgtactatgctggtgatctggccaatgttttctttatcatcacagtgggaacaggtctttactggcttattttcttcaaagcacagaagtctgtgtctgttttgctgccaatgccanttcaggaagaacgttttgtcacttatgttggatgtgcctttgctctgaaggcactacaatttttgcataagctcatatcccagattacaatagatgtattctttattgattgggagcgacctaaaggaaaggttcttaaagctgttgaaggtgagggtggtgtacgaagtgccactgttcctgtaagcatatggagaacatattttgtagcaaatgaatggaatgaaattcagactgtgagaaaaattaattcactctttcaagtacttactgtccncttctttttggaggttgtgggattcaagaacttagcattaatggactcatcttctagtctttctagaaacccacctagctacatagctccttatagctgcattttgagatatgcagtgtctgctgctctttggctagccattggaattatacaggtcgtgttctttgctgtcttttatgagagatttatagaagataaaattcgacagttcgttgatttatgctctatgagtaatatatcagtgtttctgttatcccacaaatgttttggatattacattcatggtagatcagtacatgggcatgcagatactaatatggaagaaatgaatatgaaccttaaaagagaagcggaaaatttgtgtagccagagaggtttggtacccaacacagatggtcagacttttgagattgcaatttctaaccagatgagacaacattatgacagaattcatgagacactaataaggaaaaatggtcctgctagactactgagttcatcagcaagtacttttgagcagagtataaaagcatatcatatgatgaataaatttcttggctccttcattgaccatgttcataaggaaatggattactttataaaagataagttgcttcttgaaagaattcttggaatggaattcatggaaccaatggaaaaaagcatcttttacaatgatgaaggttattctttcagcagtgtcctgtattatggaaatgaaggctactcttcttatttttgatctgctgttcttctgtgttgtggatttggcttgccaaaattttattttagcatccttccttacatatctacaacaagagatttttagatatatccgtaatacagtaggacaaaagaatttggcatccaaaacattggtggatcaaagatttttgatttaacttcctgaataaataacttaaagactcagtataatcatggccaaaaaaaagtcatgatatcaggttagtttgccatattttttaaaacttataatgcagactattctgtttttgttttttatttgcagaaagatttatttttataacttgggaatatataacctgatataatagaaaatactgttttcccattgtgtgtagtatttaatgcagtaaataataaattaatactgacagtgaggccaaaaaaaatctaaatgttgctttcagcataatactttttaatgctaattaaaacagtccccatcatttgtctctgtagattattttataaactgagagctgcctgaatcttctcacattgacaaagtaatttgattccaagtttaagactagttttcagtttgatattttcatgttttgtgtgcttatggttaaataaatgttgaaagatattttcaagtttacttagaaattttaaattgtattattgctgattcaatttgcatcattctaattgctcatcctctttggcagtggattaattcactgttgggttaatatgcatctcatgaaatgatatcttttcattcctttgtatacctgtattaggtcagtatacgctttccatgaaatatatttgcatttctaatatagtttacatttattaagttataacgtatgacatttttcccaatatcattttttatacattttaattacttaatgttttaagagttctcttccagagttttgcttttcaattacgtttaaagactgtaaataacaaacagtaaggctgggcgctgtggcttacgcctgtaatcccagcactttggaaggccaaggcacgtggatcactttaggtcaggagttcaagaacagcctggccaacatggaaaaccccatctctacaa

SEQ ID NO: 58339 - DNA, 706 bp, Homo sapiens
acacacatgtgcaatgtgcctagcaaaacataaactaagaactgccataacttgtgtgttatcctaatatcatagcaactgtgtgagatgatccagacgatgatggaccaagcagccatgcacagcatagaggattgccacattatcccttgccacgcacaaaagccaattgttctggtattagaatgtcatgtttcgtgacatgtttcaatgtcagtagtatgtggagaaaagttctgatgtttggatgttttcggtgtttaaactccaagatagtcaatctacttgctctactgtttagattcaaataaacgagaaaaagggcaactctagcagatgatcatgcatgctagaatgcagacactggatacttgcacctcctcagaaatcatattcagttgggaaattgccagcctgtgtgcattcacctgcttcaatagcctagaaattggttttactttgccccacactgggaaggatggccaagtgcgtcaaacggagctttaatgtgggctcattgtttgtcagactccatcctgggagctttacggctatcaccacatctaatcctcataacaaccctacatggcgggtaccaatactgagttttacaaaggaattaagcatttatccaagatcacacagctagtgagaagcagagccagaattaaaaaggaaaatttagtctttccacaagataattaaa

SEQ ID NO: 58340 - DNA, 483 bp, Homo sapiens
ctgtccatggaaaaattttcttccatgaaactggtccttggtgtcaaaaaggtttgggactgctagtcaagaccacagttgaaaagatgtattatttgccctttagaagcttacaatctaaactatccaaatccaacataaaggaagtaataatggcttaaaataaacaaaatacactgagcaataatttaaagactcaactaaaatacacattttatgccagtaaaatatcaatgtatttgttatacacaaagaaaaaagcagtgaagaagtttcatcaatccattgtttttacttattttagaatgacaagatattcgtgacagaaaaatacacttgccttttaaagtcaaagcacctatcaagtgccaaattagaagagattgtttcattttataaatcgcagttaggttacagagtaggtgcaaattcagatacacagaaacaaattctttgaaaaagtgccaaaatcatcccccatgt

SEQ ID NO: 58341 - DNA, 220 bp, Homo sapiens
  misc_feature (10)..(10): n is a, c, g, or t
  misc_feature (42)..(42): n is a, c, g, or t
  misc_feature (99)..(99): n is a, c, g, or t
  misc_feature (142)..(142): n is a, c, g, or t
  misc_feature (212)..(212): n is a, c, g, or t
tgagagtctntgcccttcactgttggaccaccattattgtgngtcttgaaaatggtagaagtcggaagtattttgctactgagcgttatggtcggttgngttgtggctgttagctggttcattcaggaggacaggcacaagnattttgaatctgtcattcttgttgaccaaggttttaggctttagtctgtgattacaaatttggctgaatntaagaaaa

SEQ ID NO: 58342 - DNA, 2629 bp, Homo sapiens
tgttgagtgtggaagcgaaaaccaagttaagaagtcctgttatttgggtcatggtctacgtgaaacatcaaagaaacctgtaacggaaaacgacttgtttgaaagagccagttctctatccaaatttaccaatcagaatcttgcactgaaaaaataaaccaatcgtgaatctctacggccacttccggaatttagcaaccgatcactaacagggatcgtccacaatccaatcagagtgattctgttcctatatagaggggcaaaccaatcttcctaactcatttactttgcagatgaactatggcgcgtactaagcagacggctcgtaaatccacaggcggtaaagcaccgcgcaaacagctggccactaaggcagctcgcaagagcgctccggccacgggcggcgtgaagaagccccatcgctaccgccctggcaccgtggctctgcgcgagatccgtcgctaccagaagtctaccgagcttctaatccggaagctgccgtttcagcgcctggtgcgagaaatagctcaggacttcaagaccgacctgcgcttccagagttccgcggtgatggcgctgcaggaggcctgcgaggcctacttggtggggcttttcgaggacaccaacctgtgcgctattcatgccaaacgcgtgaccatcatgcctaaagacatccagcttgcccgccgcattcgtggggagagggcgtgaattgttttgagtacaaaccttaaatccaaaggctcttctcagagccaaccactttgtccgtgaaaagggctgtaatcctttgagacgcattagaccactaaactgcactgatccaaatagacatttgaaatagtggcattcagttccctcgatgcttcatttaaatttccaaatttaagcgctccctcaggttttcgcctagggctgggcctccctacgctgttctccattggtttaggtggctttgttttgctgttcaggccctctgctgctttcttgtacattgttctcgttttctaaactcctggccacttaattgtaccctgcttaacccatcctcttgttttctggctcaacgctctttcatgtggtggcctgcattttaggtcttaactgcataggctttcaacgccttggttttgcctttccttgatgtttatttgaccttgcccgaggggccagcgcttttgatctgcatcaggctgccttactccactagtgttttgagacccagctacttgccggcgacggtcggtgccttgggtgcggtcaacgttactctctgtgcgcctgatactggtctaaggctaaggttattagctggaacacctagacccgtggcactaacacacagctcttgcagacttgacagccttgcataggttctaaactgcaggagtcaaagcaacgaaggtgcagatgggtgtgtctcaaacctgagtgcgaaaggaaaatgcagaaatcatgagccttttcaactttccagttgatatcttttgtttgcttttttcttttcttatttatttatttatttatttatttatttatttattttgagacggagtttcgcccttgttgcccaggctggagtgcattggcgcgatctcggctcaccgcaacctccgcctcccgggttcaagcgattctcctgcctcagccttccgagtagctgggattacaggcatgagccacctcgcccggccttccggctgatatcttaaaagaacttttcaactttagtaaataccctgtcttaatcaaatctcattaaaagtaccccatatttatcaacaaaacatgaaaatccttggacggcttcaaagttcttacagaaaatattctgcctttcctttccatacaaaggcacagcttcgaaactggtaggtgaagggaaggaaaataaggaattctgttacgaaatcatacaggctgttatttggaaatacagaagggtgtatgtactatatgggatactgcatgctatttggaagaattttgtttatttaaacatttcagcaaattcctcagttttgatatggggtgcagtatttttaactcattgagaaatttctactaacttttttgaatgtgctcttttcccactagttgcactaaggaaagaggttagtcatgtggtaaaattaatagtgacaaagctgtaaatagctctgcaggccaaggtagccatagtaagaagtcctggagatttatggaagaaatttttgttcatggaagcctgtcagacatgaagatgtgggtcttgtgaattggagattcagtgcgtgaggaaaacagcctaactatccataattaaggtaactactgtcagatatttgtaacatagtgaacatcctattatgctagatagaagcattctctatttgaatgttgtttcctgtatcctgtactttctttaagattctagctcaacaagttttaacctgtatttctcttacagctactggaattcagtacgtgaggacttggacttggtgggcacagaatgcatctttttatatcattaaatccaccagaacatctagcatggtcatttgcctaaaacaaagcctctggaaatttagtcaagttgagatgtaaaataaaagattactgaacagaaaaaaacattgagtgcatt

SEQ ID NO: 58343 - DNA, 2486 bp, Homo sapiens
tgttgagtgtggaagcgaaaaccaagttaagaagtcctgttatttgggtcatggtctacgtgaaacatcaaagaaacctgtaacggaaaacgacttgtttgaaagagccagttctctatccaaatttaccaatcagaatcttgcactgaaaaaataaaccaatcgtgaatctctacggccacttccggaatttagcaaccgatcactaacagggatcgtccacaatccaatcagagtgattctgttcctatatagaggggcaaaccaatcttcctaactcatttactttgcagatgaactatggcgcgtactaagcagacggctcgtaaatccacaggcggtaaagcaccgcgcaaacagctggccactaaggcagctcgcaagagcgctccggccacgggcggcgtgaagaagccccatcgctaccgccctggcaccgtggctctgcgcgagatccgtcgctaccagaagtctaccgagcttctaatccggaagctgccgtttcagcgcctggtgcgagaaatagctcaggacttcaagaccgacctgcgcttccagagttccgcggtgatggcgctgcaggaggcctgcgaggcctacttggtggggcttttcgaggacaccaacctgtgcgctattcatgccaaacgcgtgaccatcatgcctaaagacatccagcttgcccgccgcattcgtggggagagggcgtgaattgttttgagtacaaaccttaaatccaaaggctcttctcagagccaaccactttgtccgtgaaaagggctgtaatcctttgagacgcattagaccactaaactgcactgatccaaatagacatttgaaatagtggcattcagttccctcgatgcttcatttaaatttccaaatttaagcgctccctcaggttttcgcctagggctgggcctccctacgctgttctccattggtttaggtggctttgttttgctgttcaggccctctgctgctttcttgtacattgttctcgttttctaaactcctggccacttaattgtaccctgcttaacccatcctcttgttttctggctcaacgctctttcatgtggtggcctgcattttaggtcttaactgcataggctttcaacgccttggttttgcctttccttgatgtttatttgaccttgcccgaggggccagcgcttttgatctgcatcaggctgccttactccactagtgttttgagacccagctacttgccggcgacggtcggtgccttgggtgcggtcaacgttactctctgtgcgcctgatactggtctaaggctaaggttattagctggaacacctagacccgtggcactaacacacagctcttgcagacttgacagccttgcataggttctaaactgcaggagtcaaagcaacgaaggtgcagatgggtgtgtctcaaacctgagtgcgaaaggaaaatgcagaaatcatgagccttttcaactttccagttgatatcttttgtttgcttttttcttttcttatttatttatttatttatttatttatttatttattttgagacggagtttcgcccttgttgcccaggctggagtgcattggcgcgatctcggctcaccgcaacctccgcctcccgggttcaagcgattctcctgcctcagccttccgagtagctgggattacaggcatgagccacctcgcccggccttccggctgatatcttaaaagaacttttcaactttagtaaataccctgtcttaatcaaatctcattaaaagtaccccatatttatcaacaaaacatgaaaatccttggacggcttcaaagttcttacagaaaatattctgcctttcctttccatacaaaggcacagcttcgaaactggtaggtgaagggaaggaaaataaggaattctgttacgaaatcatacaggctgttatttggaaatacagaagggtgtatgtactatatgggatactgcatgctatttggaagaattttgtttatttaaacatttcagcaaattcctcagttttgatatggggtgcagtatttttaactcattgagaaatttctactaacttttttgaatgtgctcttttcccactagttgcactaaggaaagaggttagtcatgtggtaaaattaatagtgacaaagctgtaaatagctctgcaggccaaggtagccatagtaagaagtcctggagatttatggaagaaatttttgttcatggaagcctgtcagacatgaagatgtgggtcttgtgaattggagattcagtgcgtgaggaaaacagcctaactatccataattaagctactggaattcagtacgtgaggacttggacttggtgggcacagaatgcatctttttatatcattaaatccaccagaacatctagcatggtcatttgcctaaaacaaagcctctggaaatttagtcaagttgagatgtaaaataaaagattactgaacagaaaaaaacattgagtgcatt

SEQ ID NO: 58344 - DNA, 1821 bp, Homo sapiens
tgttgagtgtggaagcgaaaaccaagttaagaagtcctgttatttgggtcatggtctacgtgaaacatcaaagaaacctgtaacggaaaacgacttgtttgaaagagccagttctctatccaaatttaccaatcagaatcttgcactgaaaaaataaaccaatcgtgaatctctacggccacttccggaatttagcaaccgatcactaacagggatcgtccacaatccaatcagagtgattctgttcctatatagaggggcaaaccaatcttcctaactcatttactttgcagatgaactatggcgcgtactaagcagacggctcgtaaatccacaggcggtaaagcaccgcgcaaacagctggccactaaggcagctcgcaagagcgctccggccacgggcggcgtgaagaagccccatcgctaccgccctggcaccgtggctctgcgcgagatccgtcgctaccagaagtctaccgagcttctaatccggaagctgccgtttcagcgcctggtgcgagaaatagctcaggacttcaagaccgacctgcgcttccagagttccgcggtgatggcgctgcaggaggcctgcgaggcctacttggtggggcttttcgaggacaccaacctgtgcgctattcatgccaaacgcgtgaccatcatgcctaaagacatccagcttgcccgccgcattcgtggggagagggcgtgaattgttttgagtacaaaccttaaatccaaaggctcttctcagagccaaccactttgtccgtgaaaagggctgtaatcctttgagacgcattagaccactaaactgcactgatccaaatagacatttgaaatagtggcattcagttccctcgatgcttcatttaaatttccaaatttaagcgctccctcaggttttcgcctagggctgggcctccctacgctgttctccattggtttaggtggctttgttttgctgttcaggccctctgctgctttcttgtacattgttctcgttttctaaactcctggccacttaattgtaccctgcttaacccatcctcttgttttctggctcaacgctctttcatgtggtggcctgcattttaggtcttaactgcataggctttcaacgccttggttttgcctttccttgatgtttatttgaccttgcccgaggggccagcgcttttgatctgcatcaggctgccttactccactagtgttttgagacccagctacttgccggcgacggtcggtgccttgggtgcggtcaacgttactctctgtgcgcctgatactggtctaaggctaaggttattagctggaacacctagacccgtggcactaacacacagctcttgcagacttgacagccttgcataggttctaaactgcaggagtcaaagcaacgaaggtgcagatgggtgtgtctcaaacctgagtgcgaaaggaaaatgcagaaatcatgagccttttcaactttccagttgatatcttttgtttgcttttttcttttcttatttatttatttatttatttatttatttatttattttgagacggagtttcgcccttgttgcccaggctggagtgcattggcgcgatctcggctcaccgcaacctccgcctcccgggttcaagcgattctcctgcctcagccttccgagtagctgggattacaggcatgagccacctcgcccggccttccggctgatatcttaaaagaacttttcaactttagtaaataccccatatcaaaactgaggaatttgctgaaatgtttaaataaacaaaattcttccaaatagcatgcagtatcccatatagtaca

SEQ ID NO: 58345 - DNA, 458 bp, Homo sapiens
aattcccaaactgctctttttattggctaggaaaagaacaccttacagggaatccgataggttaattcacaatagtgttaggctgtaatgtcattctttaagaatcttttccagtaaacatttgttactttttcaaagtaattgggagctgttgagtgtggaagcgaaaaccaagttaagaagtcctgttatttgggtgagtccagttcctataaaagttctgttggatgtgtcttaaattgttcggtgcacctcagctctctcccgcagggatccggagaaactgcgccattgttgtcttacagagaaacaaccttctaacactctcttcgccgccatctttttcaagattttaaattgaaaatactttttttgacggctcttgccattatgtctggacgttttaatttcaacaaaacgaaataatagtgttaagttctttgagtcaaacccgatat

SEQ ID NO: 58346 - DNA, 338 bp, Homo sapiens
ctgctagagagtatttcagggtctgcagcatgttgttaaggccattaagcatatgttaaggccattaagagcagtaattataaaagggccctgctaaaataaatatcaagttcccttaagaaacttcaaaattatgaaagtttcaggtcattattttgctacaaatgaacttagcagctaagaaaaatgtctgcctgcttataaactaaatatggtataattatatatttctattatgtatttctaaagctacattttcacctaactctactacaaagtagtttctgaaaacaaagtaaaagcagggaaaatcaaacttcaaatataatcaaatatat

SEQ ID NO: 58347 - DNA, 302 bp, Homo sapiens
aatatgacaaggttggcttcatttttagaagtaggtacactgtctccaaagggttttatttactacagatatttggtctgtatatttagtgctgaattgtatgattctaaacattaaaatgtaagcagcacatttaacataaaaaggaaaccagctctaggtgagatacatgtgtcacagagattctcagttattaatgttgctacaaaatttccattctaatagcaccacaagaatccaggtatgcataaggcagtctccattaagaatcagtagcaatcttatgttgcaaaacatagggt

SEQ ID NO: 58348 - DNA, 619 bp, Homo sapiens
tgtttcctagggagcttgacttatattcatgcatttcccatgtcaaacatttatagctaccaattaccaggttcaggttattaggatttgcttttctcccatctttcccctactgttttgtttgtttgtttgccatttggcctctgctttccaataggaaaggaaggaaaaggttaatttgtcatatactctgtgaagagtgtgggtaaatgagtagttgagtcataataaactctgttatctgtgcagattatcagtctttgagcctcatggctgctttcctgccttaccccacctgagcttgagggtagcatacttaggatttgtctatttgcagaattgttttgagagcctaaggccccataactgggaggctgtatgtgcttcatgtcagctccattagtgtctgttttatttagtgctgttttccattatctcgaacagagtcagtcatatagtaagtactcaataaatatgtcttgaatgaaaaaataatttgtattttccaaagccatatggaatgggttttgtcattcattattttggattctcagggtggtattcccctcacacactcctcactcccacccctgggataatcaagagtctaatattgact

SEQ ID NO: 58349 - DNA, 601 bp, Homo sapiens
cagaacagccacccctctctcgggcactgctgccatgaatgccttcctgctctccgcactgtgcctccttggggcctgggccgccttggcaggaggggtcaccgtgcaggatggaaatttctccttttctctggagtcagtgaagaagctcaaagacctccaggagccccaggagcccagggttgggaaactcaggaactttgcacccatccctggtgaacctgtggttcccatcctctgtagcaacccgaactttccagaagaactcaagcctctctgcaaggagcccaatgcccaggagatacttcagaggctggaggaaatcgctgaggacccgggcacatgtgaaatctgtgcctacgctgcctgtaccggatgctaggggggcttgcccactgcctgcctcccctccgcagcagggaagctcttttctcctgcagaaagggccacccatgatactccactcccagcagctcaacctaccctggtccagtcgggaggagcagcccggggaggaactgggtgactggaggcctcgccccaacactgtccttccctgccacttcaacccccagctaataaaccagattccagagtaaaa

SEQ ID NO: 58350 - DNA, 277 bp, Homo sapiens
gttcccatcctctgtagcaacccgaactttccagaagaactcaagcctctctgcaaggagcccaatgcccaggagatacttcagaggctgggtgagcagcctccttcctctctgattggtggggttcgggaatactgtggtggcacttgaggaagagatgtgctctgattggtgggatttggaggaagggctcagctctgactggtggaactagggagcttggctctgattggtgggtctgttccatgcccacttcaattccaagttgtaactgctg

SEQ ID NO: 58351 - DNA, 535 bp, Homo sapiens
atttctctggtaccttggaaactttcttgacatgcatgcaaggaagcctagaacactaccaggggcagtcctcaaccatggaaggatgggggttggtggataaagaccctggatttcctggtacttgttggggcaatctgaagagaattctacacagtttttggaggatccctagcataattgaacactagttgtccctcatggtaaccaactcaataatacacttgtttgccttttctcttttcactatttacattccacattctctcttgtctttcttgtcaccatctttcaaataaactgcatccaaatgcttgtcacagggtctgcagtttactgaaacaaatgactcaaaccccaaattagatcaggagagcctatcacaaaaatgatgcctgccacatcattgccatttagaaccaggatagcaaagaaacacatcctgaaaatttttttcttactagcaaatatcctatgcctggctggcttgcccatcaccagtaagaatggagtgttgacatgaatcaaaaaacat

SEQ ID NO: 58352 - DNA, 318 bp, Homo sapiens
tattacataaagctaaggacaactaatttaaagcaatctaagattgttgaatacaaaaactcctcattttctttattttaaaagtacagaagcatattcattagttatggcaaataaaagggtttctgttggcaaaagtggcttttaaaatatataattcattatagaagaataaaaaaatgcaaagcaataagtcacattcaatagtaatgtttattaactttttaatttacttttaggaatttttaaattacttatatctacattcatatctaactttattatttaaaaaataaactggaatcttactataatgat

SEQ ID NO: 58353 - DNA, 409 bp, Homo sapiens
actggtcctaacttgcctcagaagcatcagaaaaaaaaaagggagacagctagggagtgtggctcactgcatagaggccgtccccacacttggctataccctcttcagttctttggccagatgctgggcagagacaatcaagggcacaggctctcacagagcaggaatgtatgtgagcagtattggtaatactagataacatttactgagcacatactatgtgtcaggcactgtgctgtactttatatttgtttactcatttaattgccaagagcaaaggagcattcagggctaatcaggaaaacaaatggaggcttcccccaaatgccctattttagcactagttcctgggtcactggaagttcttctctgtgtgaccttggagtatcacttaactcctgtgagtccc

SEQ ID NO: 58354 - DNA, 505 bp, Homo sapiens
cctacagcactcaacttgtcatctgagtaaacttgcttctgaatggcactatggtgtttttaaaagattcttctcttagggaggtgatgatagtcatgaagttcacagaccacctcttttgttgagtcctacttctatcggttctcaatctccatgggatactgctggactgttacttttgtcaagtcatggccgtttatgcttaagccctcatgacccaactcctgataattggacattgcttctcccaaaccaactagcgaaatgctactgtgcaaacatttactaaaaagctgtgttaacagataacatgtttatgctaattgttctgcttcaggaattatggaaggctatttctaacatttggttacctagggccaggtacagtggccctcacctataatccctagcactttgggaggctgaggcaggtggatcgcttgagcccaggagttctagaccatcctgtgcaacacggggaaaccccatcgttacaaaaaataca

SEQ ID NO: 58355 - DNA, 446 bp, Homo sapiens
aatatacgcaaatcaataaatgtcatccagcatataaacagagccaaagacaaaaaccacagaattatctcaatagatgcagaaaaggcctttgacaaaattcaacaacccttcatgctaaaaactctcaataaattagcaatacgttgaagttcttgttgtatcgcatcttggccagcatttgtttttgtcggtgtttcggatcgtcaccattctaagagaacaggaaatgagaatgggtgatatgggtccctgtggagcaataaacatgggagatgcgtttagcccagcccctgctggtaaccaaggtcctcctccaatgacgggtatgaatatgaacaacagagcaactatacctggcccaccaatgggtcctggtcctgccatgggaccagaaggagccgcaaatatgggaactccaatgatgccagataatggagcagtgg

SEQ ID NO: 58356 - DNA, 673 bp, Homo sapiens
gtgacccactccttggctccttacctcaggctcaggagaccttggggctggaaaacaatgggttgtttctgtcctctttctctgattttcttcaccctttcacatggccccaaatggatattaataatcacattttcttactcagagatgtccagatatggaaagagaatgtctttactttggtttaatcagatacaaggacaagtagacttgtggatactgcccacttttgtaagtgatctgaacagcaagctttgaagagctgatagactggcatttcctcaaaaggatctctacatacagtgtgaaaaaaataagagaagaaatggaagcctagaggcaagatgacagaagaaactgtagtgttaatccagataagacattgaagagctaaaccaggattttggtaagaccgatggagagatgtgaatggatctgaatgctaccaagaaggtcaaattcaacggtgcttacaggcataccttggaaacattgcagatttagttctagaacaccacagtaaagcaaatattgcaagaaaatgaatcacatgaattttgggtttcccagcgcacataaaagttatgtttacactatactatagtctaagtgtgtaatagcattatgtattttaaaagtacatgccttaattaaaaaatattttattgctaaa

SEQ ID NO: 58357 - DNA, 449 bp, Homo sapiens
aacacaaagccctcattcttacaatactcttctaatgatagttccatctttatgaacattccaggatctctacatacagtgtgaaaaaaataagagaagaaatggaagcctagaggcaagatgacagaagaaactgtagtgttaatccagataagacattgaagagctaaaccaggattttggtaagaccgatggagagatgtgaatggatctgaatgctaccaagaaggtcaaattcaacggtgcttacaggcataccttggaaacattgcagatttagttctagaacaccacagtaaagcaaatattgcaagaaaatgaatcacatgaattttgggtttcccagcgcacataaaagttatgtttacactatactatagtctaagtgtgtaatagcattatgtattttaaaagtacatgccttaattaaaaaatattttattgctaaa

SEQ ID NO: 58358 - DNA, 432 bp, Homo sapiens
tagtttatcctccctcctccccatttttctccacggattaggcgactgatctctacatacagtgtgaaaaaaataagagaagaaatggaagcctagaggcaagatgacagaagaaactgtagtgttaatccagataagacattgaagagctaaaccaggattttggtaagaccgatggagagatgtgaatggatctgaatgctaccaagaaggtcaaattcaacggtgcttacaggcataccttggaaacattgcagatttagttctagaacaccacagtaaagcaaatattgcaagaaaatgaatcacatgaattttgggtttcccagcgcacataaaagttatgtttacactatactatagtctaagtgtgtaatagcattatgtattttaaaagtacatgccttaattaaaaaatattttattgctaaa

SEQ ID NO: 58359 - DNA, 664 bp, Homo sapiens
gtgacccactccttggctccttacctcaggctcaggagaccttggggctggaaaacaatgggttgtttctgtcctctttctctgattttcttcaccctttcacatggccccaaatggatattaataatcacattttcttactcagagatgtccagatatggaaagagaatgtctttactttggtttaatcagatacaaggacaagtagacttgtggatactgcccacttttgtaagtgatctgaacagcaagctttgaagagctgatagactggcatttcctcaaaaggtacattactttttgtgataaatattacgtttagtaaaagtactacctaatgaatatgtcacaaaatgtgtaagttcatcactgctaattgcatgttcattataaagccttttctatatatctttttggttaaaatatttcccctttgcacagccaaagggaacctttcccactgtattctatgttacgatggagaggagatgagagtgacattcacatagactataattggtattgtgcccatttaaattcagaatactggttgcaagttagatatggtaagacaccataattatattattttattacacccccagtatttttggataaacaattcaacattctctgctgggattggcagtgtagcctaccttaa

SEQ ID NO: 58360 - DNA, 302 bp, Homo sapiens
tagtttatcctccctcctccccatttttctccacggattaggcgactgatctctacatacagtgtgaaaaaaataagagaagaaatggaagcctagaggcaagatgacagaagaaactgtagtgttaatccagataagacattgaagagctaaaccaggattttgggaaaagagaggcctgaggagaaggagagagatggagaacagcatgttggtggaggagtcagcatacaaagtttatagattaagtttgtcatcctatatggacagtttttgggactccaaaataattataaaagtaa

SEQ ID NO: 58361 - DNA, 2485 bp, Homo sapiens
ggcgccctccctgcgccgggggcgggagcccagcgagcgcagagccccggccccgcgcggcccgagtgccacatcactgcgctggccgtccaaggtccgccgccccaccatgccgcccccgccgccgctgctgctccttacagtcctggtcgtcgccgctgcccggccggggtgcgagtttgagcggaaccccgccggtgaatgccacaggccaccagctgcagacagcggtacagtaccgggacctccctggcttctgttctgtaggagggctgcagcccccacactgtcagagcactttaggcagctgaatccgtgatttcagaagctctgattcctgcacagtagctgttgtcctggtcctcccctgccagaccgtgggtgcccctccctgcaggccctggccctgcgtggggtcccctacgtaaatgtctgacgcgtcacggtcagggccactgcgggagggactgacctgccgaccctgcctccccagccacctgcgtggacctgcagctcaggacctgcagcgatgccgcctacaaccacaccaccttccccaacctgcttcagcaccggtcgtgggaggtggtggaggccagctccgagtacatcctgctgagcgttctacaccagctcctggaaggccagtgcaacccggacctgcggctgctgggctgtgctgtgctggccccccggtgtgagggcggctgggtgcgcagaccctgccggcacatctgcgagggcctgcgggaggtctgccagcccgccttcgacgccattgacatggcctggccctacttccttgactgccaccgctacttcacgagagaggacgagggctgctatgacccgctggagaagcttcggggaggcctggaggctgacgaggcactgccctcagggctgccgcccaccttcatccgcttcagccaccactcctacgcccagatggtgcgtgtgctgaggcggacggcctcccgctgcgcccacgtggccaggacctacagcatcgggcgcagcttcgacggcagggagctgctggtcatcgagttctccagccgccccggccagcacgagctgatggagcccgaggtgaagctcatcggcaacattcatggcaacgaggtggcgggccgggagatgctcatctacctagcccagtacctgtgctctgagtacctgcttggtaacccccgcatccagcgcctgctcaacaccacccgcatccacctgctgccctccatgaaccctgacggctatgaggtggcagctgccgagggtgccggctacaacgggtggacgagcgggaggcagaacgcgcagaacctggatctgaaccgaaatttcccggacctgacgtccgagtactaccggctggcggagacccgcggcgcacgcagcgaccacatccccatcccccagcactactggtggggtaaggtggccccggagacaaaggcaatcatgaagtggatgcagaccataccctttgtgctctcagccagccttcatgggggcgacctggtggtgtcctaccccttcgacttctccaagcacccccaggaggagaagatgttttctcccacgcccgacgagaagatgttcaagctgctgtccagagcctacgctgacgtccaccccatgatgatggacaggtcggagaataggtgtggaggcaatttcctgaagagggggagcatcatcaacggggcggactggtacagcttcacgggaggcatgtccgacttcaactacctgcacaccaactgctttgagatcacggtagagctgggctgtgtgaagttcccccccgaggaggccctgtacacactctggcagcacaacaaggagtcactcctgaatttcgtggagacggtgcaccggggcatcaaaggtgtggtgacagataaattcggcaagccagtcaaaaacgcccggatctcagtcaaaggcattcgccacgacatcaccacagccccagatggtgactactggagactgctgcccccaggtatccacattgtcattgcccaagcccctggctacgccaaagtcatcaagaaagtcatcatccccgcccggatgaagagggctggccgtgtggacttcattctgcaacctctggggatgggacccaagaactttattcatgggctgcggaggactgggccccacgacccgctgggaggtgccagctctttgggggaggccacggagcccgacccgctccgggcgcgcaggcagccctcggccgacgggagtaagccctggtggtggtcctacttcacatcgctgagcacccacaggccacgctggctgctcaagtactagccccggccccagcacccgccaggatgtggagaccgaggcccatctccgcatcccgggctcctggctcttgattttgtctgccacagacatcccacaaagccgctgccattttattaaagtgttttgatccactttccactggaaaaaaaaaaac

SEQ ID NO: 58362 - DNA, 798 bp, Homo sapiens
  misc_feature (626)..(626): n is a, c, g, or t
gattcatagaagtagttggctttggagatgaagtcggggaaaatgcagcccacccttgccttcactgctccaacagcctgggctttataaactgtcaagccaacctgcacacaccctgtggacaccatgtctgtgtgtaacctcaggagagaaagcccacactacccggccagatgttcaagctgctgtccagagcctacgctgacgtccaccccatgatgatggacaggtcggagaataggtgtggaggcaatttcctgaagagggggagcatcatcaacggggcggactggtacagcttcacgggagagatggtgaatttgcagcaactaggcaaggagcttttggggctacctgggcctgcaattgtctaagaaataagttttaagaattcagaggctgaaaacagcaatcctacttgggatgtcgtcatgcttacttcagcctgaatcacacagaagaaagccttcaagcatggacctgaagcaatgctgtaaacacaaacatcaaaaggaagaggaggccaggtgtggtggctcacgcatgtaatcccagcactttgggaagcggaggcaggtggatcacctgaggtcaggaattcagatcagctggccaacatggtgaancctgtttctgtaaaaaaaaaaaattaaattttaaattcccaaaaaaaaaaaaaaaaatttgggggcgcggccgaaacttttaaacctttggcgcggcccagaagaaaggtaagccaaaacggcaaggggcccaaaaccgggccgtcaaaccggggggtgtaaaggcacacgg

SEQ ID NO: 58363 - DNA, 2189 bp, Homo sapiens
ggcgccctccctgcgccgggggcgggagcccagcgagcgcagagccccggccccgcgcggcccgagtgccacatcactgcgctggccgtccaaggtccgccgccccaccatgccgcccccgccgccgctgctgctccttacagtcctggtcgtcgccgctgcccggccggggtgcgagtttgagcggaaccccgccgccacctgcgtggacctgcagctcaggacctgcagcgatgccgcctacaaccacaccaccttccccaacctgcttcagcaccggtcgtgggaggtggtggaggccagctccgagtacatcctgctgagcgttctacaccagctcctggaaggccagtgcaacccggacctgcggctgctgggctgtgctgtgctggccccccggtgtgagggcggctgggtgcgcagaccctgccggcacatctgcgagggcctgcgggaggtctgccagcccgccttcgacgccattgacatggcctggccctacttccttgactgccaccgctacttcacgagagaggacgagggctgctatgacccgctggagaagcttcggggaggcctggaggctgacgaggcactgccctcagggctgccgcccaccttcatccgcttcagccaccactcctacgcccagatggtgcgtgtgctgaggcggacggcctcccgctgcgcccacgtggccaggacctacagcatcgggcgcagcttcgacggcagggagctgctggtcatcgagttctccagccgccccggccagcacgagctgatggagcccgaggtgaagctcatcggcaacattcatggcaacgaggtggcgggccgggagatgctcatctacctagcccagtacctgtgctctgagtacctgcttggtaacccccgcatccagcgcctgctcaacaccacccgcatccacctgctgccctccatgaaccctgacggctatgaggtggcagctgccgagggtgccggctacaacgggtggacgagcgggaggcagaacgcgcagaacctggatctgaaccgaaatttcccggacctgacgtccgagtactaccggctggcggagacccgcggcgcacgcagcgaccacatccccatcccccagcactactggtggggtaaggtggccccggagacaaaggcaatcatgaagtggatgcagaccataccctttgtgctctcagccagccttcatgggggcgacctggtggtgtcctaccccttcgacttctccaagcacccccaggaggagaagatgttttctcccacgcccgacgagaagatgttcaagctgctgtccagagcctacgctgacgtccaccccatgatgatggacaggtcggagaataggtgtggaggcaatttcctgaagagggggagcatcatcaacggggcggactggtacagcttcacgggaggcatgtccgacttcaactacctgcacaccaactgctttgagatcacggtagagctgggctgtgtgaagttcccccccgaggaggccctgtacacactctggcagcacaacaaggagtcactcctgaatttcgtggagacggtgcaccggggcatcaaaggtgtggtgacagataaattcggcaagccagtcaaaaacgcccggatctcagtcaaaggcattcgccacgacatcaccacagccccagatggtgactactggagactgctgcccccaggtatccacattgtcattgcccaagcccctggctacgccaaagtcatcaagaaagtcatcatccccgcccggatgaagagggctggccgtgtggacttcattctgcaacctctggggatgggacccaagaactttattcatgggctgcggaggactgggccccacgacccgctgggaggtgccagctctttgggggaggccacggagcccgacccgctccgggcgcgcaggcagccctcggccgacgggagtaagccctggtggtggtcctacttcacatcgctgagcacccacaggccacgctggctgctcaagtactagccccggccccagcacccgccaggatgtggagaccgaggcccatctccgcatcccgggctcctggctcttgattttgtctgccacagacatcccacaaagccgctgccattttattaaagtgttttgatccactttccactggaaaaaaaaaaac

SEQ ID NO: 58364 - DNA, 2222 bp, Homo sapiens
ggcgccctccctgcgccgggggcgggagcccagcgagcgcagagccccggccccgcgcggcccgagtgccacatcactgcgctggccgtccaaggtccgccgccccaccatgccgcccccgccgccgctgctgctccttacagtcctggtcgtcgccgctgcccggccggggtgcgagtttgagcggaaccccgccggtgaatgccacaggccaccagctgcagacagcgccacctgcgtggacctgcagctcaggacctgcagcgatgccgcctacaaccacaccaccttccccaacctgcttcagcaccggtcgtgggaggtggtggaggccagctccgagtacatcctgctgagcgttctacaccagctcctggaaggccagtgcaacccggacctgcggctgctgggctgtgctgtgctggccccccggtgtgagggcggctgggtgcgcagaccctgccggcacatctgcgagggcctgcgggaggtctgccagcccgccttcgacgccattgacatggcctggccctacttccttgactgccaccgctacttcacgagagaggacgagggctgctatgacccgctggagaagcttcggggaggcctggaggctgacgaggcactgccctcagggctgccgcccaccttcatccgcttcagccaccactcctacgcccagatggtgcgtgtgctgaggcggacggcctcccgctgcgcccacgtggccaggacctacagcatcgggcgcagcttcgacggcagggagctgctggtcatcgagttctccagccgccccggccagcacgagctgatggagcccgaggtgaagctcatcggcaacattcatggcaacgaggtggcgggccgggagatgctcatctacctagcccagtacctgtgctctgagtacctgcttggtaacccccgcatccagcgcctgctcaacaccacccgcatccacctgctgccctccatgaaccctgacggctatgaggtggcagctgccgagggtgccggctacaacgggtggacgagcgggaggcagaacgcgcagaacctggatctgaaccgaaatttcccggacctgacgtccgagtactaccggctggcggagacccgcggcgcacgcagcgaccacatccccatcccccagcactactggtggggtaaggtggccccggagacaaaggcaatcatgaagtggatgcagaccataccctttgtgctctcagccagccttcatgggggcgacctggtggtgtcctaccccttcgacttctccaagcacccccaggaggagaagatgttttctcccacgcccgacgagaagatgttcaagctgctgtccagagcctacgctgacgtccaccccatgatgatggacaggtcggagaataggtgtggaggcaatttcctgaagagggggagcatcatcaacggggcggactggtacagcttcacgggaggcatgtccgacttcaactacctgcacaccaactgctttgagatcacggtagagctgggctgtgtgaagttcccccccgaggaggccctgtacacactctggcagcacaacaaggagtcactcctgaatttcgtggagacggtgcaccggggcatcaaaggtgtggtgacagataaattcggcaagccagtcaaaaacgcccggatctcagtcaaaggcattcgccacgacatcaccacagccccagatggtgactactggagactgctgcccccaggtatccacattgtcattgcccaagcccctggctacgccaaagtcatcaagaaagtcatcatccccgcccggatgaagagggctggccgtgtggacttcattctgcaacctctggggatgggacccaagaactttattcatgggctgcggaggactgggccccacgacccgctgggaggtgccagctctttgggggaggccacggagcccgacccgctccgggcgcgcaggcagccctcggccgacgggagtaagccctggtggtggtcctacttcacatcgctgagcacccacaggccacgctggctgctcaagtactagccccggccccagcacccgccaggatgtggagaccgaggcccatctccgcatcccgggctcctggctcttgattttgtctgccacagacatcccacaaagccgctgccattttattaaagtgttttgatccactttccactggaaaaaaaaaaac

SEQ ID NO: 58365 - DNA, 2508 bp, Homo sapiens
ggcgccctccctgcgccgggggcgggagcccagcgagcgcagagccccggccccgcgcggcccgagtgccacatcactgcgctggccgtccaaggtccgccgccccaccatgccgcccccgccgccgctgctgctccttacagtcctggtcgtcgccgctgcccggccggggtgcgagtttgagcggaaccccgccggtgaatgccacaggccaccagctgcagacagcggtacagtaccgggacctccctggcttctgttctgtaggagggctgcagcccccacactgtcagagcactttaggcagctgaatccgtgatttcagaagctctgattcctgcacagtagctgttgtcctggtcctcccctgccagaccgtgggtgcccctccctgcaggccctggccctgcgtggggtcccctacgtaaatgtctgacgcgtcacggtcagggccactgcgggagggactgacctgccgaccctgcctccccagccacctgcgtggacctgcagctcaggacctgcagcgatgccgcctacaaccacaccaccttccccaacctgcttcagcaccggtcgtgggaggtggtggaggccagctccgagtacatcctgctgagcgttctacaccagctcctggaaggccagtgcaacccggacctgcggctgctgggctgtgctgtgctggccccccggtgtgagggcggctgggtgcgcagaccctgccggcacatctgcgagggcctgcgggaggtctgccagcccgccttcgacgccattgacatggcctggccctacttccttgactgccaccgctacttcacgagagaggacgagggctgctatgacccgctggagaagcttcggggaggcctggaggctgacgaggcactgccctcagggctgccgcccaccttcatccgcttcagccaccactcctacgcccagatggtgcgtgtgctgaggcggacggcctcccgctgcgcccacgtggccaggacctacagcatcgggcgcagcttcgacggcagggagctgctggtcatcgagttctccagccgccccggccagcacgagctgatggagcccgaggtgaagctcatcggcaacattcatggcaacgaggtggcgggccgggagatgctcatctacctagcccagtacctgtgctctgagtacctgcttggtaacccccgcatccagcgcctgctcaacaccacccgcatccacctgctgccctccatgaaccctgacggctatgaggtggcagctgccgagtcgggggttggccatgttttcagggtgccggctacaacgggtggacgagcgggaggcagaacgcgcagaacctggatctgaaccgaaatttcccggacctgacgtccgagtactaccggctggcggagacccgcggcgcacgcagcgaccacatccccatcccccagcactactggtggggtaaggtggccccggagacaaaggcaatcatgaagtggatgcagaccataccctttgtgctctcagccagccttcatgggggcgacctggtggtgtcctaccccttcgacttctccaagcacccccaggaggagaagatgttttctcccacgcccgacgagaagatgttcaagctgctgtccagagcctacgctgacgtccaccccatgatgatggacaggtcggagaataggtgtggaggcaatttcctgaagagggggagcatcatcaacggggcggactggtacagcttcacgggaggcatgtccgacttcaactacctgcacaccaactgctttgagatcacggtagagctgggctgtgtgaagttcccccccgaggaggccctgtacacactctggcagcacaacaaggagtcactcctgaatttcgtggagacggtgcaccggggcatcaaaggtgtggtgacagataaattcggcaagccagtcaaaaacgcccggatctcagtcaaaggcattcgccacgacatcaccacagccccagatggtgactactggagactgctgcccccaggtatccacattgtcattgcccaagcccctggctacgccaaagtcatcaagaaagtcatcatccccgcccggatgaagagggctggccgtgtggacttcattctgcaacctctggggatgggacccaagaactttattcatgggctgcggaggactgggccccacgacccgctgggaggtgccagctctttgggggaggccacggagcccgacccgctccgggcgcgcaggcagccctcggccgacgggagtaagccctggtggtggtcctacttcacatcgctgagcacccacaggccacgctggctgctcaagtactagccccggccccagcacccgccaggatgtggagaccgaggcccatctccgcatcccgggctcctggctcttgattttgtctgccacagacatcccacaaagccgctgccattttattaaagtgttttgatccactttccactggaaaaaaaaaaac

SEQ ID NO: 58366 - DNA, 2695 bp, Homo sapiens
cagcggctgcggggacacagtcagctcccgacggggctggagggccctgctaggctgatgagggccttaaagatggggcttttggagctaaacaaacagctgtgatgaggaagcaggaaggtgcccagcaacaatgaggaccctaccctctgcctgggcttacggcatccctgcgagctgcagagcagagatgagccggctgagccgcatctgtcattatccacttctcatccaagtcctgagccccaactgacccattagggtccccaaagacactagacgcccaaagcaggatgtgtcttttgggacgtctttgtgctgcggctgtggctcctgggtggtctgtgcctgtccctgcctaatgcagcatcagctggctgccttcacgggcccttgtgtggcacagctgctttgcagatggagacgccgaggctcagggcagcctgctgcggctggcttgctggtgggtagttgaatctggttggtcttaggctcctcctctggtctctcacaggctctgattcctgcacagtagctgttgtcctggtcctcccctgccagaccgtgggtgcccctccctgcaggccctggccctgcgtggggtcccctacgtaaatgtctgacgcgtcacggtcagggccactgcgggagggactgacctgccgaccctgcctccccagccacctgcgtggacctgcagctcaggacctgcagcgatgccgcctacaaccacaccaccttccccaacctgcttcagcaccggtcgtgggaggtggtggaggccagctccgagtacatcctgctgagcgttctacaccagctcctggaaggccagtgcaacccggacctgcggctgctgggctgtgctgtgctggccccccggtgtgagggcggctgggtgcgcagaccctgccggcacatctgcgagggcctgcgggaggtctgccagcccgccttcgacgccattgacatggcctggccctacttccttgactgccaccgctacttcacgagagaggacgagggctgctatgacccgctggagaagcttcggggaggcctggaggctgacgaggcactgccctcagggctgccgcccaccttcatccgcttcagccaccactcctacgcccagatggtgcgtgtgctgaggcggacggcctcccgctgcgcccacgtggccaggacctacagcatcgggcgcagcttcgacggcagggagctgctggtcatcgagttctccagccgccccggccagcacgagctgatggagcccgaggtgaagctcatcggcaacattcatggcaacgaggtggcgggccgggagatgctcatctacctagcccagtacctgtgctctgagtacctgcttggtaacccccgcatccagcgcctgctcaacaccacccgcatccacctgctgccctccatgaaccctgacggctatgaggtggcagctgccgagtcgggggttggccatgttttcagggtgccggctacaacgggtggacgagcgggaggcagaacgcgcagaacctggatctgaaccgaaatttcccggacctgacgtccgagtactaccggctggcggagacccgcggcgcacgcagcgaccacatccccatcccccagcactactggtggggtaaggtggccccggagacaaaggcaatcatgaagtggatgcagaccataccctttgtgctctcagccagccttcatgggggcgacctggtggtgtcctaccccttcgacttctccaagcacccccaggaggagaagatgttttctcccacgcccgacgagaagatgttcaagctgctgtccagagcctacgctgacgtccaccccatgatgatggacaggtcggagaataggtgtggaggcaatttcctgaagagggggagcatcatcaacggggcggactggtacagcttcacgggaggcatgtccgacttcaactacctgcacaccaactgctttgagatcacggtagagctgggctgtgtgaagttcccccccgaggaggccctgtacacactctggcagcacaacaaggagtcactcctgaatttcgtggagacggtgcaccggggcatcaaaggtgtggtgacagataaattcggcaagccagtcaaaaacgcccggatctcagtcaaaggcattcgccacgacatcaccacagccccagatggtgactactggagactgctgcccccaggtatccacattgtcattgcccaagcccctggctacgccaaagtcatcaagaaagtcatcatccccgcccggatgaagagggctggccgtgtggacttcattctgcaacctctggggatgggacccaagaactttattcatgggctgcggaggactgggccccacgacccgctgggaggtgccagctctttgggggaggccacggagcccgacccgctccgggcgcgcaggcagccctcggccgacgggagtaagccctggtggtggtcctacttcacatcgctgagcacccacaggccacgctggctgctcaagtactagccccggccccagcacccgccaggatgtggagaccgaggcccatctccgcatcccgggctcctggctcttgattttgtctgccacagacatcccacaaagccgctgccattttattaaagtgttttgatccactttccactggaaaaaaaaaaac

SEQ ID NO: 58367 - DNA, 2347 bp, Homo sapiens
agtgctggtacggccggagtatgggatcggccgagtgccacatcactgcgctggccgtccaaggtccgccgccccaccatgccgcccccgccgccgctgctgctccttacagtcctggtcgtcgccgctgcccggccggggtgcgagtttgagcggaaccccgccggctctgattcctgcacagtagctgttgtcctggtcctcccctgccagaccgtgggtgcccctccctgcaggccctggccctgcgtggggtcccctacgtaaatgtctgacgcgtcacggtcagggccactgcgggagggactgacctgccgaccctgcctccccagccacctgcgtggacctgcagctcaggacctgcagcgatgccgcctacaaccacaccaccttccccaacctgcttcagcaccggtcgtgggaggtggtggaggccagctccgagtacatcctgctgagcgttctacaccagctcctggaaggccagtgcaacccggacctgcggctgctgggctgtgctgtgctggccccccggtgtgagggcggctgggtgcgcagaccctgccggcacatctgcgagggcctgcgggaggtctgccagcccgccttcgacgccattgacatggcctggccctacttccttgactgccaccgctacttcacgagagaggacgagggctgctatgacccgctggagaagcttcggggaggcctggaggctgacgaggcactgccctcagggctgccgcccaccttcatccgcttcagccaccactcctacgcccagatggtgcgtgtgctgaggcggacggcctcccgctgcgcccacgtggccaggacctacagcatcgggcgcagcttcgacggcagggagctgctggtcatcgagttctccagccgccccggccagcacgagctgatggagcccgaggtgaagctcatcggcaacattcatggcaacgaggtggcgggccgggagatgctcatctacctagcccagtacctgtgctctgagtacctgcttggtaacccccgcatccagcgcctgctcaacaccacccgcatccacctgctgccctccatgaaccctgacggctatgaggtggcagctgccgagtcgggggttggccatgttttcagggtgccggctacaacgggtggacgagcgggaggcagaacgcgcagaacctggatctgaaccgaaatttcccggacctgacgtccgagtactaccggctggcggagacccgcggcgcacgcagcgaccacatccccatcccccagcactactggtggggtaaggtggccccggagacaaaggcaatcatgaagtggatgcagaccataccctttgtgctctcagccagccttcatgggggcgacctggtggtgtcctaccccttcgacttctccaagcacccccaggaggagaagatgttttctcccacgcccgacgagaagatgttcaagctgctgtccagagcctacgctgacgtccaccccatgatgatggacaggtcggagaataggtgtggaggcaatttcctgaagagggggagcatcatcaacggggcggactggtacagcttcacgggaggcatgtccgacttcaactacctgcacaccaactgctttgagatcacggtagagctgggctgtgtgaagttcccccccgaggaggccctgtacacactctggcagcacaacaaggagtcactcctgaatttcgtggagacggtgcaccggggcatcaaaggtgtggtgacagataaattcggcaagccagtcaaaaacgcccggatctcagtcaaaggcattcgccacgacatcaccacagccccagatggtgactactggagactgctgcccccaggtatccacattgtcattgcccaagcccctggctacgccaaagtcatcaagaaagtcatcatccccgcccggatgaagagggctggccgtgtggacttcattctgcaacctctggggatgggacccaagaactttattcatgggctgcggaggactgggccccacgacccgctgggaggtgccagctctttgggggaggccacggagcccgacccgctccgggcgcgcaggcagccctcggccgacgggagtaagccctggtggtggtcctacttcacatcgctgagcacccacaggccacgctggctgctcaagtactagccccggccccagcacccgccaggatgtggagaccgaggcccatctccgcatcccgggctcctggctcttgattttgtctgccacagacatcccacaaagccgctgccattttattaaagtgttttgatccactttccactggaaaaaaaaaaac

SEQ ID NO: 58368 - DNA, 2329 bp, Homo sapiens
ggcgccctccctgcgccgggggcgggagcccagcgagcgcagagccccggccccgcgcggcccgagtgccacatcactgcgctggccgtccaaggtccgccgccccaccatgccgcccccgccgccgctgctgctccttacagtcctggtcgtcgccgctgcccggccggggtgcgagtttgagcggaaccccgccggtgaatgccacaggccaccagctgcagacagcgccacctgcgtggacctgcagctcaggacctgcagcgatgccgcctacaaccacaccaccttccccaacctgcttcagcaccggtcgtgggaggtggtggaggccagctccgagtacatcctgctgagcgttctacaccagctcctggaaggccagtgcaacccggacctgcggctgctgggctgtgctgtgctggccccccggtgtgagggcggctgggtgcgcagaccctgccggcacatctgcgagggcctgcgggaggtctgccagcccgccttcgacgccattgacatggcctggccctacttccttgactgccaccgctacttcacgagagaggacgagggctgctatgacccgctggagaagcttcggggaggcctggaggctgacgaggcactgccctcagggctgccgcccaccttcatccgcttcagccaccactcctacgcccagatggtgcgtgtgctgaggcggacggcctcccgctgcgcccacgtggccaggacctacagcatcgggcgcagcttcgacggcagggagctgctggtcatcgagttctccagccgccccggccagcacgagctgatggagcccgaggtgaagctcatcggcaacattcatggcaacgaggtggcgggccgggagatgctcatctacctagcccagtacctgtgctctgagtacctgcttggtaacccccgcatccagcgcctgctcaacaccacccgcatccacctgctgccctccatgaaccctgacggctatgaggtggcagctgccgagggtgccggctacaacgggtggacgagcgggaggcagaacgcgcagaacctggatctgaaccgaaatttcccggacctgacgtccgagtactaccggctggcggagacccgcggcgcacgcagcgaccacatccccatcccccagcactactggtggggtaaggtggccccggagacaaaggcaatcatgaagtggatgcagaccataccctttgtgctctcagccagccttcatgggggcgacctggtggtgtcctaccccttcgacttctccaagcacccccaggaggagaagatgttttctcccacgcccgacgagaagagggagccccctcctcagcacagacctgtcctgcttggtggggccctgatgagctcatgcagggtgagcccttcgcctgcctgacccaccaggagcctctgcccaagatgttcaagctgctgtccagagcctacgctgacgtccaccccatgatgatggacaggtcggagaataggtgtggaggcaatttcctgaagagggggagcatcatcaacggggcggactggtacagcttcacgggaggcatgtccgacttcaactacctgcacaccaactgctttgagatcacggtagagctgggctgtgtgaagttcccccccgaggaggccctgtacacactctggcagcacaacaaggagtcactcctgaatttcgtggagacggtgcaccggggcatcaaaggtgtggtgacagataaattcggcaagccagtcaaaaacgcccggatctcagtcaaaggcattcgccacgacatcaccacagccccagatggtgactactggagactgctgcccccaggtatccacattgtcattgcccaagcccctggctacgccaaagtcatcaagaaagtcatcatccccgcccggatgaagagggctggccgtgtggacttcattctgcaacctctggggatgggacccaagaactttattcatgggctgcggaggactgggccccacgacccgctgggaggtgccagctctttgggggaggccacggagcccgacccgctccgggcgcgcaggcagccctcggccgacgggagtaagccctggtggtggtcctacttcacatcgctgagcacccacaggccacgctggctgctcaagtactagccccggccccagcacccgccaggatgtggagaccgaggcccatctccgcatcccgggctcctggctcttgattttgtctgccacagacatcccacaaagccgctgccattttattaaagtgttttgatccactttccactggaaaaaaaaaaac

SEQ ID NO: 58369 - DNA, 2204 bp, Homo sapiens
ggcgccctccctgcgccgggggcgggagcccagcgagcgcagagccccggccccgcgcggcccgagtgccacatcactgcgctggccgtccaaggtccgccgccccaccatgccgcccccgccgccgctgctgctccttacagtcctggtcgtcgccgctgcccggccggggtgcgagtttgagcggaaccccgccggtgaatgccacaggccaccagctgcagacagcgccacctgcgtggacctgcagctcaggacctgcagcgatgccgcctacaaccacaccaccttccccaacctgcttcagcaccggtcgtgggaggtggtggaggccagctccgagtacatcctgctgagcgttctacaccagctcctggaaggccagtgcaacccggacctgcggctgctgggctgtgctgtgctggccccccggtgtgagggcggctgggtgcgcagaccctgccggcacatctgcgagggcctgcgggaggtctgccagcccgccttcgacgccattgacatggcctggccctacttccttgactgccaccgctacttcacgagagaggacgagggctgctatgacccgctggagaagcttcggggaggcctggaggctgacgaggcactgccctcagggctgccgcccaccttcatccgcttcagccaccactcctacgcccagatggtgcgtgtgctgaggcggacggcctcccgctgcgcccacgtggccaggacctacagcatcgggcgcagcttcgacggcagggagctgctggtcatcgagttctccagccgccccggccagcacgagctgatggagcccgaggtgaagctcatcggcaacattcatggcaacgaggtggcgggccgggagatgctcatctacctagcccagtacctgtgctctgagtacctgcttggtaacccccgcatccagcgcctgctcaacaccacccgcatccacctgctgccctccatgaaccctgacggctatgaggtggcagctgccgagggtgccggctacaacgggtggacgagcgggaggcagaacgcgcagaacctggatctgaaccgaaatttcccggacctgacgtccgagtactaccggctggcggagacccgcggcgcacgcagcgaccacatccccatcccccagcactactggtggggtaaggtggccccggagacaaaggcaatcatgaagtggatgcagaccataccctttgtgctctcagccagccttcatgggggcgacctggtggtgtcctaccccttcgacttctccaagcacccccaggaggagaagatgttttctcccacgcccgacgagaagatgttcaagctgctgtccagagcctacgctgacgtccaccccatgatgatggacaggtcggagaataggtgtggaggcaatttcctgaagagggggagcatcatcaacggggcggactggtacagcttcacgggaggcatgtccgacttcaactacctgcacaccaactgctttgagatcacggtagagctgggctgtgtgaagttcccccccgaggaggccctgtacacactctggcagcacaacaaggagtcactcctgaatttcgtggagacggtgcaccggggcatcaaaggtgtggtgacagataaattcggcaagccagtcaaaaacgcccggatctcagtcaaaggcattcgccacgacatcaccacagccccagatggtgactactggagactgctgcccccaggtatccacattgtcattgcccaagcccctggctacgccaaagtcatcaagaaagtcatcatccccgcccggatgaagagggctggccgtgtggacttcattctgcaacctctggggatgggacccaagaactttattcatgggctgcggaggactgggccccacgacccgctgggaggtgccagctctttgggggaggccacggagcccgacccgctccgggcgcgcaggcagccctcggccgacgggagtaagccctggtggtggtcctacttcacatcgctgagcacccacaggccacgctggctgctcaagtactagccccggccccagcacccgccaggatgtggagaccgaggcccatctccgcatcccgggctcctggctcttgattttgtctgccacagactgacccaaacacgcattccacagccagttgacctgtggcgatcctctg

SEQ ID NO: 58370 - DNA, 758 bp, Homo sapiens
gtctgggtaaatggacattgtcaccatggggtctccaggccagcagctgggatgccaggggcctgtgcggctgccccgtgctgtgggcttttctgttagaaaccgattcatccctgacctcaccagagacagcatgggggtggggaagcctgtggactttgccgccaagcggcctgagctcaagatgcagctctgcctcttcccattgcgggacccttaaatgcctcatgccgccatctgcggatctgcaaagtggggatcatatggtccaccttgcagttgttcagcccctcagctgcaggaggggcgtctgtggcgagtacctgctgcactcacctgcctgctgggcacttggctgacaccccgacgtcccggctgtctctgcgcggctgacaccccggcgtcccggctgtctctgtgcggctgacacccctgacgtcccggctgtctctgtgcggctgacacccctgacgtccccgctgtctctgtgccacaggcatgtccgacttcaactacctgcacaccaactgctttgagatcacggtagagctgggctgtgtgaagttcccccccgaggaggccctgtacacactctggcagcacaacaaggagtcactcctgaatttcgtggagacggtgagttctgacggtctcagggctctggtccagctgtggcctgggtggggtgggtcacattcaggcccccagggcagcccccgtagcctcactgccccatacacacatgctccttttgccac

SEQ ID NO: 58371 - DNA, 517 bp, Homo sapiens
atcacatgggctaaattagggggtggcaaactttttctgtaaaaggtcagatagtaaatatttcaggctttgtgggacacatacaatctataatacacaaagtagtagtattagttcttcttctttctcttcttcatcaaatctctttaaaaatataaaagtcattcctggctcaaaggccatacaaaaataagctgtgggttggacttggacccaggctgcaatttgctaccatcctccacagttatctcatctctccattagaggaacctctgtcatagatactattccctcccattaaaaagattaggaaacaggctctgaaaaatcaagtgaaaatatttgaggtcatatagctcagaggtggcaatgcttggatttcagacctttggacttcgtatccagttctcacttctctctatcctagcacctccattaaagcagtggctctcagctactaggggcagttttcctccacagaggaaatatggaaatgtctggagatgtttttgatatt

SEQ ID NO: 58372 - DNA, 329 bp, Homo sapiens
cacctcgcgaatcaggtcgctcgcgaatcaggtcggtcgcgaatcaggtggcgggggatatgctgcccaactccaccgagcgggccatcaccatcgctggcgtgccgcagtctgtcaccgagtgtgtcaagcagatttgcctggtcatgctggagacgctctcccagtctccgcaagggagagtcatgaccattccgtaccagcccatgccggccagctccccagtcatctgcgcgggcggccaagatcggtgcagcggtcctcgatacccagccatattgagcagctactccggcacagttgcggacacaaagctggtgtccctggtt

SEQ ID NO: 58373 - DNA, 143 bp, Homo sapiens
aattcaagcttctaacgatgtacggggtcatgaattttatttctgtttgtcgataagaaatgtaagagtggaatgttaataaatttcagtttagttctgtaatgtcaagaatttaagaattaaaaaacggattggttaaaaaa

SEQ ID NO: 58374 - DNA, 1520 bp, Homo sapiens
tggaatatgaccctggttagacggtgtcctcgtcgggttgtcgaccagcgtcgtgacacgtaacgagcccaatcgaacggcccggctcgagagctcgccatggatgccggtgtgactgaaagtggactaaatgtgactctcaccattcggcttcttatgcacggaaaggaagtaggaagcatcattgggaagaaaggggagtcggttaagaggatccgcgaggagagtggcgcgcggatcaacatctcggaggggaattgtccggagagaatcatcactctgaccggccccaccaatgccatctttaaggctttcgctatgatcatcgacaagctggaggaagatatcaacagctccatgaccaacagtaccgcggccagcaggcccccggtcaccctgaggctggtggtgccggccacccagtgcggctccctgattgggaaaggcgggtgtaagatcaaagagatccgcgagagtacgggggcgcaggtccaggtggcgggggatatgctgcccaactccaccgagcgggccatcaccatcgctggcgtgccgcagtctgtcaccgagtgtgtcaagcagatttgcctggtcatgctggagacgctctcccagtctccgcaagggagagtcatgaccattccgtaccagcccatgccggccagctccccagtcatctgcgcgggcggccaagatcggtgcagcgacgctgcgggctacccccatgccacccatgacctggagggaccacctctagatgcctactcgattcaaggacaacacaccatttctccgctcgatctggccaagctgaaccaggtggcaagacaacagtctcactttgccatgatgcacggcgggaccggattcgccggaattgactccagctctccagaggtgaaaggctattgggcaagtttggatgcatctactcaaaccacccatgaactcaccattccaaataacttaattggctgcataatcgggcgccaaggcgccaacattaatgagatccgccagatgtccggggcccagatcaaaattgccaacccagtggaaggctcctctggtaggcaggttactatcactggctctgctgccagtattagtctggcccagtatctaatcaatgccaggctttcctctgagaagggcatggggtgcagctagaacagtgtaggttccctcaataacccctttctgctgttctcccatgatccaactgtgtaatttctggtcagtgattccaggttttaaataatttgtaagtgttcagtttctacacaactttatcatccgctaagaatttaaaaatcacattctctgttcagctgttaatgctgggatccatatttagttttataagcttttccctgtttttagttttgttttgggttttttggctcatgaattttatttctgtttgtcgataagaaatgtaagagtggaatgttaataaatttcagtttagttctgtaatgtcaagaatttaagaattaaaaaacggattggttaaaaaa

SEQ ID NO: 58375 - DNA, 2489 bp, Homo sapiens
  misc_feature (27)..(27): n is a, c, g, or t
  misc_feature (30)..(31): n is a, c, g, or t
  misc_feature (34)..(34): n is a, c, g, or t
  misc_feature (53)..(53): n is a, c, g, or t
ccggagtcgccaccgccgcgccctcgnccnnccncccgcccgccgctcccggncccgcacgccccctccgccgccgccgcccgcccctgcgactacgctgcggcctcccgcccgctcccgctcgctcccgcggccctcgctcgcctcgcgccggcagttttgggcctacacctcccctccccccgccagccgccaaagacttgaccacgtaacgagcccaactcccccgaacgccgcccgccgctcgccatggatgccggtgtgactgaaagtggactaaatgtgactctcaccattcggcttcttatgcacggaaaggaagtaggaagcatcattgggaagaaaggggagtcggttaagaggatccgcgaggagagtggcgcgcggatcaacatctcggaggggaattgtccggagagaatcatcactctgaccggccccaccaatgccatctttaaggctttcgctatgatcatcgacaagctggaggaagatatcaacagctccatgaccaacagtaccgcggccagcaggcccccggtcaccctgaggctggtggtgccggccacccagtgcggctccctgattgggaaaggcgggtgtaagatcaaagagatccgcgagagtacgggggcgcaggtccaggtggcgggggatatgctgcccaactccaccgagcgggccatcaccatcgctggcgtgccgcagtctgtcaccgagtgtgtcaagcagatttgcctggtcatgctggagacgctctcccagtctccgcaagggagagtcatgaccattccgtaccagcccatgccggccagctccccagtcatctgcgcgggcggccaagatcggtgcagcgacgctgcgggctacccccatgccacccatgacctggagggaccacctctagatgcctactcgattcaaggacaacacaccatttctccgctcgatctggccaagctgaaccaggtggcaagacaacagtctcactttgccatgatgcacggcgggaccggattcgccggaattgactccagctctccagaggtgaaaggctattgggcaagtttggatgcatctactcaaaccacccatgaactcaccattccaaataacttaattggctgcataatcgggcgccaaggcgccaacattaatgagatccgccagatgtccggggcccagatcaaaattgccaacccagtggaaggctcctctggtaggcaggttactatcactggctctgctgccagtattagtctggcccagtatctaatcaatgccaggctttcctctgagaagggcatggggtgcagctagaacagtgtaggttccctcaataacccctttctgctgttctcccatgatccaactgtgtaatttctggtcagtgattccaggttttaaataatttgtaagtgttcagtttctacacaactttatcatccgctaagaatttaaaaatcacattctctgttcagctgttaatgctgggatccatatttagttttataagcttttccctgtttttagttttgttttgggttttttggctcatgaattttatttctgtttgtcgataagaaatgtaagagtggaatgttaataaatttcagtttagttctgtaatgtcaagaatttaagaattaaaaaacggattggttaaaaaatgcttcatatttgaaaaagctgggaattgctgtcttaaaaaaaaaaaaaaaaaaaaaaaacaaaaacaaacaaaaaaaaaaaaaaaaaaaaaaaaaaaaaaaaacaaaccaaagaggggggcgattatgaccacctcggagggcgaaataaaagcacgacagaatatctctagaacacaaggaggacctcaaatagagccgacaccaaaacgacccccaccgccagagcgcgcggcacaaaaaacacacgagagcagaaaagaggaaaaacagacagccacgagaggaccagagacaaaacgccccacaacacacgcgaggagccacacactaggggcaccccccacatagacaacaaaacacacacaagaggcaaacatacgcaccacagaggccatagtgcgcgcacacgcaaaaagatcgcccgcgcacaaacaaacacaacaacaccaagaccacaaaacgaacaactatcaaccacggaaggaatcagtccaaaatcagaggcgagaaccacgccaacacacaacacgaacacaaacaaccaaacaggagaaggaagcacagcgagacccacagcaacaaaaaagaaacaacaacaaagaagccagaaagacaacgacgcgccgaacaagaggaccggccagcgccggagagcagagagaaggcgcggagcgaagcaacgagacgtcagaaaggaccacacgtggagccccacagggcgaccgcacccaaaagtactgcgacgcgcgagaaaccaacacacaggcgcgggagcgcacggcaaggaggcgcgcgagacgggacgtgacacgcaga

SEQ ID NO: 58376 - DNA, 1325 bp, Homo sapiens
tctgtgcgacgtactttctcccgcgaggagagtggcgcgcggatcaacatctcggaggggaattgtccggagagaatcatcactctgaccggccccaccaatgccatctttaaggctttcgctatgatcatcgacaagctggaggaagatatcaacagctccatgaccaacagtaccgcggccagcaggcccccggtcaccctgaggctggtggtgccggccacccagtgcggctccctgattgggaaaggcgggtgtaagatcaaagagatccgcgagagtacgggggcgcaggtccaggtggcgggggatatgctgcccaactccaccgagcgggccatcaccatcgctggcgtgccgcagtctgtcaccgagtgtgtcaagcagatttgcctggtcatgctggagacgctctcccagtctccgcaagggagagtcatgaccattccgtaccagcccatgccggccagctccccagtcatctgcgcgggcggccaagatcggtgcagcgacgctgcgggctacccccatgccacccatgacctggagggaccacctctagatgcctactcgattcaaggacaacacaccatttctccgctcgatctggccaagctgaaccaggtggcaagacaacagtctcactttgccatgatgcacggcgggaccggattcgccggaattgactccagctctccagaggtgaaaggctattgggcaagtttggatgcatctactcaaaccacccatgaactcaccattccaaataacttaattggctgcataatcgggcgccaaggcgccaacattaatgagatccgccagatgtccggggcccagatcaaaattgccaacccagtggaaggctcctctggtaggcaggttactatcactggctctgctgccagtattagtctggcccagtatctaatcaatgccaggctttcctctgagaagggcatggggtgcagctagaacagtgtaggttccctcaataacccctttctgctgttctcccatgatccaactgtgtaatttctggtcagtgattccaggttttaaataatttgtaagtgttcagtttctacacaactttatcatccgctaagaatttaaaaatcacattctctgttcagctgttaatgctgggatccatatttagttttataagcttttccctgtttttagttttgttttgggttttttggctcatgaattttatttctgtttgtcgataagaaatgtaagagtggaatgttaataaatttcagtttagttctgtaatgtcaagaatttaagaattaaaaaacggattggttaaaaaa

SEQ ID NO: 58377 - DNA, 1274 bp, Homo sapiens
atcaacatctcagagtgatgattctccatcactctgaccggccccaccaatgccatctttaaggctttcgctatgatcatcgacaagctggaggaagatatcaacagctccatgaccaacagtaccgcggccagcaggcccccggtcaccctgaggctggtggtgccggccacccagtgcggctccctgattgggaaaggcgggtgtaagatcaaagagatccgcgagagtacgggggcgcaggtccaggtggcgggggatatgctgcccaactccaccgagcgggccatcaccatcgctggcgtgccgcagtctgtcaccgagtgtgtcaagcagatttgcctggtcatgctggagacgctctcccagtctccgcaagggagagtcatgaccattccgtaccagcccatgccggccagctccccagtcatctgcgcgggcggccaagatcggtgcagcgacgctgcgggctacccccatgccacccatgacctggagggaccacctctagatgcctactcgattcaaggacaacacaccatttctccgctcgatctggccaagctgaaccaggtggcaagacaacagtctcactttgccatgatgcacggcgggaccggattcgccggaattgactccagctctccagaggtgaaaggctattgggcaagtttggatgcatctactcaaaccacccatgaactcaccattccaaataacttaattggctgcataatcgggcgccaaggcgccaacattaatgagatccgccagatgtccggggcccagatcaaaattgccaacccagtggaaggctcctctggtaggcaggttactatcactggctctgctgccagtattagtctggcccagtatctaatcaatgccaggctttcctctgagaagggcatggggtgcagctagaacagtgtaggttccctcaataacccctttctgctgttctcccatgatccaactgtgtaatttctggtcagtgattccaggttttaaataatttgtaagtgttcagtttctacacaactttatcatccgctaagaatttaaaaatcacattctctgttcagctgttaatgctgggatccatatttagttttataagcttttccctgtttttagttttgttttgggttttttggctcatgaattttatttctgtttgtcgataagaaatgtaagagtggaatgttaataaatttcagtttagttctgtaatgtcaagaatttaagaattaaaaaacggattggttaaaaaa

SEQ ID NO: 58378 - DNA, 1320 bp, Homo sapiens
attcactgaaaattctcaagttagtatgataataatctgaaacaagtttttaaacccttttcacttttcacacatcactctgaccggccccaccaatgccatctttaaggctttcgctatgatcatcgacaagctggaggaagatatcaacagctccatgaccaacagtaccgcggccagcaggcccccggtcaccctgaggctggtggtgccggccacccagtgcggctccctgattgggaaaggcgggtgtaagatcaaagagatccgcgagagtacgggggcgcaggtccaggtggcgggggatatgctgcccaactccaccgagcgggccatcaccatcgctggcgtgccgcagtctgtcaccgagtgtgtcaagcagatttgcctggtcatgctggagacgctctcccagtctccgcaagggagagtcatgaccattccgtaccagcccatgccggccagctccccagtcatctgcgcgggcggccaagatcggtgcagcgacgctgcgggctacccccatgccacccatgacctggagggaccacctctagatgcctactcgattcaaggacaacacaccatttctccgctcgatctggccaagctgaaccaggtggcaagacaacagtctcactttgccatgatgcacggcgggaccggattcgccggaattgactccagctctccagaggtgaaaggctattgggcaagtttggatgcatctactcaaaccacccatgaactcaccattccaaataacttaattggctgcataatcgggcgccaaggcgccaacattaatgagatccgccagatgtccggggcccagatcaaaattgccaacccagtggaaggctcctctggtaggcaggttactatcactggctctgctgccagtattagtctggcccagtatctaatcaatgccaggctttcctctgagaagggcatggggtgcagctagaacagtgtaggttccctcaataacccctttctgctgttctcccatgatccaactgtgtaatttctggtcagtgattccaggttttaaataatttgtaagtgttcagtttctacacaactttatcatccgctaagaatttaaaaatcacattctctgttcagctgttaatgctgggatccatatttagttttataagcttttccctgtttttagttttgttttgggttttttggctcatgaattttatttctgtttgtcgataagaaatgtaagagtggaatgttaataaatttcagtttagttctgtaatgtcaagaatttaagaattaaaaaacggattggttaaaaaa

SEQ ID NO: 58379 - DNA, 1103 bp, Homo sapiens
acgtctgatagcggtcggaacggttgatgcgggtgtaagatcaaagagatccgcgagagtacgggggcgcaggtccaggtggcgggggatatgctgcccaactccaccgagcgggccatcaccatcgctggcgtgccgcagtctgtcaccgagtgtgtcaagcagatttgcctggtcatgctggagacgctctcccagtctccgcaagggagagtcatgaccattccgtaccagcccatgccggccagctccccagtcatctgcgcgggcggccaagatcggtgcagcgacgctgcgggctacccccatgccacccatgacctggagggaccacctctagatgcctactcgattcaaggacaacacaccatttctccgctcgatctggccaagctgaaccaggtggcaagacaacagtctcactttgccatgatgcacggcgggaccggattcgccggaattgactccagctctccagaggtgaaaggctattgggcaagtttggatgcatctactcaaaccacccatgaactcaccattccaaataacttaattggctgcataatcgggcgccaaggcgccaacattaatgagatccgccagatgtccggggcccagatcaaaattgccaacccagtggaaggctcctctggtaggcaggttactatcactggctctgctgccagtattagtctggcccagtatctaatcaatgccaggctttcctctgagaagggcatggggtgcagctagaacagtgtaggttccctcaataacccctttctgctgttctcccatgatccaactgtgtaatttctggtcagtgattccaggttttaaataatttgtaagtgttcagtttctacacaactttatcatccgctaagaatttaaaaatcacattctctgttcagctgttaatgctgggatccatatttagttttataagcttttccctgtttttagttttgttttgggttttttggctcatgaattttatttctgtttgtcgataagaaatgtaagagtggaatgttaataaatttcagtttagttctgtaatgtcaagaatttaagaattaaaaaacggattggttaaaaaa

SEQ ID NO: 58380 - DNA, 1084 bp, Homo sapiens
ggcagcatatccccgccacctggacctgcgcccgctcggtggagttgggcagcatatcccccgcacctggacctgcgcccaactccaccgagcgggccatcaccatcgctggcgtgccgcagtctgtcaccgagtgtgtcaagcagatttgcctggtcatgctggagacgctctcccagtctccgcaagggagagtcatgaccattccgtaccagcccatgccggccagctccccagtcatctgcgcgggcggccaagatcggtgcagcgacgctgcgggctacccccatgccacccatgacctggagggaccacctctagatgcctactcgattcaaggacaacacaccatttctccgctcgatctggccaagctgaaccaggtggcaagacaacagtctcactttgccatgatgcacggcgggaccggattcgccggaattgactccagctctccagaggtgaaaggctattgggcaagtttggatgcatctactcaaaccacccatgaactcaccattccaaataacttaattggctgcataatcgggcgccaaggcgccaacattaatgagatccgccagatgtccggggcccagatcaaaattgccaacccagtggaaggctcctctggtaggcaggttactatcactggctctgctgccagtattagtctggcccagtatctaatcaatgccaggctttcctctgagaagggcatggggtgcagctagaacagtgtaggttccctcaataacccctttctgctgttctcccatgatccaactgtgtaatttctggtcagtgattccaggttttaaataatttgtaagtgttcagtttctacacaactttatcatccgctaagaatttaaaaatcacattctctgttcagctgttaatgctgggatccatatttagttttataagcttttccctgtttttagttttgttttgggttttttggctcatgaattttatttctgtttgtcgataagaaatgtaagagtggaatgttaataaatttcagtttagttctgtaatgtcaagaatttaagaattaaaaaacggattggttaaaaaa

SEQ ID NO: 58381 - DNA, 2451 bp, Homo sapiens
  misc_feature (27)..(27): n is a, c, g, or t
  misc_feature (30)..(31): n is a, c, g, or t
  misc_feature (34)..(34): n is a, c, g, or t
  misc_feature (53)..(53): n is a, c, g, or t
ccggagtcgccaccgccgcgccctcgnccnnccncccgcccgccgctcccggncccgcacgccccctccgccgccgccgcccgcccctgcgactacgctgcggcctcccgcccgctcccgctcgctcccgcggccctcgctcgcctcgcgccggcagttttgggcctacacctcccctccccccgccagccgccaaagacttgaccacgtaacgagcccaactcccccgaacgccgcccgccgctcgccatggatgccggtgtgactgaaagtggactaaatgtgactctcaccattcggcttcttatgcacggaaaggaagtaggaagcatcattgggaagaaaggggagtcggttaagaggatccgcgaggagagtggcgcgcggatcaacatctcggaggggaattgtccggagagaatcatcactctgaccggccccaccaatgccatctttaaggctttcgctatgatcatcgacaagctggaggaagatatcaacagctccatgaccaacagtaccgcggccagcaggcccccggtcaccctgaggctggtggtgccggccacccagtgcggctccctgattgggaaaggcgggtgtaagatcaaagagatccgcgagagtacgggggcgcaggtccaggtggcgggggatatgctgcccaactccaccgagcgggccatcaccatcgctggcgtgccgcagtctgtcaccgagtgtgtcaagcagatttgcctggtcatgctggagacgctctcccagtctccgcaagggagagtcatgaccattccgtaccagcccatgccggccagctccccagtcatctgcgcgggcggccaagatcggtgcagcgacgctgcgggctacccccatgccacccatgacctggagggaccacctctagatgcctactcgattcaaggacaacacaccatttctccgctcgatctggccaagctgaaccaggtggcaagacaacagtctcactttgccatgatgcacggcgggaccggattcgccggaattgactccagctctccagaggtgaaaggctattgggcaagtttggatgcatctactcaaaccacccatgaactcaccattccaaataacttaattggctgcataatcgggcgccaaggcgccaacattaatgagatccgccagatgtccggggcccagatcaaaattgccaacccagtggaaggctcctctggtaggcaggttactatcactggctctgctgccagtattagtctggcccagtatctaatcaatgccaggctttcctctgagaagggcatggggtgcagctagaacagtgtaggttccctcaataacccctttctgctgttctcccatgatccaactgtgtaatttctggtcagtgattccaggttttaaataatttgtaagtgttcagtttctacacaactttatcatccgctaagaatttaaaaatcacattctctgttcagctgttaatgctgggatccatatttagttttataagcttttccctgtttttagttttgttttgggttttttggctcatgaattttatttctgtttgtcgataagaaatgtaagagtggaatgttaataaatttcagtttagttctgtaatgtcaagaatttaagaattaaaaaacggattggttaaaaaaaaaaaaaaaaaaaaaaaaaaaacaaaaacaaacaaaaaaaaaaaaaaaaaaaaaaaaaaaaaaaaacaaaccaaagaggggggcgattatgaccacctcggagggcgaaataaaagcacgacagaatatctctagaacacaaggaggacctcaaatagagccgacaccaaaacgacccccaccgccagagcgcgcggcacaaaaaacacacgagagcagaaaagaggaaaaacagacagccacgagaggaccagagacaaaacgccccacaacacacgcgaggagccacacactaggggcaccccccacatagacaacaaaacacacacaagaggcaaacatacgcaccacagaggccatagtgcgcgcacacgcaaaaagatcgcccgcgcacaaacaaacacaacaacaccaagaccacaaaacgaacaactatcaaccacggaaggaatcagtccaaaatcagaggcgagaaccacgccaacacacaacacgaacacaaacaaccaaacaggagaaggaagcacagcgagacccacagcaacaaaaaagaaacaacaacaaagaagccagaaagacaacgacgcgccgaacaagaggaccggccagcgccggagagcagagagaaggcgcggagcgaagcaacgagacgtcagaaaggaccacacgtggagccccacagggcgaccgcacccaaaagtactgcgacgcgcgagaaaccaacacacaggcgcgggagcgcacggcaaggaggcgcgcgagacgggacgtgacacgcaga

SEQ ID NO: 58382 - DNA, 1628 bp, Homo sapiens
  misc_feature (27)..(27): n is a, c, g, or t
  misc_feature (30)..(31): n is a, c, g, or t
  misc_feature (34)..(34): n is a, c, g, or t
  misc_feature (53)..(53): n is a, c, g, or t
ccggagtcgccaccgccgcgccctcgnccnnccncccgcccgccgctcccggncccgcacgccccctccgccgccgccgcccgcccctgcgactacgctgcggcctcccgcccgctcccgctcgctcccgcggccctcgctcgcctcgcgccggcagttttgggcctacacctcccctccccccgccagccgccaaagacttgaccacgtaacgagcccaactcccccgaacgccgcccgccgctcgccatggatgccggtgtgactgaaagtggactaaatgtgactctcaccattcggcttcttatgcacggaaaggaagtaggaagcatcattgggaagaaaggggagtcggttaagaggatccgcgaggagagtggcgcgcggatcaacatctcggaggggaattgtccggagagaatcatcactctgaccggccccaccaatgccatctttaaggctttcgctatgatcatcgacaagctggaggaagatatcaacagctccatgaccaacagtaccgcggccagcaggcccccggtcaccctgaggctggtggtgccggccacccagtgcggctccctgattgggaaaggcgggtgtaagatcaaagagatccgcgagagtacgggggcgcaggtccaggtggcgggggatatgctgcccaactccaccgagcgggccatcaccatcgctggcgtgccgcagtctgtcaccgagtgtgtcaagcagatttgcctggtcatgctggagacgctctcccagtctccgcaagggagagtcatgaccattccgtaccagcccatgccggccagctccccagtcatctgcgcgggcggccaagatcggtgcagcgacgctgcgggctacccccatgccacccatgacctggagggaccacctctagatgcctactcgattcaaggacaacacaccatttctccgctcgatctggccaagctgaaccaggtggcaagacaacagtctcactttgccatgatgcacggcgggaccggattcgccggaattgactccagctctccagaggtgaaaggctattgggcaagtttggatgcatctactcaaaccacccatgaactcaccattccaaataacttaattggctgcataatcgggcgccaaggcgccaacattaatgagatccgccagatgtccggggcccagatcaaaattgccaacccagtggaaggctcctctggtaggcaggttactatcactggctctgctgccagtattagtctggcccagtatctaatcaatgccaggctttcctctgagaagggcatggggtgcagctagaacagtgtaggttccctcaataacccctttctgctgttctcccatgatccaactgtgtaatttctggtcagtgattccaggttttaaataatttgtaagtgttcagtttctacacaactttatcatccgctaagaatttaaaaatcacattctctgttcagctgttaatgctgggatccatatttagttttataagcttttccctgtttttagttttgttttgggttttttggctcatgaattttatttctgtttgtcgataagaaatgtaagagtggaatgttaataaatttcagtttagttctgta

SEQ ID NO: 58383 - DNA, 1247 bp, Homo sapiens
  misc_feature (27)..(27): n is a, c, g, or t
  misc_feature (30)..(31): n is a, c, g, or t
  misc_feature (34)..(34): n is a, c, g, or t
  misc_feature (53)..(53): n is a, c, g, or t
ccggagtcgccaccgccgcgccctcgnccnnccncccgcccgccgctcccggncccgcacgccccctccgccgccgccgcccgcccctgcgactacgctgcggcctcccgcccgctcccgctcgctcccgcggccctcgctcgcctcgcgccggcagttttgggcctacacctcccctccccccgccagccgccaaagacttgaccacgtaacgagcccaactcccccgaacgccgcccgccgctcgccatggatgccggtgtgactgaaagtggactaaatgtgactctcaccgagtgtgtcaagcagatttgcctggtcatgctggagacgctctcccagtctccgcaagggagagtcatgaccattccgtaccagcccatgccggccagctccccagtcatctgcgcgggcggccaagatcggtgcagcgacgctgcgggctacccccatgccacccatgacctggagggaccacctctagatgcctactcgattcaaggacaacacaccatttctccgctcgatctggccaagctgaaccaggtggcaagacaacagtctcactttgccatgatgcacggcgggaccggattcgccggaattgactccagctctccagaggtgaaaggctattgggcaagtttggatgcatctactcaaaccacccatgaactcaccattccaaataacttaattggctgcataatcgggcgccaaggcgccaacattaatgagatccgccagatgtccggggcccagatcaaaattgccaacccagtggaaggctcctctggtaggcaggttactatcactggctctgctgccagtattagtctggcccagtatctaatcaatgccaggctttcctctgagaagggcatggggtgcagctagaacagtgtaggttccctcaataacccctttctgctgttctcccatgatccaactgtgtaatttctggtcagtgattccaggttttaaataatttgtaagtgttcagtttctacacaactttatcatccgctaagaatttaaaaatcacattctctgttcagctgttaatgctgggatccatatttagttttataagcttttccctgtttttagttttgttttgggttttttggctcatgaattttatttctgtttgtcgataagaaatgtaagagtggaatgttaataaatttcagtttagttctgtaatgtcaagaatttaagaattaaaaaacggattggttaaaaaa

SEQ ID NO: 58384 - DNA, 889 bp, Homo sapiens
gatcccccgatgagtaaatcttggtgccggccagctccccagtcatctgcgcgggcggccaagatcggtgcagcgacgctgcgggctacccccatgccacccatgacctggagggaccacctctagatgcctactcgattcaaggacaacacaccatttctccgctcgatctggccaagctgaaccaggtggcaagacaacagtctcactttgccatgatgcacggcgggaccggattcgccggaattgactccagctctccagaggtgaaaggctattgggcaagtttggatgcatctactcaaaccacccatgaactcaccattccaaataacttaattggctgcataatcgggcgccaaggcgccaacattaatgagatccgccagatgtccggggcccagatcaaaattgccaacccagtggaaggctcctctggtaggcaggttactatcactggctctgctgccagtattagtctggcccagtatctaatcaatgccaggctttcctctgagaagggcatggggtgcagctagaacagtgtaggttccctcaataacccctttctgctgttctcccatgatccaactgtgtaatttctggtcagtgattccaggttttaaataatttgtaagtgttcagtttctacacaactttatcatccgctaagaatttaaaaatcacattctctgttcagctgttaatgctgggatccatatttagttttataagcttttccctgtttttagttttgttttgggttttttggctcatgaattttatttctgtttgtcgataagaaatgtaagagtggaatgttaataaatttcagtttagttctgtaatgtcaagaatttaagaattaaaaaacggattggttaaaaaa

SEQ ID NO: 58385 - DNA, 975 bp, Homo sapiens
  misc_feature (11)..(11): n is a, c, g, or t
  misc_feature (16)..(16): n is a, c, g, or t
  misc_feature (22)..(22): n is a, c, g, or t
  misc_feature (24)..(24): n is a, c, g, or t
ggccagctccncagtnactggngngcggccggcatgggctggtacggaatggtcatgactctcccttgcggagactgggagagcgtctccagcatgaccaggcaaatctgtgccggccagctccccagtcatctgcgcgggcggccaagatcggtgcagcgacgctgcgggctacccccatgccacccatgacctggagggaccacctctagatgcctactcgattcaaggacaacacaccatttctccgctcgatctggccaagctgaaccaggtggcaagacaacagtctcactttgccatgatgcacggcgggaccggattcgccggaattgactccagctctccagaggtgaaaggctattgggcaagtttggatgcatctactcaaaccacccatgaactcaccattccaaataacttaattggctgcataatcgggcgccaaggcgccaacattaatgagatccgccagatgtccggggcccagatcaaaattgccaacccagtggaaggctcctctggtaggcaggttactatcactggctctgctgccagtattagtctggcccagtatctaatcaatgccaggctttcctctgagaagggcatggggtgcagctagaacagtgtaggttccctcaataacccctttctgctgttctcccatgatccaactgtgtaatttctggtcagtgattccaggttttaaataatttgtaagtgttcagtttctacacaactttatcatccgctaagaatttaaaaatcacattctctgttcagctgttaatgctgggatccatatttagttttataagcttttccctgtttttagttttgttttgggttttttggctcatgaattttatttctgtttgtcgataagaaatgtaagagtggaatgttaataaatttcagtttagttctgtaatgtcaagaatttaagaattaaaaaacggattggttaaaaaa

SEQ ID NO: 58386 - DNA, 961 bp, Homo sapiens
  misc_feature (11)..(11): n is a, c, g, or t
  misc_feature (16)..(16): n is a, c, g, or t
  misc_feature (22)..(22): n is a, c, g, or t
  misc_feature (24)..(24): n is a, c, g, or t
ggccagctccncagtnactggngngcggccggcatgggctggtacggaatggtcatgactctcccttgcggagactgggagagcgtctccagcatgaccaggcaaatctgcttgacacactcggtgacagactgcggcacgccagcgacgctgcgggctacccccatgccacccatgacctggagggaccacctctagatgcctactcgattcaaggacaacacaccatttctccgctcgatctggccaagctgaaccaggtggcaagacaacagtctcactttgccatgatgcacggcgggaccggattcgccggaattgactccagctctccagaggtgaaaggctattgggcaagtttggatgcatctactcaaaccacccatgaactcaccattccaaataacttaattggctgcataatcgggcgccaaggcgccaacattaatgagatccgccagatgtccggggcccagatcaaaattgccaacccagtggaaggctcctctggtaggcaggttactatcactggctctgctgccagtattagtctggcccagtatctaatcaatgccaggctttcctctgagaagggcatggggtgcagctagaacagtgtaggttccctcaataacccctttctgctgttctcccatgatccaactgtgtaatttctggtcagtgattccaggttttaaataatttgtaagtgttcagtttctacacaactttatcatccgctaagaatttaaaaatcacattctctgttcagctgttaatgctgggatccatatttagttttataagcttttccctgtttttagttttgttttgggttttttggctcatgaattttatttctgtttgtcgataagaaatgtaagagtggaatgttaataaatttcagtttagttctgtaatgtcaagaatttaagaattaaaaaacggattggttaaaaaa

SEQ ID NO: 58387 - DNA, 1694 bp, Homo sapiens
  misc_feature (27)..(27): n is a, c, g, or t
  misc_feature (30)..(31): n is a, c, g, or t
  misc_feature (34)..(34): n is a, c, g, or t
  misc_feature (53)..(53): n is a, c, g, or t
ccggagtcgccaccgccgcgccctcgnccnnccncccgcccgccgctcccggncccgcacgccccctccgccgccgccgcccgcccctgcgactacgctgcggcctcccgcccgctcccgctcgctcccgcggccctcgctcgcctcgcgccggcagttttgggcctacacctcccctccccccgccagccgccaaagacttgaccacgtaacgagcccaactcccccgaacgccgcccgccgctcgccatggatgccggtgtgactgaaagtggactaaatgtgactctcaccattcggcttcttatgcacggaaaggaagtaggaagcatcattgggaagaaaggggagtcggttaagaggatccgcgaggagagtggcgcgcggatcaacatctcggaggggaattgtccggagagaatcatcactctgaccggccccaccaatgccatctttaaggctttcgctatgatcatcgacaagctggaggaagatatcaacagctccatgaccaacagtaccgcggccagcaggcccccggtcaccctgaggctggtggtgccggccacccagtgcggctccctgattgggaaaggcgggtgtaagatcaaagagatccgcgagagtacgggggcgcaggtccaggtggcgggggatatgctgcccaactccaccgagcgggccatcaccatcgctggcgtgccgcagtctgtcaccgagtgtgtcaagcagatttgcctggtcatgctggagacgctctcccagtctccgcaagggagagtcatgaccattccgtaccagcccatgccggccagctccccagtcatctgcgcgggcggccaagatcggtgcagcgacgctgcgggctacccccatgccacccatgacctggagggaccacctctagatgcctactcgattcaaggacaacacaccatttctccgctcgatctggccaagctgaaccaggtggcaagacaacagtctcactttgccatgatgcacggcgggaccggattcgccggaattgactccagctctccagaggtgaaaggctattgggcaagtttggatgcatctactcaaaccacccatgaactcaccattccaaataacttaattggctgcataatcgggcgccaaggcgccaacattaatgagatccgccagatgtccggggcccagatcaaaattgccaacccagtggaaggctcctctggtaggcaggttactatcactggctctgctgccagtattagtctggcccagtatctaatcaatgccaggctttcctctgagaagggcatggggtgcagctagaacagtgtaggttccctcaataacccctttctgctgttctcccatgatccaactgtgtaatttctggtcagtgattccaggttttaaataatttgtaagtgttcagtttctacacaactttatcatccgctaagaatttaaaaatcacattctctgttcagctgttaatgctgggatccatatttagttttataagccctccctcccccccacccccctggagggttgccctctggggacattcggagtggggtttttatccctgtggtgagccctgagggcagaaaggatggcatgtttcaggggagggggaagccttcctctcaatttgttggcagtgagaattccaataaatgggatttgctctatgccga

SEQ ID NO: 58388 - DNA, 1619 bp, Homo sapiens
  misc_feature (27)..(27): n is a, c, g, or t
  misc_feature (30)..(31): n is a, c, g, or t
  misc_feature (34)..(34): n is a, c, g, or t
  misc_feature (53)..(53): n is a, c, g, or t
ccggagtcgccaccgccgcgccctcgnccnnccncccgcccgccgctcccggncccgcacgccccctccgccgccgccgcccgcccctgcgactacgctgcggcctcccgcccgctcccgctcgctcccgcggccctcgctcgcctcgcgccggcagttttgggcctacacctcccctccccccgccagccgccaaagacttgaccacgtaacgagcccaactcccccgaacgccgcccgccgctcgccatggatgccggtgtgactgaaagtggactaaatgtgactctcaccattcggcttcttatgcacggaaaggaagtaggaagcatcattgggaagaaaggggagtcggttaagaggatccgcgaggagagtggcgcgcggatcaacatctcggaggggaattgtccggagagaatcatcactctgaccggccccaccaatgccatctttaaggctttcgctatgatcatcgacaagctggaggaagatatcaacagctccatgaccaacagtaccgcggccagcaggcccccggtcaccctgaggctggtggtgccggccacccagtgcggctccctgattgggaaaggcgggtgtaagatcaaagagatccgcgagagtacgggggcgcaggtccaggtggcgggggatatgctgcccaactccaccgagcgggccatcaccatcgctggcgtgccgcagtctgtcaccgagtgtgtcaagcagatttgcctggtcatgctggagacgctctcccagtctccgcaagggagagtcatgaccattccgtaccagcccatgccggccagctccccagtcatctgcgcgggcggccaagatcggtgcagcgacgctgcgggctacccccatgccacccatgacctggagggaccacctctagatgcctactcgattcaaggacaacagtctcactttgccatgatgcacggcgggaccggattcgccggaattgactccagctctccagaggtgaaaggctattgggcaagtttggatgcatctactcaaaccacccatgaactcaccattccaaataacttaattggctgcataatcgggcgccaaggcgccaacattaatgagatccgccagatgtccggggcccagatcaaaattgccaacccagtggaaggctcctctggtaggcaggttactatcactggctctgctgccagtattagtctggcccagtatctaatcaatgccaggctttcctctgagaagggcatggggtgcagctagaacagtgtaggttccctcaataacccctttctgctgttctcccatgatccaactgtgtaatttctggtcagtgattccaggttttaaataatttgtaagtgttcagtttctacacaactttatcatccgctaagaatttaaaaatcacattctctgttcagctgttaatgctgggatccatatttagttttataagcttttccctgtttttagttttgttttgggttttttggctcatgaattttatttctgtttgtcgataagaaatgtaagagtggaatgttaataaatttcagtttagttctgtaatgtcaagaatttaagaattaaaaaacggattggttaaaaaa

SEQ ID NO: 58389 - DNA, 821 bp, Homo sapiens
tgtcggactgcacaaatcccctccggtcaattaggctgggaggtaggaccacctctagatgcctactcgattcaaggacaacacaccatttctccgctcgatctggccaagctgaaccaggtggcaagacaacagtctcactttgccatgatgcacggcgggaccggattcgccggaattgactccagctctccagaggtgaaaggctattgggcaagtttggatgcatctactcaaaccacccatgaactcaccattccaaataacttaattggctgcataatcgggcgccaaggcgccaacattaatgagatccgccagatgtccggggcccagatcaaaattgccaacccagtggaaggctcctctggtaggcaggttactatcactggctctgctgccagtattagtctggcccagtatctaatcaatgccaggctttcctctgagaagggcatggggtgcagctagaacagtgtaggttccctcaataacccctttctgctgttctcccatgatccaactgtgtaatttctggtcagtgattccaggttttaaataatttgtaagtgttcagtttctacacaactttatcatccgctaagaatttaaaaatcacattctctgttcagctgttaatgctgggatccatatttagttttataagcttttccctgtttttagttttgttttgggttttttggctcatgaattttatttctgtttgtcgataagaaatgtaagagtggaatgttaataaatttcagtttagttctgtaatgtcaagaatttaagaattaaaaaacggattggttaaaaaa

SEQ ID NO: 58390 - DNA, 907 bp, Homo sapiens
gagtatgtatacttggcaagtcaacttatgctgtctatactctgatcttgaactagcgtatttagcgcagagattaatatgtctattcctgaccagtatgcttgacgttgcgatagagaagttctctgctcgcaccacctctagatgcctactcgattcaaggacaacacaccatttctccgctcgatctggccaagctgaaccaggtggcaagacaacagtctcactttgccatgatgcacggcgggaccggattcgccggaattgactccagctctccagaggtgaaaggctattgggcaagtttggatgcatctactcaaaccacccatgaactcaccattccaaataacttaattggctgcataatcgggcgccaaggcgccaacattaatgagatccgccagatgtccggggcccagatcaaaattgccaacccagtggaaggctcctctggtaggcaggttactatcactggctctgctgccagtattagtctggcccagtatctaatcaatgccaggctttcctctgagaagggcatggggtgcagctagaacagtgtaggttccctcaataacccctttctgctgttctcccatgatccaactgtgtaatttctggtcagtgattccaggttttaaataatttgtaagtgttcagtttctacacaactttatcatccgctaagaatttaaaaatcacattctctgttcagctgttaatgctgggatccatatttagttttataagcttttccctgtttttagttttgttttgggttttttggctcatgaattttatttctgtttgtcgataagaaatgtaagagtggaatgttaataaatttcagtttagttctgtaatgtcaagaatttaagaattaaaaaacggattggttaaaaaa

SEQ ID NO: 58391 - DNA, 1594 bp, Homo sapiens
  misc_feature (13)..(13): n is a, c, g, or t
  misc_feature (17)..(17): n is a, c, g, or t
  misc_feature (29)..(29): n is a, c, g, or t
  misc_feature (33)..(34): n is a, c, g, or t
  misc_feature (36)..(37): n is a, c, g, or t
  misc_feature (41)..(41): n is a, c, g, or t
  misc_feature (48)..(48): n is a, c, g, or t
  misc_feature (51)..(51): n is a, c, g, or t
  misc_feature (56)..(56): n is a, c, g, or t
  misc_feature (58)..(58): n is a, c, g, or t
ccgaggctgcggngggnagtggggaggangggnntnngggnggggggnggnggggngngcctgcgactacgctgcggcctcccgcccgctcccgctcgctcccgcggccctcgctcgcctcgcgccggcagttttgggcctacacctcccctccccccgccagccgccaaagacttgaccacgtaatgagagtactcatcgccgccagtgtgatggatctcgccatggatgccggtgtgactgaaagtggactaaatgtgactctcaccattcggcttcttatgcacggaaaggaagtaggaagcatcattgggaagaaaggggagtcggttaagaggatccgcgaggagagtggcgcgcggatcaacatctcggaggggaattgtccggagagaatcatcactctgaccggccccaccaatgccatctttaaggctttcgctatgatcatcgacaagctggaggaagatatcaacagctccatgaccaacagtaccgcggccagcaggcccccggtcaccctgaggctggtggtgccggccacccagtgcggctccctgattgggaaaggcgggtgtaagatcaaagagatccgcgagagtacgggggcgcaggtccaggtggcgggggatatgctgcccaactccaccgagcgggccatcaccatcgctggcgtgccgcagtctgtcaccgagtgtgtcaagcagatttgcctggtcatgctggagacgctctcccagtctccgcaagggagagtcatgaccattccgtaccagcccatgccggccagctccccagtcatctgcgcgggcggccaagatcggtgcagcgacgctgcgggctacccccatgccacccatgacctggagggaccacctctagatgcctactcgattcaaggacaacagtctcactttgccatgatgcacggcgggaccggattcgccggaattgactccagctctccagaggtgaaaggctattgggcaagtttggatgcatctactcaaaccacccatgaactcaccattccaaataacttaattggctgcataatcgggcgccaaggcgccaacattaatgagatccgccagatgtccggggcccagatcaaaattgccaacccagtggaaggctcctctggtaggcaggttactatcactggctctgctgccagtattagtctggcccagtatctaatcaatgccaggctttcctctgagaagggcatggggtgcagctagaacagtgtaggttccctcaataacccctttctgctgttctcccatgatccaactgtgtaatttctggtcagtgattccaggttttaaataatttgtaagtgttcagtttctacacaactttatcatccgctaagaatttaaaaatcacattctctgttcagctgttaatgctgggatccatatttagttttataagcttttccctgtttttagttttgttttgggttttttggctcatgaattttatttctgtttgtcgataagaaatgtaagagtggaatgttaataaatttcagtttagttctgtaatgtcaagaatttaagaattaaaaaacggattggttaaaaaa

SEQ ID NO: 58392 - DNA, 1616 bp, Homo sapiens
  misc_feature (27)..(27): n is a, c, g, or t
  misc_feature (30)..(31): n is a, c, g, or t
  misc_feature (34)..(34): n is a, c, g, or t
  misc_feature (53)..(53): n is a, c, g, or t
ccggagtcgccaccgccgcgccctcgnccnnccncccgcccgccgctcccggncccgcacgccccctccgccgccgccgcccgcccctgcgactacgctgcggcctcccgcccgctcccgctcgctcccgcggccctcgctcgcctcgcgccggcagttttgggcctacacctcccctccccccgccagccgccaaagacttgaccacgtaacgagcccaactcccccgaacgccgcccgccgctcgccatggatgccggtgtgactgaaagtggactaaatgtgactctcaccattcggcttcttatgcacggaaaggaagtaggaagcatcattgggaagaaaggggagtcggttaagaggatccgcgaggagagtggcgcgcggatcaacatctcggaggggaattgtccggagagaatcatcactctgaccggccccaccaatgccatctttaaggctttcgctatgatcatcgacaagctggaggaagatatcaacagctccatgaccaacagtaccgcggccagcaggcccccggtcaccctgaggctggtggtgccggccacccagtgcggctccctgattgggaaaggcgggtgtaagatcaaagagatccgcgagagtacgggggcgcaggtccaggtggcgggggatatgctgcccaactccaccgagcgggccatcaccatcgctggcgtgccgcagtctgtcaccgagtgtgtcaagcagatttgcctggtcatgctggagacgctctcccagtctccgcaagggagagtcatgaccattccgtaccagcccatgccggccagctccccagtcatctgcgcgggcggccaagatcggtgcagcgacgctgcgggctacccccatgccacccatgacctggagggaccacctctagatgcctactcgattcaaggacaacacaccatttctccgctcgatctggccaagctgaaccaggtggcaagacaacagtctcactttgccatgatgcacggcgggaccggattcgccggaattgactccagctctccagaggtgaaaggctattgggcaagtttggatgcatctactcaaaccacccatgaactcaccattccaaataacttaattggctgcataatcgggcgccaaggcgccaacattaatgagatccgccagatgtccggggcccagatcaaaattgccaacccagtggaaggctcctctggtaggcaggttactatcactggctctgctgccagtattagtctggcccagtatctaatcaatgccaggctttcctctgagaagggcatggggtgcagctagaacagtgtaggttccctcaataacccctttctgctgttctcccatgatccaactgtgtaatttctggtcagtgattccaggttttaaataatttgtaagtgttcagtttctacacaactttatcatccgctaagaatttaaacttttccctgtttttagttttgttttgggttttttggctcatgaattttatttctgtttgtcgataagaaatgtaagagtggaatgttaataaatttcagtttagttctgtaatgtcaagaatttaagaattaaaaaacggattggttaaaaaa

SEQ ID NO: 58393 - DNA, 1468 bp, Homo sapiens
  misc_feature (27)..(27): n is a, c, g, or t
  misc_feature (30)..(31): n is a, c, g, or t
  misc_feature (34)..(34): n is a, c, g, or t
  misc_feature (53)..(53): n is a, c, g, or t
  misc_feature (1447)..(1447): n is a, c, g, or t
ccggagtcgccaccgccgcgccctcgnccnnccncccgcccgccgctcccggncccgcacgccccctccgccgccgccgcccgcccctgcgactacgctgcggcctcccgcccgctcccgctcgctcccgcggccctcgctcgcctcgcgccggcagttttgggcctacacctcccctccccccgccagccgccaaagacttgaccacgtaacgagcccaactcccccgaacgccgcccgccgctcgccatggatgccggtgtgactgaaagtggactaaatgtgactctcaccattcggcttcttatgcacggaaaggaagtaggaagcatcattgggaagaaaggggagtcggttaagaggatccgcgaggagagtggcgcgcggatcaacatctcggaggggaattgtccggagagaatcatcactctgaccggccccaccaatgccatctttaaggctttcgctatgatcatcgacaagctggaggaagatatcaacagctccatgaccaacagtaccgcggccagcaggcccccggtcaccctgaggctggtggtgccggccacccagtgcggctccctgattgggaaaggcgggtgtaagatcaaagagatccgcgagagtacgggggcgcaggtccaggtggcgggggatatgctgcccaactccaccgagcgggccatcaccatcgctggcgtgccgcagtctgtcaccgagtgtgtcaagcagatttgcctggtcatgctggagacgctctcccagtctccgcaagggagagtcatgaccattccgtaccagcccatgccggccagctccccagtcatctgcgcgggcggccaagatcggtgcagcgacgctgcgggctacccccatgccacccatgacctggagggaccacctctagatgcctactcgattcaaggacaacacaccatttctccgctcgatctggccaagctgaaccaggtggcaagacaacagtctcactttgccatgatgcacggcgggaccggattcgccggaattgactccagctctccagaggtgaaaggctattgggcaagtttggatgcatctactcaaaccacccatgaactcaccattccaaataacttaattggctgcataatcgggcgccaaggcgccaacattaatgagatccgccagatgtccggggcccagatcaaaattgccaacccagtggaaggctcctctggtaggcaggttactatcactggctctgctgccagtattagtctggcccagtatctaatcaatgccaggctttcctctgagaagggcatggggtgcagctagaacagtgtaggttccctcaataacccctttctgctgttctcccatgatccaactgtgtaatttctggtcagtgattccaggttttaaataatttgtaagtgttcagtttctacacatagttcagcgnctgacgggtgccgagctcgat

SEQ ID NO: 58394 - DNA, 1616 bp, Homo sapiens
  misc_feature (27)..(27): n is a, c, g, or t
  misc_feature (30)..(31): n is a, c, g, or t
  misc_feature (34)..(34): n is a, c, g, or t
  misc_feature (53)..(53): n is a, c, g, or t
ccggagtcgccaccgccgcgccctcgnccnnccncccgcccgccgctcccggncccgcacgccccctccgccgccgccgcccgcccctgcgactacgctgcggcctcccgcccgctcccgctcgctcccgcggccctcgctcgcctcgcgccggcagttttgggcctacacctcccctccccccgccagccgccaaagacttgaccacgtaacgagcccaactcccccgaacgccgcccgccgctcgccatggatgccggtgtgactgaaagtggactaaatgtgactctcaccattcggcttcttatgcacggaaaggaagtaggaagcatcattgggaagaaaggggagtcggttaagaggatccgcgaggagagtggcgcgcggatcaacatctcggaggggaattgtccggagagaatcatcactctgaccggccccaccaatgccatctttaaggctttcgctatgatcatcgacaagctggaggaagatatcaacagctccatgaccaacagtaccgcggccagcaggcccccggtcaccctgaggctggtggtgccggccacccagtgcggctccctgattgggaaaggcgggtgtaagatcaaagagatccgcgagagtacgggggcgcaggtccaggtggcgggggatatgctgcccaactccaccgagcgggccatcaccatcgctggcgtgccgcagtctgtcaccgagtgtgtcaagcagatttgcctggtcatgctggagacgctctcccagtctccgcaagggagagtcatgaccattccgtaccagcccatgccggccagctccccagtcatctgcgcgggcggccaagatcggtgcagcgacgctgcgggctacccccatgccacccatgacctggagggaccacctctagatgcctactcgattcaaggacaacacaccatttctccgctcgatctggccaagctgaaccaggtggcaagacaacagtctcactttgccatgatgcacggcgggaccggattcgccggaattgactccagctctccagaggtgaaaggctattgggcaagtttggatgcatctactcaaaccacccatgaactcaccattccaaataacttaattggctgcataatcgggcgccaaggcgccaacattaatgagatccgccagatgtccggggcccagatctctgctgccagtattagtctggcccagtatctaatcaatgccaggctttcctctgagaagggcatggggtgcagctagaacagtgtaggttccctcaataacccctttctgctgttctcccatgatccaactgtgtaatttctggtcagtgattccaggttttaaataatttgtaagtgttcagtttctacacaactttatcatccgctaagaatttaaaaatcacattctctgttcagctgttaatgctgggatccatatttagttttataagcttttccctgtttttagttttgttttgggttttttggctcatgaattttatttctgtttgtcgataagaaatgtaagagtggaatgttaataaatttcagtttagttctgtaatgtcaagaatttaagaattaaaaaacggattggttaaaaaa

SEQ ID NO: 58395 - DNA, 1662 bp, Homo sapiens
  misc_feature (27)..(27): n is a, c, g, or t
  misc_feature (30)..(31): n is a, c, g, or t
  misc_feature (34)..(34): n is a, c, g, or t
  misc_feature (53)..(53): n is a, c, g, or t
ccggagtcgccaccgccgcgccctcgnccnnccncccgcccgccgctcccggncccgcacgccccctccgccgccgccgcccgcccctgcgactacgctgcggcctcccgcccgctcccgctcgctcccgcggccctcgctcgcctcgcgccggcagttttgggcctacacctcccctccccccgccagccgccaaagacttgaccacgtaacgagcccaactcccccgaacgccgcccgccgctcgccatggatgccggtgtgactgaaagtggactaaatgtgactctcaccattcggcttcttatgcacggaaaggaagtaggaagcatcattgggaagaaaggggagtcggttaagaggatccgcgaggagagtggcgcgcggatcaacatctcggaggggaattgtccggagagaatcatcactctgaccggccccaccaatgccatctttaaggctttcgctatgatcatcgacaagctggaggaagatatcaacagctccatgaccaacagtaccgcggccagcaggcccccggtcaccctgaggctggtggtgccggccacccagtgcggctccctgattgggaaaggcgggtgtaagatcaaagagatccgcgagagtacgggggcgcaggtccaggtggcgggggatatgctgcccaactccaccgagcgggccatcaccatcgctggcgtgccgcagtctgtcaccgagtgtgtcaagcagatttgcctggtcatgctggagacgctctcccagtctccgcaagggagagtcatgaccattccgtaccagcccatgccggccagctccccagtcatctgcgcgggcggccaagatcggtgcagcgacgctgcgggctacccccatgccacccatgacctggagggaccacctctagatgcctactcgattcaaggacaacacaccatttctccgctcgatctggccaagctgaaccaggtggcaagacaacagtctcactttgccatgatgcacggcgggaccggattcgccggaattgactccagctctccagaggtgaaaggctattgggcaagtttggatgcatctactcaaaccacccatgaactcaccattccaaataacttaattggctgcataatcgggcgccaaggcgccaacattaatgagatccgccagatgtccggggcccagatcaaaattgccaacccagtggaaggctcctctggtaggcaggttactatcactggctctgctgccagtattagtctggcccagtatctaatcaatgccaggctttcctctgagaagggcatggggtgcagctagaacagtgtaggttccctcaataacccctttctgctgttctcccatgatccaactgtgtaatttctggtcagtgattacacctccaagattatttgcctgtgctccgtgtccacgcaactcaatcatctgcccaccacctcggtctcacattctctggtgagcagccagtctcgcaacccagtcatatcctatcagctttgccgagtcatatgtctgtttggccatttttggatgcaggatataaattcaggctctcgagtgtgaaggccaaagtgtggtgtgaatccatctctcacccgttgtgtcattccccatcatgaaccagtgtttctgggcctgttt

SEQ ID NO: 58396 - DNA, 1159 bp, Homo sapiens
  misc_feature (27)..(27): n is a, c, g, or t
  misc_feature (30)..(31): n is a, c, g, or t
  misc_feature (34)..(34): n is a, c, g, or t
  misc_feature (53)..(53): n is a, c, g, or t
  misc_feature (1134)..(1134): n is a, c, g, or t
ccggagtcgccaccgccgcgccctcgnccnnccncccgcccgccgctcccggncccgcacgccccctccgccgccgccgcccgcccctgcgactacgctgcggcctcccgcccgctcccgctcgctcccgcggccctcgctcgcctcgcgccggcagttttgggcctacacctcccctccccccgccagccgccaaagacttgaccacgtaacgagcccaactcccccgaacgccgcccgccgctcgccatggatgccggtgtgactgaaagtggactaaatgtgactctcaccattcggcttcttatgcacggaaaggaagtaggaagcatcattgggaagaaaggggagtcggttaagaggatccgcgaggagagtggcgcgcggatcaacatctcggaggggaattgtccggagagaatcatcactctgaccggccccaccaatgccatctttaaggctttcgctatgatcatcgacaagctggaggaagatatcaacagctccatgaccaacagtaccgcggccagcaggcccccggtcaccctgaggctggtggtgccggccacccagtgcggctccctgattgggaaaggcgggtgtaagatcaaagagatccgcgagagtacgggggcgcaggtccaggtggcgggggatatgctgcccaactccaccgagcgggccatcaccatcgctggcgtgccgcagtctgtcaccgagtgtgtcaagcagatttgcctggtcatgctggagacgctctcccagtctccgcaagggagagtcatgaccattccgtaccagcccatgccggccagctccccagtcatctgcgcgggcggccaagatcggtgcagcgacgctgcgggctacccccatgccacccatgacctggagggaccacctctagatgcctactcgattcaaggacaacacaccatttctccgctcgatctggccaagctgaaccaggtggcaagacaacagtctcactttgccatgatgcacggcgggaccggattcgccggaattgactccagctctccagaggtgaaaggctattgggcaagtttggatgcatctactcaaaccacccatgaactcaccattccaaataacttaattggccttatcganggtaccgagctgattgtatagtcat

SEQ ID NO: 58397 - DNA, 1207 bp, Homo sapiens
  misc_feature (27)..(27): n is a, c, g, or t
  misc_feature (30)..(31): n is a, c, g, or t
  misc_feature (34)..(34): n is a, c, g, or t
  misc_feature (53)..(53): n is a, c, g, or t
ccggagtcgccaccgccgcgccctcgnccnnccncccgcccgccgctcccggncccgcacgccccctccgccgccgccgcccgcccctgcgactacgctgcggcctcccgcccgctcccgctcgctcccgcggccctcgctcgcctcgcgccggcagttttgggcctacacctcccctccccccgccagccgccaaagacttgaccacgtaacgagcccaactcccccgaacgccgcccgccgctcgccatggatgccggtgtgactgaaagtggactaaatgtgactctcaccattcggcttcttatgcacggaaaggaagtaggaagcatcattgggaagaaaggggagtcggttaagaggatccgcgaggagagtggcgcgcggatcaacatctcggaggggaattgtccggagagaatcatcactctgaccggccccaccaatgccatctttaaggctttcgctatgatcatcgacaagctggaggaagatatcaacagctccatgaccaacagtaccgcggccagcaggcccccggtcaccctgaggctggtggtgccggccacccagtgcggctccctgattgggaaaggcgggtgtaagatcaaagagatccgcgagagtacgggggcgcaggtccaggtggcgggggatatgctgcccaactccaccgagcgggccatcaccatcgctggcgtgccgcagtctgtcaccgagtgtgtcaagcagatttgcctggtcatgctggagacgctctcccagtctccgcaagggagagtcatgaccattccgtaccagcccatgccggccagctccccagtcatctgcgcgggcggccaagatcggtgcactagaacagtgtaggttccctcaataacccctttctgctgttctcccatgatccaactgtgtaatttctggtcagtgattccaggttttaaataatttgtaagtgttcagtttctacacaactttatcatccgctaagaatttaaaaatcacattctctgttcagctgttaatgctgggatccatatttagttttataagcttttccctgtttttagttttgttttgggttttttggctcatgaattttatttctgtttgtcgataagaaatgtaagagtggaatgttaataaatttcagtttagttctgtaatgtcaagaatttaagaattaaaaaacggattggttaaaaaa

SEQ ID NO: 58398 - DNA, 527 bp, Homo sapiens
atgagtaatctggcaccatgcctggtcatgttaaatttttgtaaagacaaggtctgctatgtttcccaggctggtggtcttgaactcctggcttcaagtgatccttctgcctgccctcccaaagtgctgagattacaggtatgagccaccacacctgactgtgaacttttaatctagaacagtgtaggttccctcaataacccctttctgctgttctcccatgatccaactgtgtaatttctggtcagtgattccaggttttaaataatttgtaagtgttcagtttctacacaactttatcatccgctaagaatttaaaaatcacattctctgttcagctgttaatgctgggatccatatttagttttataagcttttccctgtttttagttttgttttgggttttttggctcatgaattttatttctgtttgtcgataagaaatgtaagagtggaatgttaataaatttcagtttagttctgtaatgtcaagaatttaagaattaaaaaacggattggttaaaaaa

SEQ ID NO: 58399 - DNA, 918 bp, Homo sapiens
  misc_feature (27)..(27): n is a, c, g, or t
  misc_feature (30)..(31): n is a, c, g, or t
  misc_feature (34)..(34): n is a, c, g, or t
  misc_feature (53)..(53): n is a, c, g, or t
ccggagtcgccaccgccgcgccctcgnccnnccncccgcccgccgctcccggncccgcacgccccctccgccgccgccgcccgcccctgcgactacgctgcggcctcccgcccgctcccgctcgctcccgcggccctcgctcgcctcgcgccggcagttttgggcctacacctcccctccccccgccagccgccaaagacttgaccacgtaacgagcccaactcccccgaacgccgcccgccgctcgccatggatgccggtgtgactgaaagtggactaaatgtgactctcaccattcggcttcttatgcacggaaaggaagtaggaagcatcattgggaagaaaggggagtcggttaagaggatccgcgaggagagtggcgcgcggatcaacatctcggaggggaattgtccggagagaatcatcactctgaccggccccaccaatgccatctttaaggctttcgctatgatcatcgacaagctggaggaagatatcaacagctccatgaccaacagtaccgcggccagcaggcccccggtcaccctgaggctggtggtgccggccacccagtgcggctccctgattgggaaaggcgggtgtaagatcaaagagatccgcgagagtacgggggcgcaggtccaggtggcgggggatatgctgcccaactccaccgagcgggccatcaccatcgctggcgtgccgcagtctgtcaccgagtgtgtcaagcagatttgcctggtcatgctggagacgctctcccagtctccgcaagggagagtcatgaccattccgtaccagcccaggtattcggcgctgccgtcctggctgccgtcgtcgacgaacacgatttcccagggttcgcccaggcgtccagcacctccgcaccgcgatgacagggcagacgtcgcgtgtagc

SEQ ID NO: 58400 - DNA, 510 bp, Homo sapiens
  misc_feature (27)..(27): n is a, c, g, or t
  misc_feature (30)..(31): n is a, c, g, or t
  misc_feature (34)..(34): n is a, c, g, or t
  misc_feature (53)..(53): n is a, c, g, or t
ccggagtcgccaccgccgcgccctcgnccnnccncccgcccgccgctcccggncccgcacgccccctccgccgccgccgcccgcccctgcgactacgctgcggcctcccgcccgctcccgctcgctcccgcggccctcgctcgcctcgcgccggcagttttgggcctacacctcccctccccccgccagccgccaaagacttgaccacgtaacgagcccaactcccccgaacgccgcccgccgctcgccatggatgccggtgtgactgaaagtggactaaatgtgactctcaccattcggcttcttatgcacggaaaggaagtaggaagcatcattgggaagaaaggggagtcggttaagaggatccgcgaggagagtggcgcgcggatcaacatctcggaggggaattgtccggagagaatcatcactctgaccggccccaccaatgccatctttaaggctttcgctatgatcatcgacaagctggtgtggccgcgcggtccaggttcg

SEQ ID NO: 58401 - DNA, 1238 bp, Homo sapiens
ggtagtggggcctgcggtgggagtggaaaggaagtaggaagcatcattgggaagaaaggggagtcggttaagaggatccgcgaggagagtggcgcgcggatcaacatctcggaggggaattgtccggagagaatcatcactctgaccggccccaccaatgccatctttaaggctttcgctatgatcatcgacaagctggaggaagatatcaacagctccatgaccaacagtaccgcggccagcaggcccccggtcaccctgaggctggtggtgccggccacccagtgcggctccctgattgggaaaggcgggtgtaagatcaaagagatccgcgagagtacgggggcgcaggtccaggtggcgggggatatgctgcccaactccaccgagcgggccatcaccatcgctggcgtgccgcagtctgtcaccgagtgtgtcaagcagatttgcctggtcatgctggagacgctctcccagtctccgcaagggaaaaaaaaaaaaaaaaaaaaaaaaaaaaaaaaaacaaaccaaagaggggggcgattatgaccacctcggagggcgaaataaaagcacgacagaatatctctagaacacaaggaggacctcaaatagagccgacaccaaaacgacccccaccgccagagcgcgcggcacaaaaaacacacgagagcagaaaagaggaaaaacagacagccacgagaggaccagagacaaaacgccccacaacacacgcgaggagccacacactaggggcaccccccacatagacaacaaaacacacacaagaggcaaacatacgcaccacagaggccatagtgcgcgcacacgcaaaaagatcgcccgcgcacaaacaaacacaacaacaccaagaccacaaaacgaacaactatcaaccacggaaggaatcagtccaaaatcagaggcgagaaccacgccaacacacaacacgaacacaaacaaccaaacaggagaaggaagcacagcgagacccacagcaacaaaaaagaaacaacaacaaagaagccagaaagacaacgacgcgccgaacaagaggaccggccagcgccggagagcagagagaaggcgcggagcgaagcaacgagacgtcagaaaggaccacacgtggagccccacagggcgaccgcacccaaaagtactgcgacgcgcgagaaaccaacacacaggcgcgggagcgcacggcaaggaggcgcgcgagacgggacgtgacacgcaga

SEQ ID NO: 58402 - DNA, 1670 bp, Homo sapiens
  misc_feature (27)..(27): n is a, c, g, or t
  misc_feature (30)..(31): n is a, c, g, or t
  misc_feature (34)..(34): n is a, c, g, or t
  misc_feature (53)..(53): n is a, c, g, or t
ccggagtcgccaccgccgcgccctcgnccnnccncccgcccgccgctcccggncccgcacgccccctccgccgccgccgcccgcccctgcgactacgctgcggcctcccgcccgctcccgctcgctcccgcggccctcgctcgcctcgcgccggcagttttgggcctacacctcccctccccccgccagccgccaaagacttgaccacgtaacgagcccaactcccccgaacgccgcccgccgctcgccatggatgccggtgtgactgaaagtggactaaatgtgactctcaccattcggcttcttatgcacggaaaggaagtaggaagcatcattgggaagaaaggggagtcggttaagaggatccgcgaggagagtggcgcgcggatcaacatctcggaggggaattgtccggagagaatcatcactctgaccggccccaccaatgccatctttaaggctttcgctatgatcatcgacaagctggaggaagatatcaacagctccatgaccaacagtaccgcggccagcaggcccccggtcaccctgaggctggtggtgccggccacccagtgcggctccctgattgggaaaggcgggtgtaagatcaaagagatccgcgagagtacgggggcgcaggtccaggtggcgggggatatgctgcccaactccaccgagcgggccatcaccatcgctggcgtgccgcagtctgtcaccgagtgtgtcaagcagatttgcctggtcatgctggagacgctctcccagtctccgcaagggagagtcatgaccattccgtaccagcccatgccggccagctccccagtcatctgcgcgggcggccaagatcggtgcagcgacgctgcgggctacccccatgccacccatgacctggagggaccacctctagatgcctactcgattcaaggacaacacaccatttctccgctcgatctggccaagctgaaccaggtggcaagacaacagtctcactttgccatgatgcacggcgggaccggattcgccggaattgactccagctctccagaggtgaaaggctattgggcaagtttggatgcatctactcaaaccacccatgaactcaccattccaaataacttaattggctgcataatcgggcgccaaggcgccaacattaatgagatccgccagatgtccggggcccagatcaaaattgccaacccagtggaaggctcctctggtaggcaggttactatcactggctctgctgccagtattagtctggcccagtatctaatcaatgccaggctttcctctgagaagggcatggggtgcagctagaacagtgtaggttccctcaataacccctttctgctgttctcccatgatccaactgtgtaatttctggtcagtgattccaggttttaaataatttgtaagtgttcagtttctacacaactttatcatccgctaagaatttaaaaatcacattctctgttcagctgttaatgctgggatccatatttagttttataagcttttccctgtttttagttttgttttgggttttttggctcatgaattttatttctgtttgtcgataagaaatgtaagagtggaatgttaataaatttcagtttagttctgtaatgtcaagaatttaagaattaaaaaacggattggttaaaaaa

SEQ ID NO: 58403 - DNA, 302 bp, Homo sapiens
ctcaggtgatccacctacctcggcctcccaaagtgctgggattacaggcatgagccaccgcgcccagccagagagaggttttaaatatatatgtttactttaatattaagttataacataattttcatgttattgaaaagctcttccatctaggatcacacaacttcagtgtcagaatcatattgaggtggggaatttgtattagtcaggtttctctaaagggacagaaacaataggatagatgtatatacgaaagggagtttattaggagaattgactcacatgatcataaggtgaagtcc

SEQ ID NO: 58404 - DNA, 318 bp, Homo sapiens
  misc_feature (201)..(201): n is a, c, g, or t
  misc_feature (238)..(238): n is a, c, g, or t
  misc_feature (279)..(279): n is a, c, g, or t
atcttgcatgattaatactattggcctgttccctttatcctcagctggttgtacaattcttgaatgctttcttcttcccctgaggatgctatagatattgttctactgttatctgaaattagtcgttttggagaagtttctccatccagatacctatagagtctgtctttttttttttttttttttttttatatgcaaacnctcgctgtattattcaggctgatctgaatctcctggnctttagtgttgtgacagctttggcctcttaaaactgcaggnttacaggcatgagccacagtgcctggccatcaagtagca

SEQ ID NO: 58405 - DNA, 246 bp, Homo sapiens
ccttgaacgccctgctgagtagagggttgtgttgtaggctccccagcgcttgatgtagctctgagaggtgaggcagggcttgatgtagctctgagaggtgaggcagggcttgatgtagctctgagaggtgaggcagggcctagatccctcccgcttggcatagccctgcccctgtgacctgaacaccccacagcagcaccctggggctgagcagctggggagtcccaccactggcagctacagcct

SEQ ID NO: 58406 - DNA, 1045 bp, Homo sapiens
ttacgttgtgtggtctttcttgtgctgtgttttttatgtactttgtgtttcggtctggttgttttgtgttcggttgttgggtgttcgtctgtttgtgctttgtcctcctctagttctgtttttggttttccttgtttggatctcctgtcgtgtttgctgttcgcgtatttgcgtcgtgtttttttttttatttgctgcgtttgtctttttttttgtgttcttttgtttggcctttgttgtgtctcgggtccttggttccgtgtcgtggttggtgtcggtgtgtgcgtgcgactttggcgtgttgtccttgggtttgtgttggtcctctgttgggtcgtgactactcaggtttgttctgtggttgtagtcgaggtgtgtgtgcgttgcttcctttgttttgtggtctgtctgttttgttttctctctgttctttgtgtgtgcctcttttttcccgtggcgtgtttcggctgaggtttatttcgttctgtccgcttctcttctcgtttgttcccggtgttgttgtgttgctgtgctctttttttggttgttgtgtctgcgtcgtgtcgtatgctcgtttcggttttgctcttttctctttttgctctactgcttacttttgcctttcccttgtctttttctttcttgttcttcaggttgcgttactctggctcgcttctttgttggttgctcgtccgttatggtgctcctctgcttagcgttgttctccttggctcctcctggccctgctctcggtaccctgttagggtcttgctgcgagtagctctgctttggtccgtcgttctgtctgcgtgcactggctgtgtttttttgtcctattcctctgtctgtatactgttgatgtttcggacttgtaggattgtctttaaacagccattcagaaacaaaactgtagaactgtgtatttgattgggaatggtgcttttgccaacttaaaaggattaaagtaacggagatatacacaaattttaaaattatgtgtgatcacaagactaaagataattaaaaagaaaaccacagatcatga

SEQ ID NO: 58407 - DNA, 1344 bp, Homo sapiens
cacgtcagggcgcgggagcgcggagcgagtttggttgcacttacaccggtacttaagcgcggaccggcgtgtccttggacttagagagtggggacgtccggcttcggagcgggagtgttcgttgtgccagcgactaaaaagagaattaaatatgggtgatgttgagaaaggcaagaagatttttattatgaagtgttcccagtgccacaccgttgaaaagggaggcaagcacaagactgggccaaatctccatggtctctttgggcggaagacaggtcaggcccctggatactcttacacagccgccaataagaacaaaggcatcatctggggagaggatacactgatggagtatttggagaatcccaagaagtacatccctggaacaaaaatgatctttgtcggcattaagaagaaggaagaaagggcagacttaatagcttatctcaaaaaagctactaatgagtaataattggccactgccttatttattacaaaacagaaatgtctcatgacttttttatgtgtaccatcctttaatagatctcatacaccagaattcagatcatgaatgactgacagaatattttgttgggcagtcctgatttaaaactaagactggcttgtggttaaatgaatatgttcagtttttgaattttaatagtaactccaattcagtaaatggtatcactgtttaccccttttaaagatatgattagacttcgttagtaatgttcaacttttcacaaagatggtgagtgccatcttaaaacttactggagattggttttatatttagatttatataactggttatgtgaatatatttaaatactggggaaattgcttcactgtcttagaaccaagcaagattcacctgtgttttgtgttcatgttcatttgcctcttaaaggcaagggttgaagataaataaggtagcaatgtctatagttttggccttaactatgccaatctaattataattccctgtatttaaaatggtttcttttacttattgaaaggcattttagtgtggtttatgtgtaatattaaagattattcaacacctctcacatcttacagatctataaggtcacatgcttttaaaatagtagcaagttaaacttcactcttgaattctttacaatctaagtcaaactaagttataatttaggattgtctttaaacagccattcagaaacaaaactgtagaactgtgtatttgattgggaatggtgcttttgccaacttaaaaggattaaagtaacggagatatacacaaattttaaaattatgtgtgatcacaagactaaagataattaaaaagaaaaccacagatcatga

SEQ ID NO: 58408 - DNA, 1380 bp, Homo sapiens
cacgtcagggcgcgggagcgcggagcgagtttggttgcacttacaccggtacttaagcgcggaccggcgtgtccttggacttagagagtggggacgtccggcttcggagcgggagtgttcgttgtgccagcgactaaaaagagaattaaatatgggtgatgttgagaaaggcaagaagatttttattatgaagtgttcccagtgccacaccgttgaaaagggaggcaagcacaagactgggccaaatctccatggtctctttgggcggaagacaggtcaggcccctggatactcttacacagccgccaataagaacaaaggcatcatctggggagaggatacactgatggagtatttggagaatcccaagaagtacatccctggaacaaaaatgatctttgtcggcattaagaagaaggaagaaagggcagacttaatagcttatctcaaaaaagctactaatgagtaataattggccactgccttatttattacaaaacagaaatgtctcatgacttttttatgtgtaccatcctttaatagatctcatacaccagaattcagatcatgaatgactgacagaatattttgttgggcagtcctgatttaaaactaagactggcttgtggttaaatgaatatgttcagtttttgaattttaatagtaactccaattcagtaaatggtatcactgtttaccccttttaaagatatgattagacttcgttagtaatgttcaacttttcacaaagatggtgagtgccatcttaaaacttactggagattggttttatatttagatttatataactggttatgtgaatatatttaaatactggggaaattgcttcactgtcttagaaccaagcaagattcacctgtgttttgtgttcatgttcatttgcctcttaaaggcaagggttgaagataaataaggtagcaatgtctatagttttggccttaactatgccaatctaattataattccctgtatttaaaatggtttcttttacttattgaaaggcattttagtgtggtttatgtgtaatattaaagattattcaacacctctcacatcttacagatctataaggtcacatgcttttaaaatagtagcaagttaaacttcactcttgaattctttacaatctaagtcaaactaagttataatttaggattgtctttaaacagccattcagaaacaaaactgtagaactgtgtatttgattgggaatggtgcttttgccaacttaaaaggattaaagtaacggagatatacacaaattttaaaattatgtgtgatcacaagactaaagataattaaaaagaaaaccacagatcatgaaaaaaaaaaaagtcgacgccgcgaatttatatatac

SEQ ID NO: 58409 - DNA, 1302 bp, Homo sapiens
  misc_feature (23)..(23): n is a, c, g, or t
aagcagtggtatcaacgcagagngcccattacggccggggagagagtggggacgtccggcttcggagcgggagtgttcgttgtgccagcgactaaaaagagaattaaatatgggtgatgttgagaaaggcaagaagatttttattatgaagtgttcccagtgccacaccgttgaaaagggaggcaagcacaagactgggccaaatctccatggtctctttgggcggaagacaggtcaggcccctggatactcttacacagccgccaataagaacaaaggcatcatctggggagaggatacactgatggagtatttggagaatcccaagaagtacatccctggaacaaaaatgatctttgtcggcattaagaagaaggaagaaagggcagacttaatagcttatctcaaaaaagctactaatgagtaataattggccactgccttatttattacaaaacagaaatgtctcatgacttttttatgtgtaccatcctttaatagatctcatacaccagaattcagatcatgaatgactgacagaatattttgttgggcagtcctgatttaaaactaagactggcttgtggttaaatgaatatgttcagtttttgaattttaatagtaactccaattcagtaaatggtatcactgtttaccccttttaaagatatgattagacttcgttagtaatgttcaacttttcacaaagatggtgagtgccatcttaaaacttactggagattggttttatatttagatttatataactggttatgtgaatatatttaaatactggggaaattgcttcactgtcttagaaccaagcaagattcacctgtgttttgtgttcatgttcatttgcctcttaaaggcaagggttgaagataaataaggtagcaatgtctatagttttggccttaactatgccaatctaattataattccctgtatttaaaatggtttcttttacttattgaaaggcattttagtgtggtttatgtgtaatattaaagattattcaacacctctcacatcttacagatctataaggtcacatgcttttaaaatagtagcaagttaaacttcactcttgaattctttacaatctaagtcaaactaagttataatttaggattgtctttaaacagccattcagaaacaaaactgtagaactgtgtatttgattgggaatggtgcttttgccaacttaaaaggattaaagtaacggagatatacacaaattttaaaattatgtgtgatcacaagactaaagataattaaaaagaaaaccacagatcatga

SEQ ID NO: 58410 - DNA, 1073 bp, Homo sapiens
cacgtcagggcgcgggagcgcggagcgagtttggttgcacttacaccggtacttaagcgcggaccggcgtgtccttggacttagagagtggggacgtccggcttcggagcgggagtgttcgttgtgccagcgactaaaaagagaattaaatatgggtgatgttgagaaaggcaagaagatttttattatgaagtgttcccagtgccacaccgttgaaaagggaggcaagcacaagactgggccaaatctccatggtctctttgggcggaagacaggtcaggcccctggatactcttacacagccgccaataagaacaaaggcatcatctggggagaggatacactgatggagtatttggagaatcccaagaagtacatccctggaacaaaaatgatctttgtcggcattaagaagaaggaagaaagggcagacttaatagcttatctcaaaaaagctactaatgagtaataattggccactgccttatttattacaaaacagaaatgtctcatgacttttttatgtgtaccatcctttaatagatctcatacaccagaattcagatcatgaatgactgacagaatattttgttgggcagtcctgatttaaaactaagactggcttgtggttaaatgaatatgttcagtttttgaattttaatagtaactccaattcagtaaatggtatcactgtttaccccttttaaagatatgattagacttcgttagtaatgttcaacttttcacaaagatggtgagtgccatcttaaaacttactggagattggttttatatttagatttatataactggttatgtgaatatatttaaatactggggaaattgcttcactgtcttagaaccaagcaagattcacctgtgttttgtgttcatgttcatttgcctcttaaaggcaagggttgaagataaataaggtagcaatgtctatagttttggccttaactatgccaatctaattataattccctgtatttaaaatggtttcttttacttattgaaaggcattttagtgtggtttatgtgtaatattaaagattattcaacacctctca

SEQ ID NO: 58411 - DNA, 1373 bp, Homo sapiens
  misc_feature (110)..(110): n is a, c, g, or t
tataatcaaagttcagtagccgagatagcgcggtgatcataatttgcaccgagagcacattatcagcgcacaagtctcaaccaggcgtccgtgcgcgttgaacgtaatgncagagagtggggacgtccggcttcggagcgggagtgttcgttgtgccagcgactaaaaagagaattaaatatgggtgatgttgagaaaggcaagaagatttttattatgaagtgttcccagtgccacaccgttgaaaagggaggcaagcacaagactgggccaaatctccatggtctctttgggcggaagacaggtcaggcccctggatactcttacacagccgccaataagaacaaaggcatcatctggggagaggatacactgatggagtatttggagaatcccaagaagtacatccctggaacaaaaatgatctttgtcggcattaagaagaaggaagaaagggcagacttaatagcttatctcaaaaaagctactaatgagtaataattggccactgccttatttattacaaaacagaaatgtctcatgacttttttatgtgtaccatcctttaatagatctcatacaccagaattcagatcatgaatgactgacagaatattttgttgggcagtcctgatttaaaactaagactggcttgtggttaaatgaatatgttcagtttttgaattttaatagtaactccaattcagtaaatggtatcactgtttaccccttttaaagatatgattagacttcgttagtaatgttcaacttttcacaaagatggtgagtgccatcttaaaacttactggagattggttttatatttagatttatataactggttatgtgaatatatttaaatactggggaaattgcttcactgtcttagaaccaagcaagattcacctgtgttttgtgttcatgttcatttgcctcttaaaggcaagggttgaagataaataaggtagcaatgtctatagttttggccttaactatgccaatctaattataattccctgtatttaaaatggtttcttttacttattgaaaggcattttagtgtggtttatgtgtaatattaaagattattcaacacctctcacatcttacagatctataaggtcacatgcttttaaaatagtagcaagttaaacttcactcttgaattctttacaatctaagtcaaactaagttataatttaggattgtctttaaacagccattcagaaacaaaactgtagaactgtgtatttgattgggaatggtgcttttgccaacttaaaaggattaaagtaacggagatatacacaaattttaaaattatgtgtgatcacaagactaaagataattaaaaagaaaaccacagatcatga

SEQ ID NO: 58412 - DNA, 1322 bp, Homo sapiens
ctctctctctctctctctctctctctctctgtctctctctctctctgtctctcctcgtgcagagagtggggacgtccggcttcggagcgggagtgttcgttgtgccagcgactaaaaagagaattaaatatgggtgatgttgagaaaggcaagaagatttttattatgaagtgttcccagtgccacaccgttgaaaagggaggcaagcacaagactgggccaaatctccatggtctctttgggcggaagacaggtcaggcccctggatactcttacacagccgccaataagaacaaaggcatcatctggggagaggatacactgatggagtatttggagaatcccaagaagtacatccctggaacaaaaatgatctttgtcggcattaagaagaaggaagaaagggcagacttaatagcttatctcaaaaaagctactaatgagtaataattggccactgccttatttattacaaaacagaaatgtctcatgacttttttatgtgtaccatcctttaatagatctcatacaccagaattcagatcatgaatgactgacagaatattttgttgggcagtcctgatttaaaactaagactggcttgtggttaaatgaatatgttcagtttttgaattttaatagtaactccaattcagtaaatggtatcactgtttaccccttttaaagatatgattagacttcgttagtaatgttcaacttttcacaaagatggtgagtgccatcttaaaacttactggagattggttttatatttagatttatataactggttatgtgaatatatttaaatactggggaaattgcttcactgtcttagaaccaagcaagattcacctgtgttttgtgttcatgttcatttgcctcttaaaggcaagggttgaagataaataaggtagcaatgtctatagttttggccttaactatgccaatctaattataattccctgtatttaaaatggtttcttttacttattgaaaggcattttagtgtggtttatgtgtaatattaaagattattcaacacctctcacatcttacagatctataaggtcacatgcttttaaaatagtagcaagttaaacttcactcttgaattctttacaatctaagtcaaactaagttataatttaggattgtctttaaacagccattcagaaacaaaactgtagaactgtgtatttgattgggaatggtgcttttgccaacttaaaaggattaaagtaacggagatatacacaaattttaaaattatgtgtgatcacaagactaaagataattaaaaagaaaaccacagatcatga

SEQ ID NO: 58413 - DNA, 942 bp, Homo sapiens
cacgtcagggcgcgggagcgcggagcgagtttggttgcacttacaccggtacttaagcgcggaccggcgtgtccttggacttagagagtggggacgtccggcttcggagcgggagtgttcgttgtgccagcgactaaaaagagaattaaatatgggtgatgttgagaaaggcaagaagatttttattatgaagtgttcccagtgccacaccgttgaaaagggaggcaagcacaagactgggccaaatctccatggtctctttgggcggaagacaggtcaggcccctggatactcttacacagccgccaataagaacaaaggcatcatctggggagaggatacactgatggagtatttggagaatcccaagaagtacatccctggaacaaaaatgatctttgtcggcattaagaagaaggaagaaagggcagacttaatagcttatctcaaaaaagctactaatgagtaataattggccactgccttatttattacaaaacagaaatgtctcatgacttttttatgtgtaccatcctttaatagatctcatacaccagaattcagatcatgaatgactgacagaatattttgttgggcagtcctgatttaaaactaagactggcttgtggttaaatgaatatgttcagtttttgaattttaatagtaactccaattcagtaaatggtatcactgtttaccccttttaaagatatgattagacttcgttagtaatgttcaacttttcacaaagatggtgagtgccatcttaaaacttactggagattggttttatatttagatttatacggggttgtgattttttagtcgggggaagggtccgggttaaacgggaaataccggtttgggtcaggatggcctaaggggggggaaaaaaggggcagtctaatgggcaataggtattatcggtgaggtatggggttg

SEQ ID NO: 58414 - DNA, 1265 bp, Homo sapiens
aacagtatgattctagcctttgtctgtcgcgatcgtgatatatcgtcgtgacgtgaaaaaagagaattaaatatgggtgatgttgagaaaggcaagaagatttttattatgaagtgttcccagtgccacaccgttgaaaagggaggcaagcacaagactgggccaaatctccatggtctctttgggcggaagacaggtcaggcccctggatactcttacacagccgccaataagaacaaaggcatcatctggggagaggatacactgatggagtatttggagaatcccaagaagtacatccctggaacaaaaatgatctttgtcggcattaagaagaaggaagaaagggcagacttaatagcttatctcaaaaaagctactaatgagtaataattggccactgccttatttattacaaaacagaaatgtctcatgacttttttatgtgtaccatcctttaatagatctcatacaccagaattcagatcatgaatgactgacagaatattttgttgggcagtcctgatttaaaactaagactggcttgtggttaaatgaatatgttcagtttttgaattttaatagtaactccaattcagtaaatggtatcactgtttaccccttttaaagatatgattagacttcgttagtaatgttcaacttttcacaaagatggtgagtgccatcttaaaacttactggagattggttttatatttagatttatataactggttatgtgaatatatttaaatactggggaaattgcttcactgtcttagaaccaagcaagattcacctgtgttttgtgttcatgttcatttgcctcttaaaggcaagggttgaagataaataaggtagcaatgtctatagttttggccttaactatgccaatctaattataattccctgtatttaaaatggtttcttttacttattgaaaggcattttagtgtggtttatgtgtaatattaaagattattcaacacctctcacatcttacagatctataaggtcacatgcttttaaaatagtagcaagttaaacttcactcttgaattctttacaatctaagtcaaactaagttataatttaggattgtctttaaacagccattcagaaacaaaactgtagaactgtgtatttgattgggaatggtgcttttgccaacttaaaaggattaaagtaacggagatatacacaaattttaaaattatgtgtgatcacaagactaaagataattaaaaagaaaaccacagatcatga

SEQ ID NO: 58415 - DNA, 1548 bp, Homo sapiens
cacgtcagggcgcgggagcgcggagcgagtttggttgcacttacaccggtacttaagcgcggaccggcgtgtccttggacttagagagtggggacgtccggcttcggagcgggagtgttcgttgtgccagcgactaaaaagaggtgagagcgggtcgcggaggccgcacctggttagaggcagagctgtgggaggcgcgcacttgcgagcgaccgaaacccaagcggggagcattcgagtggagcccgcgctgggtgggagggcggggagtgaagaccctggactgtggtcagaccgagctgggcgagtaacggcttgaggtgcggcggagccctaactagggacagaattaaatatgggtgatgttgagaaaggcaagaagatttttattatgaagtgttcccagtgccacaccgttgaaaagggaggcaagcacaagactgggccaaatctccatggtctctttgggcggaagacaggtcaggcccctggatactcttacacagccgccaataagaacaaaggcatcatctggggagaggatacactgatggagtatttggagaatcccaagaagtacatccctggaacaaaaatgatctttgtcggcattaagaagaaggaagaaagggcagacttaatagcttatctcaaaaaagctactaatgagtaataattggccactgccttatttattacaaaacagaaatgtctcatgacttttttatgtgtaccatcctttaatagatctcatacaccagaattcagatcatgaatgactgacagaatattttgttgggcagtcctgatttaaaactaagactggcttgtggttaaatgaatatgttcagtttttgaattttaatagtaactccaattcagtaaatggtatcactgtttaccccttttaaagatatgattagacttcgttagtaatgttcaacttttcacaaagatggtgagtgccatcttaaaacttactggagattggttttatatttagatttatataactggttatgtgaatatatttaaatactggggaaattgcttcactgtcttagaaccaagcaagattcacctgtgttttgtgttcatgttcatttgcctcttaaaggcaagggttgaagataaataaggtagcaatgtctatagttttggccttaactatgccaatctaattataattccctgtatttaaaatggtttcttttacttattgaaaggcattttagtgtggtttatgtgtaatattaaagattattcaacacctctcacatcttacagatctataaggtcacatgcttttaaaatagtagcaagttaaacttcactcttgaattctttacaatctaagtcaaactaagttataatttaggattgtctttaaacagccattcagaaacaaaactgtagaactgtgtatttgattgggaatggtgcttttgccaacttaaaaggattaaagtaacggagatatacacaaattttaaaattatgtgtgatcacaagactaaagataattaaaaagaaaaccacagatcatga

SEQ ID NO: 58416 - DNA, 1297 bp, Homo sapiens
aaaaccatgtgtcgacattaggtgttcggatcctcacctgttcagtagtggcccggagtaaaacgagagttcttgttatgaaatgcagatgacaaatacgcaagacaatactgatatactgataaatgtagcgagatctcgacaacgaaccgacgtctgatattcgggatgtgacagacgcccgaaccagtgggccaaatctccatggtctctttgggcggaagacaggtcaggcccctggatactcttacacagccgccaataagaacaaaggcatcatctggggagaggatacactgatggagtatttggagaatcccaagaagtacatccctggaacaaaaatgatctttgtcggcattaagaagaaggaagaaagggcagacttaatagcttatctcaaaaaagctactaatgagtaataattggccactgccttatttattacaaaacagaaatgtctcatgacttttttatgtgtaccatcctttaatagatctcatacaccagaattcagatcatgaatgactgacagaatattttgttgggcagtcctgatttaaaactaagactggcttgtggttaaatgaatatgttcagtttttgaattttaatagtaactccaattcagtaaatggtatcactgtttaccccttttaaagatatgattagacttcgttagtaatgttcaacttttcacaaagatggtgagtgccatcttaaaacttactggagattggttttatatttagatttatataactggttatgtgaatatatttaaatactggggaaattgcttcactgtcttagaaccaagcaagattcacctgtgttttgtgttcatgttcatttgcctcttaaaggcaagggttgaagataaataaggtagcaatgtctatagttttggccttaactatgccaatctaattataattccctgtatttaaaatggtttcttttacttattgaaaggcattttagtgtggtttatgtgtaatattaaagattattcaacacctctcacatcttacagatctataaggtcacatgcttttaaaatagtagcaagttaaacttcactcttgaattctttacaatctaagtcaaactaagttataatttaggattgtctttaaacagccattcagaaacaaaactgtagaactgtgtatttgattgggaatggtgcttttgccaacttaaaaggattaaagtaacggagatatacacaaattttaaaattatgtgtgatcacaagactaaagataattaaaaagaaaaccacagatcatga

SEQ ID NO: 58417 - DNA, 1290 bp, Homo sapiens
cacgtcagggcgcgggagcgcggagcgagtttggttgcacttacaccggtacttaagcgcggaccggcgtgtccttggacttagagagtggggacgtccggcttcggagcgggagtgttcgttgtgccagcgactaaaaagagaattaaatatgggtgatgttgagaaaggcaagaagatttttattatgaagtgttcccagtgccacaccgttgaaaagggaggcaagcacaagactgggccaaatctccatggtctctttgggcggaagacaggtcaggcccctggatactcttacacagccgccaataagaacaaaggcatcatctggggagaggatacactgatggagtatttggagaatcccaagaagtacatccctggaacaaaaatgatctttgtcggcattaagaagaaggaagaaagggcagacttaatagcttatctcaaaaaagctactaatgagtaataattggccactgccttatttattacaaaacagaaatgtctcatgacttttttatgtgtaccatcctttaatagatctcatacaccagaattcagatcatgaatgactgacagaatattttgttgggcagtcctgatttaataactccaattcagtaaatggtatcactgtttaccccttttaaagatatgattagacttcgttagtaatgttcaacttttcacaaagatggtgagtgccatcttaaaacttactggagattggttttatatttagatttatataactggttatgtgaatatatttaaatactggggaaattgcttcactgtcttagaaccaagcaagattcacctgtgttttgtgttcatgttcatttgcctcttaaaggcaagggttgaagataaataaggtagcaatgtctatagttttggccttaactatgccaatctaattataattccctgtatttaaaatggtttcttttacttattgaaaggcattttagtgtggtttatgtgtaatattaaagattattcaacacctctcacatcttacagatctataaggtcacatgcttttaaaatagtagcaagttaaacttcactcttgaattctttacaatctaagtcaaactaagttataatttaggattgtctttaaacagccattcagaaacaaaactgtagaactgtgtatttgattgggaatggtgcttttgccaacttaaaaggattaaagtaacggagatatacacaaattttaaaattatgtgtgatcacaagactaaagataattaaaaagaaaaccacagatcatga

SEQ ID NO: 58418 - DNA, 1167 bp, Homo sapiens
cacgtcagggcgcgggagcgcggagcgagtttggttgcacttacaccggtacttaagcgcggaccggcgtgtccttggacttagagagtggggacgtccggcttcggagcgggagtgttcgttgtgccagcgactaaaaagaggcatcatctggggagaggatacactgatggagtatttggagaatcccaagaagtacatccctggaacaaaaatgatctttgtcggcattaagaagaaggaagaaagggcagacttaatagcttatctcaaaaaagctactaatgagtaataattggccactgccttatttattacaaaacagaaatgtctcatgacttttttatgtgtaccatcctttaatagatctcatacaccagaattcagatcatgaatgactgacagaatattttgttgggcagtcctgatttaaaactaagactggcttgtggttaaatgaatatgttcagtttttgaattttaatagtaactccaattcagtaaatggtatcactgtttaccccttttaaagatatgattagacttcgttagtaatgttcaacttttcacaaagatggtgagtgccatcttaaaacttactggagattggttttatatttagatttatataactggttatgtgaatatatttaaatactggggaaattgcttcactgtcttagaaccaagcaagattcacctgtgttttgtgttcatgttcatttgcctcttaaaggcaagggttgaagataaataaggtagcaatgtctatagttttggccttaactatgccaatctaattataattccctgtatttaaaatggtttcttttacttattgaaaggcattttagtgtggtttatgtgtaatattaaagattattcaacacctctcacatcttacagatctataaggtcacatgcttttaaaatagtagcaagttaaacttcactcttgaattctttacaatctaagtcaaactaagttataatttaggattgtctttaaacagccattcagaaacaaaactgtagaactgtgtatttgattgggaatggtgcttttgccaacttaaaaggattaaagtaacggagatatacacaaattttaaaattatgtgtgatcacaagactaaagataattaaaaagaaaaccacagatcatga

SEQ ID NO: 58419 - DNA, 1332 bp, Homo sapiens
catggactgtaaatctaaagacaggggttaggcctctttttaaaaaaaaaaaaataaagaaaaaaaaagagacattttgagccggccttcatcgccgctgaaacgatgttgccaaaaccagttggtgggggcagggcggggcccaatgacgtggagccgaaatcgtggcgatgagaacgtcgtgttcgccgcagagaagaactccgggcgaccgcccgacactgagagtgctcgtgcgtgtatctcctagaccagaataaataaagacgccggggggggtcatccgggggtgttgtagggataccaatcgctagagagggatgtcggaggaggtccctaaagggggtatccttcctcaagagagggggctccaagagagcaggttgtgcggtataaataacccccgccgcagggggcagacttaatagcttatctcaaaaaagctactaatgagtaataattggccactgccttatttattacaaaacagaaatgtctcatgacttttttatgtgtaccatcctttaatagatctcatacaccagaattcagatcatgaatgactgacagaatattttgttgggcagtcctgatttaaaactaagactggcttgtggttaaatgaatatgttcagtttttgaattttaatagtaactccaattcagtaaatggtatcactgtttaccccttttaaagatatgattagacttcgttagtaatgttcaacttttcacaaagatggtgagtgccatcttaaaacttactggagattggttttatatttagatttatataactggttatgtgaatatatttaaatactggggaaattgcttcactgtcttagaaccaagcaagattcacctgtgttttgtgttcatgttcatttgcctcttaaaggcaagggttgaagataaataaggtagcaatgtctatagttttggccttaactatgccaatctaattataattccctgtatttaaaatggtttcttttacttattgaaaggcattttagtgtggtttatgtgtaatattaaagattattcaacacctctcacatcttacagatctataaggtcacatgcttttaaaatagtagcaagttaaacttcactcttgaattctttacaatctaagtcaaactaagttataatttaggattgtctttaaacagccattcagaaacaaaactgtagaactgtgtatttgattgggaatggtgcttttgccaacttaaaaggattaaagtaacggagatatacacaaattttaaaattatgtgtgatcacaagactaaagataattaaaaagaaaaccacagatcatga

SEQ ID NO: 58420 - DNA, 1282 bp, Homo sapiens
cacgtcagggcgcgggagcgcggagcgagtttggttgcacttacaccggtacttaagcgcggaccggcgtgtccttggacttagagagtggggacgtccggcttcggagcgggagtgttcgttgtgccagcgactaaaaagagaattaaatatgggtgatgttgagaaaggcaagaagatttttattatgaagtgttcccagtgccacaccgttgaaaagggaggcaagcacaagactgggccaaatctccatggtctctttgggcggaagacaggtcaggcccctggatactcttacacagccgccaataagaacaaaggcatcatctggggagaggatacactgatggagtatttggagaatcccaagaagtacatccctggaacaaaaatgatctttgtcggcattaagaagaaggaagaaagggcagacttaatagcttatctcaaaaaagctactaatgagtaataattggccactgccttatacaccagaattcagatcatgaatgactgacagaatattttgttgggcagtcctgatttaaaactaagactggcttgtggttaaatgaatatgttcagtttttgaattttaatagtaactccaattcagtaaatggtatcactgtttaccccttttaaagatatgattagacttcgttagtaatgttcaacttttcacaaagatggtgagtgccatcttaaaacttactggagattggttttatatttagatttatataactggttatgtgaatatatttaaatactggggaaattgcttcactgtcttagaaccaagcaagattcacctgtgttttgtgttcatgttcatttgcctcttaaaggcaagggttgaagataaataaggtagcaatgtctatagttttggccttaactatgccaatctaattataattccctgtatttaaaatggtttcttttacttattgaaaggcattttagtgtggtttatgtgtaatattaaagattattcaacacctctcacatcttacagatctataaggtcacatgcttttaaaatagtagcaagttaaacttcactcttgaattctttacaatctaagtcaaactaagttataatttaggattgtctttaaacagccattcagaaacaaaactgtagaactgtgtatttgattgggaatggtgcttttgccaacttaaaaggattaaagtaacggagatatacacaaattttaaaattatgtgtgatcacaagactaaagataattaaaaagaaaaccacagatcatga

SEQ ID NO: 58421 - DNA, 1431 bp, Homo sapiens
cacgtcagggcgcgggagcgcggagcgagtttggttgcacttacaccggtacttaagcgcggaccggcgtgtccttggacttagagagtggggacgtccggcttcggagcgggagtgttcgttgtgccagcgactaaaaagagaattaaatatgggtgatgttgagaaaggcaagaagatttttattatgaagtgttcccagtgccacaccgttgaaaagggaggcaagcacaagactgggccaaatctccatggtctctttgggcggaagacaggtcaggcccctggatactcttacacagccgccaataagaacaaagagggccatccaattcttgggggaaggaagggaattaccactggaattggcgaaggttaattttgggaagaattcccacaagaaaggttacctttcctgggtgaaccaacaacacgtgcactcctcaggcgcgggccgactacaaggcaaccgaacgggaaaagaacaagggggcagaccttacactaacgcctttattcctccgacaaaaaaggtctaatctaacttggacgttaacctaaattcgggccaccttttattacaaaacagaaatgtctcatgacttttttatgtgtaccatcctttaatagatctcatacaccagaattcagatcatgaatgactgacagaatattttgttgggcagtcctgatttaaaactaagactggcttgtggttaaatgaatatgttcagtttttgaattttaatagtaactccaattcagtaaatggtatcactgtttaccccttttaaagatatgattagacttcgttagtaatgttcaacttttcacaaagatggtgagtgccatcttaaaacttactggagattggttttatatttagatttatataactggttatgtgaatatatttaaatactggggaaattgcttcactgtcttagaaccaagcaagattcacctgtgttttgtgttcatgttcatttgcctcttaaaggcaagggttgaagataaataaggtagcaatgtctatagttttggccttaactatgccaatctaattataattccctgtatttaaaatggtttcttttacttattgaaaggcattttagtgtggtttatgtgtaatattaaagattattcaacacctctcacatcttacagatctataaggtcacatgcttttaaaatagtagcaagttaaacttcactcttgaattctttacaatctaagtcaaactaagttataatttaggattgtctttaaacagccattcagaaacaaaactgtagaactgtgtatttgattgggaatggtgcttttgccaacttaaaaggattaaagtaacggagatatacacaaattttaaaattatgtgtgatcacaagactaaagataattaaaaagaaaaccacagatcatga

SEQ ID NO: 58422 - DNA, 791 bp, Homo sapiens
cacgtcagggcgcgggagcgcggagcgagtttggttgcacttacaccggtacttaagcgcggaccggcgtgtccttggacttagagagtggggacgtccggcttcggagcgggagtgttcgttgtgccagcgactaaaaagagaattaaatatgggtgatgttgagaaaggcaagaagatttttattatgaagtgttcccagtgccacaccgttgaaaagggaggcaagcacaagactgggccaaatctccatggtctctttgggcggaagacaggtcaggcccctggatactcttacacagccgccaataagaacaaaggcatcatctggggagaggatacactgatggagtatttggagaatcccaagaagtacatccctggaacaaaaatgatctttgtcggcattaagaagaaggaagaaagggcagacttaatagcttatctcaaaaaagctactaatgagtaataattggccactgccttatttattacaaaacagaaatgtctcatgacttttttatgtgtcttactggcctgcattctcagaaagttaggcattcctaccctctaggattgaattgggacccctttcctgtaacatatttctggtgaccacagaagggactatagtgcagaaacgttgacccaacggctacctttgcgtaagtgttggggtcctgtaacatatttctggcaaaccacagaaaggatgatactgaagaaatccccccaaccccaaagaaatagactgcagcactgattggacgactttgggtaagtgatggggt

SEQ ID NO: 58423 - DNA, 856 bp, Homo sapiens
cacgtcagggcgcgggagcgcggagcgagtttggttgcacttacaccggtacttaagcgcggaccggcgtgtccttggacttagagagtggggacgtccggcttcggagcgggagtgttcgttgtgccagcgactaaaaagagaattaaatatgggtgatgttgagaaaggcaagaagatttttattatgaagtgttcccagtgccacaccgttgaaaagggaggcaagcacaagactgggccaaatctccatggtctctttgggcggaagacaggtcaggcccctggatactcttacacagccgccaataagaacaaaggcatcatctggggagaggatacactgatggagtatttggagaatcccaagaagtacatccctggaacaaaaatgatctttgtcggcattaagaagaaggaagaaagggcagacttaatagcttatctcaaaaaagctaaacttaaaaaatttgggggaacgggggttttttaaaaaaaaatttttttacacaaacaaagtttttttgtgttggggggggggggggggaggcacaacacccaaaaaaaaaaaatctcttgttgtgtggtgggggcgccacaacacaaccccaccgacgaggtagttgtattgacatgtgagaaagacaaacacggtttttttgtggaaggagagagaaagaatgatagatgaaagaaggggatttttttttttttggaaaggaagaacaaaaagaaaaagagctcgtcgttcgaggaaaaaagagagagagaaaagaaaggagacgaaacaaagagaaagagaatagagagaggagaagacgaaggaagaaaaagagagggtgggggggggaggaaa

SEQ ID NO: 58424 - DNA, 854 bp, Homo sapiens
  misc_feature (484)..(484): n is a, c, g, or t
cacgtcagggcgcgggagcgcggagcgagtttggttgcacttacaccggtacttaagcgcggaccggcgtgtccttggacttagagagtggggacgtccggcttcggagcgggagtgttcgttgtgccagcgactaaaaagagaattaaatatgggtgatgttgagaaaggcaagaagatttttattatgaagtgttcccagtgccacaccgttgaaaagggaggcaagcacaagactgggccaaatctccatggtctctttgggcggaagacaggtcaggcccctggatactcttacacagccgccaataagaacaaaggcatcatctggggagaggatacactgatggagtatttggagaatcccaagaagtacatccctggaacaaaaatgatctttgtcggcattaagaagaaggaagaaagggcagacttaatagcttatctcaaaaaaaaaaagcttttttactaatgagtaataatnggccacttggccccttttttaactttttctcaaaccttttttcttaaaaacaccccccaaaaaaacacccaccccacacaaaacacccccccaacacacgccgggggggccccacacacacccgccacaacccccccaaccacacacgcgctgtcctcttcgcgggcggcgccggcgcccttctttctttcccacccccccgcacacgtgtcttttctgctctcccccccccccccacgacaacgacaccccccttcccttcttcgccgcgccggggggggaccacacaacaaccacccaccaaccctccccgccacctactgccatctcgtcccctcctcccacaccactctccacaaccatccactcc

SEQ ID NO: 58425 - DNA, 799 bp, Homo sapiens
aataaccgatgcattctttcttgtttaggcatcatctggggagaggatacactgatggagtatttggagaatcccaagaagtacatccctggaacaaaaatgatctttgtcggcattaagaagaaggaagaaagggcagacttaatagcttatctcaaaaaagctactaatgagtaataattggccactgccttatttattacaaaacagaaatgtctcatgacttttttatgtgtaccatcctttaatagatctcatacaccagaattcagatcatgaatgactgacagaatattttgttgggcagtcctgatttaaaactaagactggcttgtggttaaatgaatatgttcagtttttgaattttaatagtaactccaattcagtaaatggtatcactgtttaccccttttaaagatatgattagacttcgttagtaatgttcaacttttcacaaagatggtgagtgccatcttaaaacttactggagattggttttatatttagatttatataactggttatgtgaatatatttaaatactggggaaattgcttcactgtcttagaaccaagcaagattcacctgtgttttgtgttcatgttcatttgcctcttaaaggcaagggttgaagataaataaggtagcaatgtctatagttttggccttaactatgccaatctaattataattccctgtatttaaaatggtttcttttacttattgaaaggcattttagtgtggtttatgtgtaatattaaagattattcaacacctctcacatcttacagatctataa

SEQ ID NO: 58426 - DNA, 2098 bp, Homo sapiens
cattggttggtggcgttgctgctcgcccgtgtgataggtttccacagtaatctttatgctgcattagagacatagatacagaggtgctgtactgtgttcttgcaacggtggaggtgctcggctggtaacgttaaagaaggaataaggcgcccgacagaaggcgtttgtctttgttgtggagcatcagcgttaaggacagccggctgctgtgggagcaatttcctgctgcagagagcattttaagaaaggacagcattcctgtgacctctgcctaccatccataaaatactcattcccctctcagctctgcctgcagttgaacacaaagacctggaggagactcccacctccttcagggagaagaaaggaggcagcgaagcagattaaaggaacttgtggcttgtggcctttttgtgcaagggccgcctggaaggggagaaaagtgtatgaaagccaccgtggcggttaatgagctgtgagatgaggcgctgctgcggccgctgctgctgacactcgctcccaggctgcacccgccgcccttggcgcttcatgtacatgtgtctattcaggccttgcggaggcgcccagaagagcatccaacacggctgccggggaaagaccgcccaccatgcccacggagaccctacagacaggtagcatggtgaagccggtcagccccgcgggcaccttcacctctgctgtgcccctgcgcatcctgaacaaggggccagactacttccgcaggcaggccgagcccaaccccaagaggctcagcgccgtggagaggctggaggccgacaaggccaagtacgtcaagagccaggaggtgatcaacgccaagcaggagcccgtgaagcccgccgtgctggccaagcccccggtgtgcccggctgccaagcgcgcactgggcagccccacgctcaaagtgttcggcaaccacgccaagaccgagagcggcgtgcagagggagaacctgaagctggagatcctgaagaacatcatcaatagctccgagggctctagctcgggctcggggcacaagcacagctcccgcaactggccgccccaccggtcggaagccactgacctgcaccgtcactccttcgcggagtccctgaaggtctaccccacgcagggccgcaggagcccgcaggagggcggctcccacgtgggcaggagactgctggagcagtcagccgagtccttcctccacgtgtcccacagctcttcggacatccgcaaggtgaccagcgtgaagcccctcaaggccatcccctgcagtagctctgcccctcccctgcctcccaagcccaaaatcgcagccatcgcctccatgaagtcccccgaggccgaccctgtggaaccagcttgtggagtcagccgaagaccctccctccagcggtctaagtcagacttgagtgacagatatttccgagtggacgcggacgtggagaggttcttcaactactgtggactggacccggaagagctggaaaacctgggaatggaaaactttgcaagggctaattctgacataatatccctcaacttccgcagcgcaagcatgatcagctcagactgtgaacagtctcaggacagtaacagtgaccttagaaatgatgacagtgccaatgaccgcgtgccgtatggcatttctgccatcgaaagaaatgctagaatcatcaagtggttatatagcatcaaacaagctagagagtcacagaaggtctcccatgtgtaagacagtgcgtggaaaggagggagcgtgggtctctgtgcttacgcagttgtgaaggttgtgaggtctccttgaagtgttgtgagcttctccactctttgtgttgcttgttgtgcaatgttttcaagttgcatgcttgtcaacatggggactgacctggcttccacgtcaccatcgctacagagcctggctgaacacgcgtcatctgccaaaagtttcaggccagaatctaattagggctttgctcgtaagcaaaactgtttacatgaaaatggtatacaacttcttcgatatttatgtggttcttgtgtttttatatcccgcgctattgtgtcttaattaaaagttttatcaactggc

SEQ ID NO: 58427 - DNA, 879 bp, Homo sapiens
cggggttccccaggctcatggaaatacacaggctctcatttagtttgttttccattgaatacatgaagttggcctcatactttgatttttgtttccttttggaatcagttttagtttcctggagcagctgaattagaaacaggctttgaacctagtttatccttagataaatacaatgtctgtgattcaaggaaaaacaatttcttttgaatgataccttttaatcacttttattctccagcataatttttaatctgcgtctttttccttttagaaatctccaaattggacatccagagcagcattcttgttctgtctacgtcttgaattagaaactatcaagctctgtaagtcctgggtgttcacttgcagtggcttttttacctgagaattctgaacactcagtggacatttaacttccccaattgggactgttagaattataatcactcatggggataagtaaaacagaaacagtgtactgttccccaactactgaatatgtgaatattctcactggacatgggacctagtatatatatttttaattattaacataatgtaaatattgcaaacaaataaatgttacagataggtagcatagaatgcaactttctactcaaaagccactctccagagaaaatattggttagatttaggtgcacattctttaattattttttctccatgcacatactaatgttcaggtgttcagtctgtattaaatgccttaaccctatgagtgaaagtattggggtaaagatgacttcataatttctggtaaatattgtgacttatttttgttcttggcgtttgttaatctgaataatgatgtctatgagttgggggccactggcacacctatgcacttggtttatt

SEQ ID NO: 58428 - DNA, 667 bp, Homo sapiens
ccctcactctccggcgaagcctgcctgagccctcccactcggtgcagaccgaaccatcgcggccgccgccagccgggcccttcgcggccgcgcgtcctgggcccgttccgccagccccgtctgctctctacccgcggccccgcggcggcgaccgtgaacactcggcggcccctacagcccgctctcggcccttcgtccctcgcgggccccgactctccctccttgcagtcccccggagcctggctcccggctcgggccgcaccgccagggactggggtgagcggcccagaaatctccaaattggacatccagagcagcattcttgttctgtctacgtcttgaattagaaactatcaagctctgtaagtcctgaaaaggaaataaaagcaatttcctgctgcagagagcattttaagaaaggacagcattcctgtgacctctgcctaccatccataaaatactcattcccctctcagggcaaactttgttaaaaggaagtcttacatggaggacttaaacaaaacagataaaagctgagtggatctgatcagagtggctggggcttggagcttcaccctatggcctttcccagaacccttcgttcccacatgctccacatcctcagctctgcagactccagcttgaaagccttcacccttgaaaaaca

SEQ ID NO: 58429 - DNA, 561 bp, Homo sapiens
ccctcactctccggcgaagcctgcctgagccctcccactcggtgcagaccgaaccatcgcggccgccgccagccgggcccttcgcggccgcgcgtcctgggcccgttccgccagccccgtctgctctctacccgcggccccgcggcggcgaccgtgaacactcggcggcccctacagcccgctctcggcccttcgtccctcgcgggccccgactctccctccttgcagtcccccggagcctggctcccggctcgggccgcaccgccagggactggggtgagcggcccagaaatctccaaattggacatccagagcagcattcttgttctgtctacgtcttgaattagaaactatcaagctctgtaagtcctgaaaaggaaataaaagcaatttcctgctgcagagagcattttaagaaaggacagcattcctgtgacctctgcctaccatccataaaatactcattcccctctcagaatttaagcttcagtggagcagcgatcttatccacctcatccattactctattgccaatgcccagaacagtgcccagaacacata

SEQ ID NO: 58430 - DNA, 274 bp, Homo sapiens
cgcaaggcccgggtcgtccccctcgcgcggtcgggaaaacagctactgagctgcggcccacgaccctcggccgcgcaggggcggggcgggggcgctgcggggtttctctgttgctagagccgtgatgtcacccgcccctcctaacccgcggttggttgttttgtgtttcagctctgcctgcagttgaacacaaagacctggaggagactcccacctccttcagggagaagaaaggaggcagctcgcccctgagttagcagctcgcccctgagtt

SEQ ID NO: 58431 - DNA, 4118 bp, Homo sapiens
  misc_feature (3253)..(3253): n is a, c, g, or t
  misc_feature (3952)..(3952): n is a, c, g, or t
  misc_feature (4054)..(4054): n is a, c, g, or t
cattggttggtggcgttgctgctcgcccgtgtgataggtttccacagtaatctttatgctgcattagagacatagatacagaggtgctgtactgtgttcttgcaacggtggaggtgctcggctggtaacgttaaagaaggaataaggcgcccgacagaaggcgtttgtctttgttgtggagcatcagcgttaaggacagccggctgctgtgggagcaatttcctgctgcagagagcattttaagaaaggacagcattcctgtgacctctgcctaccatccataaaatactcattcccctctcagctctgcctgcagttgaacacaaagacctggaggagactcccacctccttcagggagaagaaaggaggcagcgaagcagattaaaggaacttgtggcttgtggcctttttgtgcaagggccgcctggaaggggagaaaagtgtatgaaagccaccgtggcggttaatgagctgtgagatgaggcgctgctgcggccgctgctgctgacactcgctcccaggctgcacccgccgcccttggcgcttcatgtacatgtgtctattcaggccttgcggaggcgcccagaagagcatccaacacggctgccggggaaagaccgcccaccatgcccacggagaccctacagacaggtagcatggtgaagccggtcagccccgcgggcaccttcacctctgctgtgcccctgcgcatcctgaacaaggggccagactacttccgcaggcaggccgagcccaaccccaagaggctcagcgccgtggagaggctggaggccgacaaggccaagtacgtcaagagccaggaggtgatcaacgccaagcaggagcccgtgaagcccgccgtgctggccaagcccccggtgtgcccggctgccaagcgcgcactgggcagccccacgctcaaagtgttcggcaaccacgccaagaccgagagcggcgtgcagagggagaacctgaagctggagatcctgaagaacatcatcaatagctccgagggctctagctcgggctcggggcacaagcacagctcccgcaactggccgccccaccggtcggaagccactgacctgcaccgtcactccttcgcggagtccctgaaggtctaccccacgcagggccgcaggagcccgcaggagggcggctcccacgtgggcaggagactgctggagcagtcagccgagtccttcctccacgtgtcccacagctcttcggacatccgcaaggtgaccagcgtgaagcccctcaaggccatcccctgcagtagctctgcccctcccctgcctcccaagcccaaaatcgcagccatcgcctccatgaagtcccccgaggccgaccctgtggaaccagcttgtggagtcagccgaagaccctccctccagcggtctaagtcagacttgagtgacagatatttccgagtggacgcggacgtggagaggttcttcaactactgtggactggacccggaagagctggaaaacctgggaatggaaaactttgcaagggctaattctgacataatatccctcaacttccgcagcgcaagcatgatcagctcagactgtgaacagtctcaggacagtaacagtgaccttagaaatgatgacagtgccaatgaccgcgtgccgtatggcatttctgccatcgaaagaaatgctagaatcatcaagtggttatatagcatcaaacaagctagagagtcacagaaggtctcccatgtgtaagacagtgcgtggaaaggagggagcgtgggtctctgtgcttacgcagttgtgaaggttgtgaggtctccttgaagtgttgtgagcttctccactctttgtgttgcttgttgtgcaatgttttcaagttgcatgcttgtcaacatggggactgacctggcttccacgtcaccatcgctacagagcctggctgaacacgcgtcatctgccaaaagtttcaggccagaatctaattagggctttgctcgtaagcaaaactgtttacatgaaaatggtatacaacttcttcgatatttatgtggttcttgtgtttttatatcccgcgctattgtgtcttaattaaaagttttatcaactggcttttaagttgagagcagaatctttttgaaataaaaagccactttgcctacatgtgagactattccagtgggacagtaaatgggatctgctaccaaacagataatgactgaccgaacatagaaccaggctgggttttctgtggaataaagtggtgagcctgacgttaatcgtttacatgttgaaattctcttgccacttagtgaagcagtcattggggtaacaatgctacgttttgtgtccgattcagtgtgtaaacgttggtggttctatgtaatactgaccccaaggaaagacgatcagatacaaagaaagatggttaaatctaggaggttgggtgtttgggggttttgttgatgttgttctgattgggataattcagaaattcctaatattatctttcgacagaatgaccaccctaaaacaaatactgaatgcctttaaaaaaaaaaaagttgtggttttttgttttttttttttttttttttggtcgagaactactaatttcatgctatttctttctctctccctttgttgttatttgatttgggggaagggagtgaggcttgtgcagatttgagctatctgaagacatgaacagaagtcaaataccagccatatcagtagagccttccattcaaaagtgaacacacttggtagctgaaccatatctgagcagcgtgattctgttgtcttgcatatgttattctctcaggctgtggatctttgttacagctctaggaaactgtagaaatacaatgctatgtagcttttccaccccatggtctctagtgctgcctatcaacttgtccccttttttcccaataacctgtcttccaggtggtacagttagctgtcactcagctgacaccatgatgtggcagcagagagggaaacctacaagtggtttgcctcattgcctttgccacatctgaagttctcagcagcactaccttagacttcatgagctaataggaaactttttatggtgtaaatgctgtaagactttgtacatacttcagttgttatgaaatctttaaagaaaaaaagaaaaagttacgctaataaattgctgtggtgcaggcactaatggtggtggtttctctttgtcctgtattgcacaaaagtttaactttggactatgaaacagaagcaganttttgataggcttgaagaaacattatttcattaagttattttcaccatattccaattactctaaacaccagtgttcttaattgtggctctagcaatgtgcttttgctaaactgattacatcaaggttcctaaaatgtgctgcagcatctcagttcacacttgtgttatttttgtcttttcttaaacatcaggattttttacatcttccacacaactcttcagttataaatattttgagttctcaccttggaggcacacctttgaaatgtatggcttcgtttttatttgtaccagcccaacatccctaccatggcatgtgttcacacactcgctcctccactccttccttcattcctcttcaaaatgtcactgtttgagtgactcatttcaggtatcatggtaggcacgggactgccatagtcaacaacacagtctctgcctcaaggaacttagattttcccctttattttaagagaaataacattactcttagtggacatgctctatctgttatatttggacaatgagtattccatgattatttattgcatcaagttatttgaaatttaatgcttcttacaaaattccatatactatgcaaatgtaaaatgaagccctatttaaaaggtaattttcagaaacaaattatatgattctcagctattactgtttataaatatcttgcttctgaaaagcaantttgcttccttgactctttcccctggttttgaattctgcctggattttttattcatgttcagtaaaactaaaaccctgcttcccagaagaactgttttggantgcagctatgagtgggggtgatacaatgtgttcaatataatagaataaaaataagttttctaaa

SEQ ID NO: 58432 - DNA, 4143 bp, Homo sapiens
  misc_feature (3278)..(3278): n is a, c, g, or t
  misc_feature (3977)..(3977): n is a, c, g, or t
  misc_feature (4079)..(4079): n is a, c, g, or t
cattggttggtggcgttgctgctcgcccgtgtgataggtttccacagtaatctttatgctgcattagagacatagatacagaggtgctgtactgtgttcttgcaacggtggaggtgctcggctggtaacgttaaagaaggaataaggcgcccgacagaaggcgtttgtctttgttgtggagcatcagcgttaaggacagccggctgctgtgggaggtcagtgaaggaggctcagttcatgcaatttcctgctgcagagagcattttaagaaaggacagcattcctgtgacctctgcctaccatccataaaatactcattcccctctcagctctgcctgcagttgaacacaaagacctggaggagactcccacctccttcagggagaagaaaggaggcagcgaagcagattaaaggaacttgtggcttgtggcctttttgtgcaagggccgcctggaaggggagaaaagtgtatgaaagccaccgtggcggttaatgagctgtgagatgaggcgctgctgcggccgctgctgctgacactcgctcccaggctgcacccgccgcccttggcgcttcatgtacatgtgtctattcaggccttgcggaggcgcccagaagagcatccaacacggctgccggggaaagaccgcccaccatgcccacggagaccctacagacaggtagcatggtgaagccggtcagccccgcgggcaccttcacctctgctgtgcccctgcgcatcctgaacaaggggccagactacttccgcaggcaggccgagcccaaccccaagaggctcagcgccgtggagaggctggaggccgacaaggccaagtacgtcaagagccaggaggtgatcaacgccaagcaggagcccgtgaagcccgccgtgctggccaagcccccggtgtgcccggctgccaagcgcgcactgggcagccccacgctcaaagtgttcggcaaccacgccaagaccgagagcggcgtgcagagggagaacctgaagctggagatcctgaagaacatcatcaatagctccgagggctctagctcgggctcggggcacaagcacagctcccgcaactggccgccccaccggtcggaagccactgacctgcaccgtcactccttcgcggagtccctgaaggtctaccccacgcagggccgcaggagcccgcaggagggcggctcccacgtgggcaggagactgctggagcagtcagccgagtccttcctccacgtgtcccacagctcttcggacatccgcaaggtgaccagcgtgaagcccctcaaggccatcccctgcagtagctctgcccctcccctgcctcccaagcccaaaatcgcagccatcgcctccatgaagtcccccgaggccgaccctgtggaaccagcttgtggagtcagccgaagaccctccctccagcggtctaagtcagacttgagtgacagatatttccgagtggacgcggacgtggagaggttcttcaactactgtggactggacccggaagagctggaaaacctgggaatggaaaactttgcaagggctaattctgacataatatccctcaacttccgcagcgcaagcatgatcagctcagactgtgaacagtctcaggacagtaacagtgaccttagaaatgatgacagtgccaatgaccgcgtgccgtatggcatttctgccatcgaaagaaatgctagaatcatcaagtggttatatagcatcaaacaagctagagagtcacagaaggtctcccatgtgtaagacagtgcgtggaaaggagggagcgtgggtctctgtgcttacgcagttgtgaaggttgtgaggtctccttgaagtgttgtgagcttctccactctttgtgttgcttgttgtgcaatgttttcaagttgcatgcttgtcaacatggggactgacctggcttccacgtcaccatcgctacagagcctggctgaacacgcgtcatctgccaaaagtttcaggccagaatctaattagggctttgctcgtaagcaaaactgtttacatgaaaatggtatacaacttcttcgatatttatgtggttcttgtgtttttatatcccgcgctattgtgtcttaattaaaagttttatcaactggcttttaagttgagagcagaatctttttgaaataaaaagccactttgcctacatgtgagactattccagtgggacagtaaatgggatctgctaccaaacagataatgactgaccgaacatagaaccaggctgggttttctgtggaataaagtggtgagcctgacgttaatcgtttacatgttgaaattctcttgccacttagtgaagcagtcattggggtaacaatgctacgttttgtgtccgattcagtgtgtaaacgttggtggttctatgtaatactgaccccaaggaaagacgatcagatacaaagaaagatggttaaatctaggaggttgggtgtttgggggttttgttgatgttgttctgattgggataattcagaaattcctaatattatctttcgacagaatgaccaccctaaaacaaatactgaatgcctttaaaaaaaaaaaagttgtggttttttgttttttttttttttttttttggtcgagaactactaatttcatgctatttctttctctctccctttgttgttatttgatttgggggaagggagtgaggcttgtgcagatttgagctatctgaagacatgaacagaagtcaaataccagccatatcagtagagccttccattcaaaagtgaacacacttggtagctgaaccatatctgagcagcgtgattctgttgtcttgcatatgttattctctcaggctgtggatctttgttacagctctaggaaactgtagaaatacaatgctatgtagcttttccaccccatggtctctagtgctgcctatcaacttgtccccttttttcccaataacctgtcttccaggtggtacagttagctgtcactcagctgacaccatgatgtggcagcagagagggaaacctacaagtggtttgcctcattgcctttgccacatctgaagttctcagcagcactaccttagacttcatgagctaataggaaactttttatggtgtaaatgctgtaagactttgtacatacttcagttgttatgaaatctttaaagaaaaaaagaaaaagttacgctaataaattgctgtggtgcaggcactaatggtggtggtttctctttgtcctgtattgcacaaaagtttaactttggactatgaaacagaagcaganttttgataggcttgaagaaacattatttcattaagttattttcaccatattccaattactctaaacaccagtgttcttaattgtggctctagcaatgtgcttttgctaaactgattacatcaaggttcctaaaatgtgctgcagcatctcagttcacacttgtgttatttttgtcttttcttaaacatcaggattttttacatcttccacacaactcttcagttataaatattttgagttctcaccttggaggcacacctttgaaatgtatggcttcgtttttatttgtaccagcccaacatccctaccatggcatgtgttcacacactcgctcctccactccttccttcattcctcttcaaaatgtcactgtttgagtgactcatttcaggtatcatggtaggcacgggactgccatagtcaacaacacagtctctgcctcaaggaacttagattttcccctttattttaagagaaataacattactcttagtggacatgctctatctgttatatttggacaatgagtattccatgattatttattgcatcaagttatttgaaatttaatgcttcttacaaaattccatatactatgcaaatgtaaaatgaagccctatttaaaaggtaattttcagaaacaaattatatgattctcagctattactgtttataaatatcttgcttctgaaaagcaantttgcttccttgactctttcccctggttttgaattctgcctggattttttattcatgttcagtaaaactaaaaccctgcttcccagaagaactgttttggantgcagctatgagtgggggtgatacaatgtgttcaatataatagaataaaaataagttttctaaa

SEQ ID NO: 58433 - DNA, 4290 bp, Homo sapiens
  misc_feature (3425)..(3425): n is a, c, g, or t
  misc_feature (4124)..(4124): n is a, c, g, or t
  misc_feature (4226)..(4226): n is a, c, g, or t
ccctcactctccggcgaagcctgcctgagccctcccactcggtgcagaccgaaccatcgcggccgccgccagccgggcccttcgcggccgcgcgtcctgggcccgttccgccagccccgtctgctctctacccgcggccccgcggcggcgaccgtgaacactcggcggcccctacagcccgctctcggcccttcgtccctcgcgggccccgactctccctccttgcagtcccccggagcctggctcccggctcgggccgcaccgccagggactggggtgagcggcccagaaatctccaaattggacatccagagcagcattcttgttctgtctacgtcttgaattagaaactatcaagctctgtaagtcctgaaaaggaaataaaagcaatttcctgctgcagagagcattttaagaaaggacagcattcctgtgacctctgcctaccatccataaaatactcattcccctctcagctctgcctgcagttgaacacaaagacctggaggagactcccacctccttcagggagaagaaaggaggcagcgaagcagattaaaggaacttgtggcttgtggcctttttgtgcaagggccgcctggaaggggagaaaagtgtatgaaagccaccgtggcggttaatgagctgtgagatgaggcgctgctgcggccgctgctgctgacactcgctcccaggctgcacccgccgcccttggcgcttcatgtacatgtgtctattcaggccttgcggaggcgcccagaagagcatccaacacggctgccggggaaagaccgcccaccatgcccacggagaccctacagacaggtagcatggtgaagccggtcagccccgcgggcaccttcacctctgctgtgcccctgcgcatcctgaacaaggggccagactacttccgcaggcaggccgagcccaaccccaagaggctcagcgccgtggagaggctggaggccgacaaggccaagtacgtcaagagccaggaggtgatcaacgccaagcaggagcccgtgaagcccgccgtgctggccaagcccccggtgtgcccggctgccaagcgcgcactgggcagccccacgctcaaagtgttcggcaaccacgccaagaccgagagcggcgtgcagagggagaacctgaagctggagatcctgaagaacatcatcaatagctccgagggctctagctcgggctcggggcacaagcacagctcccgcaactggccgccccaccggtcggaagccactgacctgcaccgtcactccttcgcggagtccctgaaggtctaccccacgcagggccgcaggagcccgcaggagggcggctcccacgtgggcaggagactgctggagcagtcagccgagtccttcctccacgtgtcccacagctcttcggacatccgcaaggtgaccagcgtgaagcccctcaaggccatcccctgcagtagctctgcccctcccctgcctcccaagcccaaaatcgcagccatcgcctccatgaagtcccccgaggccgaccctgtggaaccagcttgtggagtcagccgaagaccctccctccagcggtctaagtcagacttgagtgacagatatttccgagtggacgcggacgtggagaggttcttcaactactgtggactggacccggaagagctggaaaacctgggaatggaaaactttgcaagggctaattctgacataatatccctcaacttccgcagcgcaagcatgatcagctcagactgtgaacagtctcaggacagtaacagtgaccttagaaatgatgacagtgccaatgaccgcgtgccgtatggcatttctgccatcgaaagaaatgctagaatcatcaagtggttatatagcatcaaacaagctagagagtcacagaaggtctcccatgtgtaagacagtgcgtggaaaggagggagcgtgggtctctgtgcttacgcagttgtgaaggttgtgaggtctccttgaagtgttgtgagcttctccactctttgtgttgcttgttgtgcaatgttttcaagttgcatgcttgtcaacatggggactgacctggcttccacgtcaccatcgctacagagcctggctgaacacgcgtcatctgccaaaagtttcaggccagaatctaattagggctttgctcgtaagcaaaactgtttacatgaaaatggtatacaacttcttcgatatttatgtggttcttgtgtttttatatcccgcgctattgtgtcttaattaaaagttttatcaactggcttttaagttgagagcagaatctttttgaaataaaaagccactttgcctacatgtgagactattccagtgggacagtaaatgggatctgctaccaaacagataatgactgaccgaacatagaaccaggctgggttttctgtggaataaagtggtgagcctgacgttaatcgtttacatgttgaaattctcttgccacttagtgaagcagtcattggggtaacaatgctacgttttgtgtccgattcagtgtgtaaacgttggtggttctatgtaatactgaccccaaggaaagacgatcagatacaaagaaagatggttaaatctaggaggttgggtgtttgggggttttgttgatgttgttctgattgggataattcagaaattcctaatattatctttcgacagaatgaccaccctaaaacaaatactgaatgcctttaaaaaaaaaaaagttgtggttttttgttttttttttttttttttttggtcgagaactactaatttcatgctatttctttctctctccctttgttgttatttgatttgggggaagggagtgaggcttgtgcagatttgagctatctgaagacatgaacagaagtcaaataccagccatatcagtagagccttccattcaaaagtgaacacacttggtagctgaaccatatctgagcagcgtgattctgttgtcttgcatatgttattctctcaggctgtggatctttgttacagctctaggaaactgtagaaatacaatgctatgtagcttttccaccccatggtctctagtgctgcctatcaacttgtccccttttttcccaataacctgtcttccaggtggtacagttagctgtcactcagctgacaccatgatgtggcagcagagagggaaacctacaagtggtttgcctcattgcctttgccacatctgaagttctcagcagcactaccttagacttcatgagctaataggaaactttttatggtgtaaatgctgtaagactttgtacatacttcagttgttatgaaatctttaaagaaaaaaagaaaaagttacgctaataaattgctgtggtgcaggcactaatggtggtggtttctctttgtcctgtattgcacaaaagtttaactttggactatgaaacagaagcaganttttgataggcttgaagaaacattatttcattaagttattttcaccatattccaattactctaaacaccagtgttcttaattgtggctctagcaatgtgcttttgctaaactgattacatcaaggttcctaaaatgtgctgcagcatctcagttcacacttgtgttatttttgtcttttcttaaacatcaggattttttacatcttccacacaactcttcagttataaatattttgagttctcaccttggaggcacacctttgaaatgtatggcttcgtttttatttgtaccagcccaacatccctaccatggcatgtgttcacacactcgctcctccactccttccttcattcctcttcaaaatgtcactgtttgagtgactcatttcaggtatcatggtaggcacgggactgccatagtcaacaacacagtctctgcctcaaggaacttagattttcccctttattttaagagaaataacattactcttagtggacatgctctatctgttatatttggacaatgagtattccatgattatttattgcatcaagttatttgaaatttaatgcttcttacaaaattccatatactatgcaaatgtaaaatgaagccctatttaaaaggtaattttcagaaacaaattatatgattctcagctattactgtttataaatatcttgcttctgaaaagcaantttgcttccttgactctttcccctggttttgaattctgcctggattttttattcatgttcagtaaaactaaaaccctgcttcccagaagaactgttttggantgcagctatgagtgggggtgatacaatgtgttcaatataatagaataaaaataagttttctaaa

SEQ ID NO: 58434 - DNA, 4206 bp, Homo sapiens
  misc_feature (3341)..(3341): n is a, c, g, or t
  misc_feature (4040)..(4040): n is a, c, g, or t
  misc_feature (4142)..(4142): n is a, c, g, or t
cattggttggtggcgttgctgctcgcccgtgtgataggtttccacagtaatctttatgctgcattagagacatagatacagaggtgctgtactgtgttcttgcaacggtggaggtgctcggctggtaacgttaaagaaggaataaggcgcccgacagaaggcgtttgtctttgttgtggagcatcagcgttaaggacagccggctgctgtgggagcaatttcctgctgcagagagcattttaagaaaggacagcattcctgtgacctctgcctaccatccataaaatactcattcccctctcagatataagaagctctgatacgaaagccgggggctcctgttggctggaaggaggtttgcatctgccatcgccagcacttgcggagctgagctctgcctgcagttgaacacaaagacctggaggagactcccacctccttcagggagaagaaaggaggcagcgaagcagattaaaggaacttgtggcttgtggcctttttgtgcaagggccgcctggaaggggagaaaagtgtatgaaagccaccgtggcggttaatgagctgtgagatgaggcgctgctgcggccgctgctgctgacactcgctcccaggctgcacccgccgcccttggcgcttcatgtacatgtgtctattcaggccttgcggaggcgcccagaagagcatccaacacggctgccggggaaagaccgcccaccatgcccacggagaccctacagacaggtagcatggtgaagccggtcagccccgcgggcaccttcacctctgctgtgcccctgcgcatcctgaacaaggggccagactacttccgcaggcaggccgagcccaaccccaagaggctcagcgccgtggagaggctggaggccgacaaggccaagtacgtcaagagccaggaggtgatcaacgccaagcaggagcccgtgaagcccgccgtgctggccaagcccccggtgtgcccggctgccaagcgcgcactgggcagccccacgctcaaagtgttcggcaaccacgccaagaccgagagcggcgtgcagagggagaacctgaagctggagatcctgaagaacatcatcaatagctccgagggctctagctcgggctcggggcacaagcacagctcccgcaactggccgccccaccggtcggaagccactgacctgcaccgtcactccttcgcggagtccctgaaggtctaccccacgcagggccgcaggagcccgcaggagggcggctcccacgtgggcaggagactgctggagcagtcagccgagtccttcctccacgtgtcccacagctcttcggacatccgcaaggtgaccagcgtgaagcccctcaaggccatcccctgcagtagctctgcccctcccctgcctcccaagcccaaaatcgcagccatcgcctccatgaagtcccccgaggccgaccctgtggaaccagcttgtggagtcagccgaagaccctccctccagcggtctaagtcagacttgagtgacagatatttccgagtggacgcggacgtggagaggttcttcaactactgtggactggacccggaagagctggaaaacctgggaatggaaaactttgcaagggctaattctgacataatatccctcaacttccgcagcgcaagcatgatcagctcagactgtgaacagtctcaggacagtaacagtgaccttagaaatgatgacagtgccaatgaccgcgtgccgtatggcatttctgccatcgaaagaaatgctagaatcatcaagtggttatatagcatcaaacaagctagagagtcacagaaggtctcccatgtgtaagacagtgcgtggaaaggagggagcgtgggtctctgtgcttacgcagttgtgaaggttgtgaggtctccttgaagtgttgtgagcttctccactctttgtgttgcttgttgtgcaatgttttcaagttgcatgcttgtcaacatggggactgacctggcttccacgtcaccatcgctacagagcctggctgaacacgcgtcatctgccaaaagtttcaggccagaatctaattagggctttgctcgtaagcaaaactgtttacatgaaaatggtatacaacttcttcgatatttatgtggttcttgtgtttttatatcccgcgctattgtgtcttaattaaaagttttatcaactggcttttaagttgagagcagaatctttttgaaataaaaagccactttgcctacatgtgagactattccagtgggacagtaaatgggatctgctaccaaacagataatgactgaccgaacatagaaccaggctgggttttctgtggaataaagtggtgagcctgacgttaatcgtttacatgttgaaattctcttgccacttagtgaagcagtcattggggtaacaatgctacgttttgtgtccgattcagtgtgtaaacgttggtggttctatgtaatactgaccccaaggaaagacgatcagatacaaagaaagatggttaaatctaggaggttgggtgtttgggggttttgttgatgttgttctgattgggataattcagaaattcctaatattatctttcgacagaatgaccaccctaaaacaaatactgaatgcctttaaaaaaaaaaaagttgtggttttttgttttttttttttttttttttggtcgagaactactaatttcatgctatttctttctctctccctttgttgttatttgatttgggggaagggagtgaggcttgtgcagatttgagctatctgaagacatgaacagaagtcaaataccagccatatcagtagagccttccattcaaaagtgaacacacttggtagctgaaccatatctgagcagcgtgattctgttgtcttgcatatgttattctctcaggctgtggatctttgttacagctctaggaaactgtagaaatacaatgctatgtagcttttccaccccatggtctctagtgctgcctatcaacttgtccccttttttcccaataacctgtcttccaggtggtacagttagctgtcactcagctgacaccatgatgtggcagcagagagggaaacctacaagtggtttgcctcattgcctttgccacatctgaagttctcagcagcactaccttagacttcatgagctaataggaaactttttatggtgtaaatgctgtaagactttgtacatacttcagttgttatgaaatctttaaagaaaaaaagaaaaagttacgctaataaattgctgtggtgcaggcactaatggtggtggtttctctttgtcctgtattgcacaaaagtttaactttggactatgaaacagaagcaganttttgataggcttgaagaaacattatttcattaagttattttcaccatattccaattactctaaacaccagtgttcttaattgtggctctagcaatgtgcttttgctaaactgattacatcaaggttcctaaaatgtgctgcagcatctcagttcacacttgtgttatttttgtcttttcttaaacatcaggattttttacatcttccacacaactcttcagttataaatattttgagttctcaccttggaggcacacctttgaaatgtatggcttcgtttttatttgtaccagcccaacatccctaccatggcatgtgttcacacactcgctcctccactccttccttcattcctcttcaaaatgtcactgtttgagtgactcatttcaggtatcatggtaggcacgggactgccatagtcaacaacacagtctctgcctcaaggaacttagattttcccctttattttaagagaaataacattactcttagtggacatgctctatctgttatatttggacaatgagtattccatgattatttattgcatcaagttatttgaaatttaatgcttcttacaaaattccatatactatgcaaatgtaaaatgaagccctatttaaaaggtaattttcagaaacaaattatatgattctcagctattactgtttataaatatcttgcttctgaaaagcaantttgcttccttgactctttcccctggttttgaattctgcctggattttttattcatgttcagtaaaactaaaaccctgcttcccagaagaactgttttggantgcagctatgagtgggggtgatacaatgtgttcaatataatagaataaaaataagttttctaaa

SEQ ID NO: 58435 - DNA, 4378 bp, Homo sapiens
  misc_feature (3513)..(3513): n is a, c, g, or t
  misc_feature (4212)..(4212): n is a, c, g, or t
  misc_feature (4314)..(4314): n is a, c, g, or t
ccctcactctccggcgaagcctgcctgagccctcccactcggtgcagaccgaaccatcgcggccgccgccagccgggcccttcgcggccgcgcgtcctgggcccgttccgccagccccgtctgctctctacccgcggccccgcggcggcgaccgtgaacactcggcggcccctacagcccgctctcggcccttcgtccctcgcgggccccgactctccctccttgcagtcccccggagcctggctcccggctcgggccgcaccgccagggactggggtgagcggcccagaaatctccaaattggacatccagagcagcattcttgttctgtctacgtcttgaattagaaactatcaagctctgtaagtcctgaaaaggaaataaaagcaatttcctgctgcagagagcattttaagaaaggacagcattcctgtgacctctgcctaccatccataaaatactcattcccctctcagatataagaagctctgatacgaaagccgggggctcctgttggctggaaggaggtttgcatctgccatcgccagcacttgcggagctgagctctgcctgcagttgaacacaaagacctggaggagactcccacctccttcagggagaagaaaggaggcagcgaagcagattaaaggaacttgtggcttgtggcctttttgtgcaagggccgcctggaaggggagaaaagtgtatgaaagccaccgtggcggttaatgagctgtgagatgaggcgctgctgcggccgctgctgctgacactcgctcccaggctgcacccgccgcccttggcgcttcatgtacatgtgtctattcaggccttgcggaggcgcccagaagagcatccaacacggctgccggggaaagaccgcccaccatgcccacggagaccctacagacaggtagcatggtgaagccggtcagccccgcgggcaccttcacctctgctgtgcccctgcgcatcctgaacaaggggccagactacttccgcaggcaggccgagcccaaccccaagaggctcagcgccgtggagaggctggaggccgacaaggccaagtacgtcaagagccaggaggtgatcaacgccaagcaggagcccgtgaagcccgccgtgctggccaagcccccggtgtgcccggctgccaagcgcgcactgggcagccccacgctcaaagtgttcggcaaccacgccaagaccgagagcggcgtgcagagggagaacctgaagctggagatcctgaagaacatcatcaatagctccgagggctctagctcgggctcggggcacaagcacagctcccgcaactggccgccccaccggtcggaagccactgacctgcaccgtcactccttcgcggagtccctgaaggtctaccccacgcagggccgcaggagcccgcaggagggcggctcccacgtgggcaggagactgctggagcagtcagccgagtccttcctccacgtgtcccacagctcttcggacatccgcaaggtgaccagcgtgaagcccctcaaggccatcccctgcagtagctctgcccctcccctgcctcccaagcccaaaatcgcagccatcgcctccatgaagtcccccgaggccgaccctgtggaaccagcttgtggagtcagccgaagaccctccctccagcggtctaagtcagacttgagtgacagatatttccgagtggacgcggacgtggagaggttcttcaactactgtggactggacccggaagagctggaaaacctgggaatggaaaactttgcaagggctaattctgacataatatccctcaacttccgcagcgcaagcatgatcagctcagactgtgaacagtctcaggacagtaacagtgaccttagaaatgatgacagtgccaatgaccgcgtgccgtatggcatttctgccatcgaaagaaatgctagaatcatcaagtggttatatagcatcaaacaagctagagagtcacagaaggtctcccatgtgtaagacagtgcgtggaaaggagggagcgtgggtctctgtgcttacgcagttgtgaaggttgtgaggtctccttgaagtgttgtgagcttctccactctttgtgttgcttgttgtgcaatgttttcaagttgcatgcttgtcaacatggggactgacctggcttccacgtcaccatcgctacagagcctggctgaacacgcgtcatctgccaaaagtttcaggccagaatctaattagggctttgctcgtaagcaaaactgtttacatgaaaatggtatacaacttcttcgatatttatgtggttcttgtgtttttatatcccgcgctattgtgtcttaattaaaagttttatcaactggcttttaagttgagagcagaatctttttgaaataaaaagccactttgcctacatgtgagactattccagtgggacagtaaatgggatctgctaccaaacagataatgactgaccgaacatagaaccaggctgggttttctgtggaataaagtggtgagcctgacgttaatcgtttacatgttgaaattctcttgccacttagtgaagcagtcattggggtaacaatgctacgttttgtgtccgattcagtgtgtaaacgttggtggttctatgtaatactgaccccaaggaaagacgatcagatacaaagaaagatggttaaatctaggaggttgggtgtttgggggttttgttgatgttgttctgattgggataattcagaaattcctaatattatctttcgacagaatgaccaccctaaaacaaatactgaatgcctttaaaaaaaaaaaagttgtggttttttgttttttttttttttttttttggtcgagaactactaatttcatgctatttctttctctctccctttgttgttatttgatttgggggaagggagtgaggcttgtgcagatttgagctatctgaagacatgaacagaagtcaaataccagccatatcagtagagccttccattcaaaagtgaacacacttggtagctgaaccatatctgagcagcgtgattctgttgtcttgcatatgttattctctcaggctgtggatctttgttacagctctaggaaactgtagaaatacaatgctatgtagcttttccaccccatggtctctagtgctgcctatcaacttgtccccttttttcccaataacctgtcttccaggtggtacagttagctgtcactcagctgacaccatgatgtggcagcagagagggaaacctacaagtggtttgcctcattgcctttgccacatctgaagttctcagcagcactaccttagacttcatgagctaataggaaactttttatggtgtaaatgctgtaagactttgtacatacttcagttgttatgaaatctttaaagaaaaaaagaaaaagttacgctaataaattgctgtggtgcaggcactaatggtggtggtttctctttgtcctgtattgcacaaaagtttaactttggactatgaaacagaagcaganttttgataggcttgaagaaacattatttcattaagttattttcaccatattccaattactctaaacaccagtgttcttaattgtggctctagcaatgtgcttttgctaaactgattacatcaaggttcctaaaatgtgctgcagcatctcagttcacacttgtgttatttttgtcttttcttaaacatcaggattttttacatcttccacacaactcttcagttataaatattttgagttctcaccttggaggcacacctttgaaatgtatggcttcgtttttatttgtaccagcccaacatccctaccatggcatgtgttcacacactcgctcctccactccttccttcattcctcttcaaaatgtcactgtttgagtgactcatttcaggtatcatggtaggcacgggactgccatagtcaacaacacagtctctgcctcaaggaacttagattttcccctttattttaagagaaataacattactcttagtggacatgctctatctgttatatttggacaatgagtattccatgattatttattgcatcaagttatttgaaatttaatgcttcttacaaaattccatatactatgcaaatgtaaaatgaagccctatttaaaaggtaattttcagaaacaaattatatgattctcagctattactgtttataaatatcttgcttctgaaaagcaantttgcttccttgactctttcccctggttttgaattctgcctggattttttattcatgttcagtaaaactaaaaccctgcttcccagaagaactgttttggantgcagctatgagtgggggtgatacaatgtgttcaatataatagaataaaaataagttttctaaa

SEQ ID NO: 58436 - DNA, 3985 bp, Homo sapiens
  misc_feature (3120)..(3120): n is a, c, g, or t
  misc_feature (3819)..(3819): n is a, c, g, or t
  misc_feature (3921)..(3921): n is a, c, g, or t
cgcaaggcccgggtcgtccccctcgcgcggtcgggaaaacagctactgagctgcggcccacgaccctcggccgcgcaggggcggggcgggggcgctgcggggtttctctgttgctagagccgtgatgtcacccgcccctcctaacccgcggttggttgttttgtgtttcagctctgcctgcagttgaacacaaagacctggaggagactcccacctccttcagggagaagaaaggaggcagcgaagcagattaaaggaacttgtggcttgtggcctttttgtgcaagggccgcctggaaggggagaaaagtgtatgaaagccaccgtggcggttaatgagctgtgagatgaggcgctgctgcggccgctgctgctgacactcgctcccaggctgcacccgccgcccttggcgcttcatgtacatgtgtctattcaggccttgcggaggcgcccagaagagcatccaacacggctgccggggaaagaccgcccaccatgcccacggagaccctacagacaggtagcatggtgaagccggtcagccccgcgggcaccttcacctctgctgtgcccctgcgcatcctgaacaaggggccagactacttccgcaggcaggccgagcccaaccccaagaggctcagcgccgtggagaggctggaggccgacaaggccaagtacgtcaagagccaggaggtgatcaacgccaagcaggagcccgtgaagcccgccgtgctggccaagcccccggtgtgcccggctgccaagcgcgcactgggcagccccacgctcaaagtgttcggcaaccacgccaagaccgagagcggcgtgcagagggagaacctgaagctggagatcctgaagaacatcatcaatagctccgagggctctagctcgggctcggggcacaagcacagctcccgcaactggccgccccaccggtcggaagccactgacctgcaccgtcactccttcgcggagtccctgaaggtctaccccacgcagggccgcaggagcccgcaggagggcggctcccacgtgggcaggagactgctggagcagtcagccgagtccttcctccacgtgtcccacagctcttcggacatccgcaaggtgaccagcgtgaagcccctcaaggccatcccctgcagtagctctgcccctcccctgcctcccaagcccaaaatcgcagccatcgcctccatgaagtcccccgaggccgaccctgtggaaccagcttgtggagtcagccgaagaccctccctccagcggtctaagtcagacttgagtgacagatatttccgagtggacgcggacgtggagaggttcttcaactactgtggactggacccggaagagctggaaaacctgggaatggaaaactttgcaagggctaattctgacataatatccctcaacttccgcagcgcaagcatgatcagctcagactgtgaacagtctcaggacagtaacagtgaccttagaaatgatgacagtgccaatgaccgcgtgccgtatggcatttctgccatcgaaagaaatgctagaatcatcaagtggttatatagcatcaaacaagctagagagtcacagaaggtctcccatgtgtaagacagtgcgtggaaaggagggagcgtgggtctctgtgcttacgcagttgtgaaggttgtgaggtctccttgaagtgttgtgagcttctccactctttgtgttgcttgttgtgcaatgttttcaagttgcatgcttgtcaacatggggactgacctggcttccacgtcaccatcgctacagagcctggctgaacacgcgtcatctgccaaaagtttcaggccagaatctaattagggctttgctcgtaagcaaaactgtttacatgaaaatggtatacaacttcttcgatatttatgtggttcttgtgtttttatatcccgcgctattgtgtcttaattaaaagttttatcaactggcttttaagttgagagcagaatctttttgaaataaaaagccactttgcctacatgtgagactattccagtgggacagtaaatgggatctgctaccaaacagataatgactgaccgaacatagaaccaggctgggttttctgtggaataaagtggtgagcctgacgttaatcgtttacatgttgaaattctcttgccacttagtgaagcagtcattggggtaacaatgctacgttttgtgtccgattcagtgtgtaaacgttggtggttctatgtaatactgaccccaaggaaagacgatcagatacaaagaaagatggttaaatctaggaggttgggtgtttgggggttttgttgatgttgttctgattgggataattcagaaattcctaatattatctttcgacagaatgaccaccctaaaacaaatactgaatgcctttaaaaaaaaaaaagttgtggttttttgttttttttttttttttttttggtcgagaactactaatttcatgctatttctttctctctccctttgttgttatttgatttgggggaagggagtgaggcttgtgcagatttgagctatctgaagacatgaacagaagtcaaataccagccatatcagtagagccttccattcaaaagtgaacacacttggtagctgaaccatatctgagcagcgtgattctgttgtcttgcatatgttattctctcaggctgtggatctttgttacagctctaggaaactgtagaaatacaatgctatgtagcttttccaccccatggtctctagtgctgcctatcaacttgtccccttttttcccaataacctgtcttccaggtggtacagttagctgtcactcagctgacaccatgatgtggcagcagagagggaaacctacaagtggtttgcctcattgcctttgccacatctgaagttctcagcagcactaccttagacttcatgagctaataggaaactttttatggtgtaaatgctgtaagactttgtacatacttcagttgttatgaaatctttaaagaaaaaaagaaaaagttacgctaataaattgctgtggtgcaggcactaatggtggtggtttctctttgtcctgtattgcacaaaagtttaactttggactatgaaacagaagcaganttttgataggcttgaagaaacattatttcattaagttattttcaccatattccaattactctaaacaccagtgttcttaattgtggctctagcaatgtgcttttgctaaactgattacatcaaggttcctaaaatgtgctgcagcatctcagttcacacttgtgttatttttgtcttttcttaaacatcaggattttttacatcttccacacaactcttcagttataaatattttgagttctcaccttggaggcacacctttgaaatgtatggcttcgtttttatttgtaccagcccaacatccctaccatggcatgtgttcacacactcgctcctccactccttccttcattcctcttcaaaatgtcactgtttgagtgactcatttcaggtatcatggtaggcacgggactgccatagtcaacaacacagtctctgcctcaaggaacttagattttcccctttattttaagagaaataacattactcttagtggacatgctctatctgttatatttggacaatgagtattccatgattatttattgcatcaagttatttgaaatttaatgcttcttacaaaattccatatactatgcaaatgtaaaatgaagccctatttaaaaggtaattttcagaaacaaattatatgattctcagctattactgtttataaatatcttgcttctgaaaagcaantttgcttccttgactctttcccctggttttgaattctgcctggattttttattcatgttcagtaaaactaaaaccctgcttcccagaagaactgttttggantgcagctatgagtgggggtgatacaatgtgttcaatataatagaataaaaataagttttctaaa

SEQ ID NO: 58437 - DNA, 3181 bp, Homo sapiens
cattggttggtggcgttgctgctcgcccgtgtgataggtttccacagtaatctttatgctgcattagagacatagatacagaggtgctgtactgtgttcttgcaacggtggaggtgctcggctggtaacgttaaagaaggaataaggcgcccgacagaaggcgtttgtctttgttgtggagcatcagcgttaaggacagccggctgctgtgggagcaatttcctgctgcagagagcattttaagaaaggacagcattcctgtgacctctgcctaccatccataaaatactcattcccctctcagctctgcctgcagttgaacacaaagacctggaggagactcccacctccttcagggagaagaaaggaggcagcgaagcagattaaaggaacttgtggcttgtggcctttttgtgcaagggccgcctggaaggggagaaaagtgtatgaaagccaccgtggcggttaatgagctgtgagatgaggcgctgctgcggccgctgctgctgacactcgctcccaggctgcacccgccgcccttggcgcttcatgtacatgtgtctattcaggccttgcggaggcgcccagaagagcatccaacacggctgccggggaaagaccgcccaccatgcccacggagaccctacagacaggtagcatggtgaagccggtcagccccgcgggcaccttcacctctgctgtgcccctgcgcatcctgaacaaggggccagactacttccgcaggcaggccgagcccaaccccaagaggctcagcgccgtggagaggctggaggccgacaaggccaagtacgtcaagagccaggaggtgatcaacgccaagcaggagcccgtgaagcccgccgtgctggccaagcccccggtgtgcccggctgccaagcgcgcactgggcagccccacgctcaaagtgttcggcaaccacgccaagaccgagagcggcgtgcagagggagaacctgaagctggagatcctgaagaacatcatcaatagctccgagggctctagctcgggctcggggcacaagcacagctcccgcaactggccgccccaccggtcggaagccactgacctgcaccgtcactccttcgcggagtccctgaaggtctaccccacgcagggccgcaggagcccgcaggagggcggctcccacgtgggcaggagactgctggagcagtcagccgagtccttcctccacgtgtcccacagctcttcggacatccgcaaggtgaccagcgtgaagcccctcaaggccatcccctgcagtagctctgcccctcccctgcctcccaagcccaaaatcgcagccatcgcctccatgaagtcccccgaggccgaccctgtggaaccagcttgtggagtcagccgaagaccctccctccagcggtctaagtcagacttgagtgacagatatttccgagtggacgcggacgtggagaggttcttcaactactgtggactggacccggaagagctggaaaacctgggaatggaaaactttgcaagggctaattctgacataatatccctcaacttccgcagcgcaagcatgatcagctcagactgtgaacagtctcaggacagtaacagtgaccttagaaatgatgacagtgccaatgaccgcgtgccgtatggcatttctgccatcgaaagaaatgctagaatcatcaagtggttatatagcatcaaacaagctagagagtcacagaaggtctcccatgtgtaagacagtgcgtggaaaggagggagcgtgggtctctgtgcttacgcagttgtgaaggttgtgaggtctccttgaagtgttgtgagcttctccactctttgtgttgcttgttgtgcaatgttttcaagttgcatgcttgtcaacatggggactgacctggcttccacgtcaccatcgctacagagcctggctgaacacgcgtcatctgccaaaagtttcaggccagaatctaattagggctttgctcgtaagcaaaactgtttacatgaaaatggtatacaacttcttcgatatttatgtggttcttgtgtttttatatcccgcgctattgtgtcttaattaaaagttttatcaactggcttttaagttgagagcagaatctttttgaaataaaaagccactttgcctacatgtgagactattccagtgggacagtaaatgggatctgctaccaaacagataatgactgaccgaacatagaaccaggctgggttttctgtggaataaagtggtgagcctgacgttaatcgtttacatgttgaaattctcttgccacttagtgaagcagtcattggggtaacaatgctacgttttgtgtccgattcagtgtgtaaacgttggtggttctatgtaatactgaccccaaggaaagacgatcagatacaaagaaagatggttaaatctaggaggttgggtgtttgggggttttgttgatgttgttctgattgggataattcagaaattcctaatattatctttcgacagaatgaccaccctaaaacaaatactgaatgcctttaaaaaaaaaaaagttgtggttttttgttttttttttttttttttttggtcgagaactactaatttcatgctatttctttctctctccctttgttgttatttgatttgggggaagggagtgaggcttgtgcagatttgagctatctgaagacatgaacagaagtcaaataccagccatatcagtagagccttccattcaaaagtgaacacacttggtagctgaaccatatctgagcagcgtgattctgttgtcttgcatatgttattctctcaggctgtggatctttgttacagctctaggaaactgtagaaatacaatgctatgtagcttttccaccccatggtctctagtgctgcctatcaacttgtccccttttttcccaataacctgtcttccaggtggtacagttagctgtcactcagctgacaccatgatgtggcagcagagagggaaacctacaagtggtttgcctcattgcctttgccacatctgaagttctcagcagcactaccttagacttcatgagctaataggaaactttttatggtgtaaatgctgtaagactttgtacatacttcagttgttatgaaatctttaaagaaaaaaagaaaaagttacgctaataaattgctgtggtgcaggca

SEQ ID NO: 58438 - DNA, 2480 bp, Homo sapiens
cattggttggtggcgttgctgctcgcccgtgtgataggtttccacagtaatctttatgctgcattagagacatagatacagaggtgctgtactgtgttcttgcaacggtggaggtgctcggctggtaacgttaaagaaggaataaggcgcccgacagaaggcgtttgtctttgttgtggagcatcagcgttaaggacagccggctgctgtgggagcaatttcctgctgcagagagcattttaagaaaggacagcattcctgtgacctctgcctaccatccataaaatactcattcccctctcagctctgcctgcagttgaacacaaagacctggaggagactcccacctccttcagggagaagaaaggaggcagcgaagcagattaaaggaacttgtggcttgtggcctttttgtgcaagggccgcctggaaggggagaaaagtgtatgaaagccaccgtggcggttaatgagctgtgagatgaggcgctgctgcggccgctgctgctgacactcgctcccaggctgcacccgccgcccttggcgcttcatgtacatgtgtctattcaggccttgcggaggcgcccagaagagcatccaacacggctgccggggaaagaccgcccaccatgcccacggagaccctacagacaggtagcatggtgaagccggtcagccccgcgggcaccttcacctctgctgtgcccctgcgcatcctgaacaaggggccagactacttccgcaggcaggccgagcccaaccccaagaggctcagcgccgtggagaggctggaggccgacaaggccaagtacgtcaagagccaggaggtgatcaacgccaagcaggagcccgtgaagcccgccgtgctggccaagcccccggtgtgcccggctgccaagcgcgcactgggcagccccacgctcaaagtgttcggcaaccacgccaagaccgagagcggcgtgcagagggagaacctgaagctggagatcctgaagaacatcatcaatagctccgagggctctagctcgggctcggggcacaagcacagctcccgcaactggccgccccaccggtcggaagccactgacctgcaccgtcactccttcgcggagtccctgaaggtctaccccacgcagggccgcaggagcccgcaggagggcggctcccacgtgggcaggagactgctggagcagtcagccgagtccttcctccacgtgtcccacagctcttcggacatccgcaaggtgaccagcgtgaagcccctcaaggccatcccctgcagtagctctgcccctcccctgcctcccaagcccaaaatcgcagccatcgcctccatgaagtcccccgaggccgaccctgtggaaccagcttgtggagtcagccgaagaccctccctccagcggtctaagtcagacttgagtgacagatatttccgagtggacgcggacgtggagaggttcttcaactactgtggactggacccggaagagctggaaaacctgggaatggaaaactttgcaagggctaattctgacataatatccctcaacttccgcagcgcaagcatgatcagctcagactgtgaacagtctcaggacagtaacagtgaccttagaaatgatgacagtgccaatgaccgcgtgccgtatggcatttctgccatcgaaagaaatgctagaatcatcaagtggttatatagcatcaaacaagctagagagtcacagaaggtctcccatgtgtaagacagtgcgtggaaaggagggagcgtgggtctctgtgcttacgcagttgtgaaggttgtgaggtctccttgaagtgttgtgagcttctccactctttgtgttgcttgttgtgcaatgttttcaagttgcatgcttgtcaacatggggactgacctggcttccacgtcaccatcgctacagagcctggctgaacacgcgtcatctgccaaaagtttcaggccagaatctaattagggctttgctcgtaagcaaaactgtttacatgaaaatggtatacaacttcttcgatatttatgtggttcttgtgtttttatatcccgcgctattgtgtcttaattaaaagttttatcaactggcaaaaaaaaaaaaaaaaaaaaaaaaaaaaaaaaaaaaaaaaaaaaaaaaaaaaaaaaaaaaaaaaaaaaaaaaaaaaaaaaaaaaaaaaaaaaaaaaaaaaaaaaaaaaaaaaaaaaaaaaaaaaaaaaaaaaaaggggggcccttttaaaaaatacaattttaacacccgggtcctcagaaaaaaaatttttttaaaagggcccacaaaaacaaattccgggcccccgttttaaaaacggggggggggaaaaaaactgggggtacccaaaaaaaattcttttgaaaaaaaccccttttttcccggggggggaaaaaaaaaaaaggccccaacaaaatccctttcaaaaaagttccccccccaaaagggcaaagggccccccc

SEQ ID NO: 58439 - DNA, 2523 bp, Homo sapiens
  misc_feature (1658)..(1658): n is a, c, g, or t
  misc_feature (2357)..(2357): n is a, c, g, or t
  misc_feature (2459)..(2459): n is a, c, g, or t
tctacccttatggcgtaacaggcgatgacagtgccaatgaccgcgtgccgtatggcatttctgccatcgaaagaaatgctagaatcatcaagtggttatatagcatcaaacaagctagagagtcacagaaggtctcccatgtgtaagacagtgcgtggaaaggagggagcgtgggtctctgtgcttacgcagttgtgaaggttgtgaggtctccttgaagtgttgtgagcttctccactctttgtgttgcttgttgtgcaatgttttcaagttgcatgcttgtcaacatggggactgacctggcttccacgtcaccatcgctacagagcctggctgaacacgcgtcatctgccaaaagtttcaggccagaatctaattagggctttgctcgtaagcaaaactgtttacatgaaaatggtatacaacttcttcgatatttatgtggttcttgtgtttttatatcccgcgctattgtgtcttaattaaaagttttatcaactggcttttaagttgagagcagaatctttttgaaataaaaagccactttgcctacatgtgagactattccagtgggacagtaaatgggatctgctaccaaacagataatgactgaccgaacatagaaccaggctgggttttctgtggaataaagtggtgagcctgacgttaatcgtttacatgttgaaattctcttgccacttagtgaagcagtcattggggtaacaatgctacgttttgtgtccgattcagtgtgtaaacgttggtggttctatgtaatactgaccccaaggaaagacgatcagatacaaagaaagatggttaaatctaggaggttgggtgtttgggggttttgttgatgttgttctgattgggataattcagaaattcctaatattatctttcgacagaatgaccaccctaaaacaaatactgaatgcctttaaaaaaaaaaaagttgtggttttttgttttttttttttttttttttggtcgagaactactaatttcatgctatttctttctctctccctttgttgttatttgatttgggggaagggagtgaggcttgtgcagatttgagctatctgaagacatgaacagaagtcaaataccagccatatcagtagagccttccattcaaaagtgaacacacttggtagctgaaccatatctgagcagcgtgattctgttgtcttgcatatgttattctctcaggctgtggatctttgttacagctctaggaaactgtagaaatacaatgctatgtagcttttccaccccatggtctctagtgctgcctatcaacttgtccccttttttcccaataacctgtcttccaggtggtacagttagctgtcactcagctgacaccatgatgtggcagcagagagggaaacctacaagtggtttgcctcattgcctttgccacatctgaagttctcagcagcactaccttagacttcatgagctaataggaaactttttatggtgtaaatgctgtaagactttgtacatacttcagttgttatgaaatctttaaagaaaaaaagaaaaagttacgctaataaattgctgtggtgcaggcactaatggtggtggtttctctttgtcctgtattgcacaaaagtttaactttggactatgaaacagaagcaganttttgataggcttgaagaaacattatttcattaagttattttcaccatattccaattactctaaacaccagtgttcttaattgtggctctagcaatgtgcttttgctaaactgattacatcaaggttcctaaaatgtgctgcagcatctcagttcacacttgtgttatttttgtcttttcttaaacatcaggattttttacatcttccacacaactcttcagttataaatattttgagttctcaccttggaggcacacctttgaaatgtatggcttcgtttttatttgtaccagcccaacatccctaccatggcatgtgttcacacactcgctcctccactccttccttcattcctcttcaaaatgtcactgtttgagtgactcatttcaggtatcatggtaggcacgggactgccatagtcaacaacacagtctctgcctcaaggaacttagattttcccctttattttaagagaaataacattactcttagtggacatgctctatctgttatatttggacaatgagtattccatgattatttattgcatcaagttatttgaaatttaatgcttcttacaaaattccatatactatgcaaatgtaaaatgaagccctatttaaaaggtaattttcagaaacaaattatatgattctcagctattactgtttataaatatcttgcttctgaaaagcaantttgcttccttgactctttcccctggttttgaattctgcctggattttttattcatgttcagtaaaactaaaaccctgcttcccagaagaactgttttggantgcagctatgagtgggggtgatacaatgtgttcaatataatagaataaaaataagttttctaaa

SEQ ID NO: 58440 - DNA, 494 bp, Homo sapiens
tgcagcaagagaaatttggccaggagggggccgttggtgcagaccaagcatccagtgggaacacacaggggtcagctaccttggattcctcctccccacttgggggttcagcttccctatttcccccagggacaaagacccagccaggtcactctcagggattcagggaaaataagcattgtgtctggggcgtaaagaaaggccaagttctgggcatgtggctgcaggcatgtcttacgggacagagacagcccccccagccgaggactggcctcccgataactctgttctgcctggagtgtccttgtgctggacttcctccagcaacctcacccttacagaaaaatagggatgcttttcttgaacttcctctttctattcctccttctaagtcagggacagatggggtggcaggggtgggaagtatactgatctgtttcttgtcactgttgcccctatgtcctgatataaaaacctgggagtcttgtcttttt

SEQ ID NO: 58441 - DNA, 221 bp, Homo sapiens
caaactcatggagggcaggaccttccagagggacagaactctagagaagaagggactcccagggaacagacttctaagggggtaaagcctccaagaaaagtaaaattctatggggcagggaagtcaaatggacagagcctcccagagaataacgctacttcccccgctttcagggtcctgggattccacggggtttatgtgtgagtgtatgtgtgtgtgtg

SEQ ID NO: 58442 - DNA, 466 bp, Homo sapiens
caaaatggaaaaaataaaagaaatgcatataaccatacccagccagttttttcccctccataaaaaggaagcagtgatccccagcccttttcatgccaccccccaacttggcctcggtggctctgttgtttcagctcctcttctctggtagcagcagtttctcctctttggctcaaaaaggagagcaagcgtgttgatctaccctgggtccatccacctgttttgtctctttgtctgcgagggtgactgaatgaagtgctgcctgccacctgactgtgcctctcacccaactgtttgccgcattggagggctggctacaacatgtgaaagtggatcaattgataagtcgagagatgagtcatctgacctgtgcaaaaccagataagcttctgcagtctttgcacagaaatctaaaatctcggccagaatttctgtggcaaagggagagagtcagaaaccggagctg

SEQ ID NO: 58443 - DNA, 413 bp, Homo sapiens
aaaacttatttgttatttatctgaacttccaatttacctgggtattgcatattttatttggcaactctatccttggaaagcaggctaatatgtgcagtgcacctggattcatagatgaagatatgggtgataaaacaagtagaataaaataattgggaacattcagtagtgtatacacagatattcacctcctctataacaaatatgtttagattcatgtttaaaatattcctaataagatgtagaacaacatccctcttggttgtggtattggcttagctcagagaattcagtttctgctgtcatcacagctgggaatgagaaagggaggggctctggttggtctccctctgcctctggagcacacgtggaggacatgaggctgccgcaggagcagctctgaaagctgagtt

SEQ ID NO: 58444 - DNA, 289 bp, Homo sapiens
actttaatttatttcggatgccggaattgtgcccagagtttctcctgagcttgattccatagctagcagcttcaatccttcgcagctgcggtgcgttctgaactctgggctgtcctttcctgacaggcactttccatagcatctgcctgcttaatccctcacggctcagaaatgttaacggcactgttgagtgctgtgattattttgctttcactatgtcaagatttatggccttcgagaagcttcttttgagatagagctagagaaggaaagcagaatttgtaagatc

SEQ ID NO: 58445 - DNA, 386 bp, Homo sapiens
aataaaaaatagtgatcaatctggcagcattttctgaaagttaagcagtattcccaatagctgctaaaagaagacatgttatataatactaagtctgtaagtaggtaaaaattaagagaattgttaatgtgcttgctggggagtgaaattatctctaggcattaccctatacctaacctaggactcagtagactatgatattggcgtagtttgaccaagaattttatcctgatttcagatcgttttctcttcaccagcacttcttcaccaggattatatgaaaaaaattaaacctgatgccctgaggcatccattatatgtgctgaaataacttcttttctcaccatctagaatggtactagctatgtaccactcttgtcagaatc

SEQ ID NO: 58446 - DNA, 781 bp, Homo sapiens
aaaagatgctgttgaaaaaaaattggaggcctttccccttggcacagaggtaggaactgacatatatgcagatgatgaaacagtcagaaaccttcaagaacaattgcagctagccaatcaagaaaaaactcaggctgtggaactctggcagactgtttctcaggagttggacagactacacaagctttaccaggaacatatgactgaggcccagattcatgtatttgaaagtcaaaaacaaaaggatcagctatttgattttcaacaactgaccaaacaacttcatgttactaatgagaacatggaagtgactaaccaacagtttctgaaaacagtaactgaacaaagtgtgataatcgaacaactccgaaaaaaacttaggcaagccaaattagagctgagagttgctgtagcaaaagtggaagagttaactaatgtgactgaagatctgcagggacagatgaaaaagaaggagaaggatgtggtgtctgcccatggaagagaggaagcatcagataggcgtttacagcagttacagtctagtataaaacaattagaaataagattatgtgtgacaatccaagaagccaaccaattaagaaccgaaaatacacatctggaaaaacagaccagagagctacaagcaaagtgcaatgaattagaaaatgagagatatgaggctattgtaagagccagaaatagcatgcaactcttagaagaagctaaccttcaaaaaagtcaggctctacttgaggagaagcaaaaagaagaagacatagag

SEQ ID NO: 58447 - DNA, 462 bp, Homo sapiens
gagctccttgttcttggtcccttcctcccatcattaattctggcacgataagccatttgtactcaagggtcaggaccagttatttcttctctctctggttgggtagtttctttcctcctctagaagcagggagccatacatcactggtcctagggacagaggaaaaacatcctatgcagccatgataattcaaaaacacctccttactcccctcccttgcgatacatccctggtcccagggacagagagaaagaacatcctatgctgccatggtaactcaaaaacacttccttatgccccttgcagtccctcccttatacttgtccccataagaacataggagtaagccgggcatagtggcgcatgcctgtagtcccagctactcgggaggctgaggcgggaggatcacttgagccctggagttcaagacctgcttggcaacatagcgagacctcatcttta

SEQ ID NO: 58448 - DNA, 1033 bp, Homo sapiens
atatttagtttaaatgtattgtaagttttatttactagtgaggttgaaataaagatgactttattcacactttcttttggactggtatagattcctggatgttgttgaagaaaaccattctagttccaaaatacagttattgggatctatggataaaccatcagtttaagaactttacttgaaccctttttctaaaataatcaatttaagcatttgcaggcttgggcaagttgcaaattaaaaaatcctatcttgttggtaaaatgaaagttgtcaatttaatgaaattgtttatatttcataataaatacatatggctgtttttgcttcattttggatataattcttgccacctttctagacagatgtcagaactttaaaaaaaaaatactacagataatgtatcattttacaatttatttctataaagcatttatttcttcagagttcatccagttttagcctgttgtagatgatagaaaattttattttgattatggaaataatcacaacatttatttatttttgttccaaaattcaagaaatctagtttttaatggtattttcggatttggagtgaaaaataagctcaagaaatactcttcagtttattgttatttcatatttacattctgaattgaaaccctatttaaagtttcttaattctctactccccacccctccaaaacttattgttgcaaaaatgtaaaaacaatattagagagacgtcttactcttatgaaaataagcccaaaggagtcaagaagtcaagaacattacaaaggagttcaaagaagcatttaggttgatggattaagttcactgtcatgattgtgatgatagttccttgagtgtattcgtacataaaaacataccaaattgtatactgtaaatacatgcagtttattgcgtgttagttattcctcagtaaaggctgtaatcccagcactttgggaggccaaggcgggtggatcacctgaggtcaggagttcgagaccagcctgaccaacatggaggaaccccatctctactt

SEQ ID NO: 58449 - DNA, 456 bp, Homo sapiens
atgccacctgaaggtcctgagagctccctgacatcattcaggactgaaggtagaaagtagaatggccctgggttttctgagggttctttatttgtcttcgagaatattaaagaccagcatctctccagaatacaaataagagtctaatgtgataagaggctgaactgaaggtgtccctagaaaatttaagactaaaatgtcagctgaaagacaaagagaaagatgggattgttcttgcaaaatctcattggtaaagagagagaggattttcctaacaaaaatgttctgaactacaagcatctcagagggatttttgaattttggccagctaaacaccatcaggggttctggggggttagtcaaataaagtcagaaagggcctatctgcggcacaaaacacagcacagccaaagctgtggccaccgcaggaggagcaggagagaacctggtgaggag

SEQ ID NO: 58450 - DNA, 161 bp, Homo sapiens
acccctcagccacctcactctctggccttattccacccattatcaccgttttttcctgcttcctaccagaatgataaactagcaccttcaggagaattcttcttcagaaaaccggagtttcgcccaaggcccaattggttgtgtgtttttttattggataa

SEQ ID NO: 58451 - DNA, 845 bp, Homo sapiens
gcttctctcgccaggcgtcctcgtggaagtgacatcgtctttaaaccctgcgtggcaatccctgacgcaccgccgtgatgcccagggaagacagggcgacctggaagtccaactacttccttaagatcatccaactattggatgattatccgaaatgtttcattgtgggagcagacaatgtgggctccaagcagatgcagcagatccgcatgtcccttcgcgggaagaacaacccagctctggagaaactgctgcctcatatccgggggaatgtgggctttgtgttcaccaaggaggacctcactgagatcagggacatgttgctggccaataaggtgccagctgctgcccgtgctggtgccattgccccatgtgaagtcactgtgccagcccagaacactggtctcgggcccgagaagacctcctttttccaggctttaggtatcaccactaaaatctccaggggcaccattgaaatcctgagtgatgtgcagctgatcaagactggagacaaagtgggagccagcgaagccacgctgctgaacatgctcaacatctcccccttctcctttgggctggtcatccagcaggtgttcgacaactggcagcatctacaacctgaagtgcttgataaaacagaggaaactctgcattctcgcttcctggagggtgtccgcaatgttgccagtgtctgtctgcagactggctacccaactgttgcatcagtaccccattctatcatcaacgggtacaaacgagtcctggccttgtctgtggagacggattacaccttcccacttgctgaaaatgtcaaggccttcttggctgatccatctgcctttgtg

SEQ ID NO: 58452 - DNA, 906 bp, Homo sapiens
gcttctctcgccaggcgtcctcgtggaagtgacatcgtctttaaaccctgcgtggcaatccctgacgcaccgccgtgatgcccagggaagacagggcgacctggaagtccaactacttccttaagatcatccaactattggatgattatccgaaatgtttcattgtgggagcagacaatgtgggctccaagcagatgcagcagatccgcatgtcccttcgcgggaaggtcgtggtgctgatgggcaagaacaccatgatgcggcaaggccatccgagggcacctggaaaacaacccagctctggagaaactgctgcctcatatccgggggaatgtgggctttgtgttcaccaaggaggacctcactgagatcagggacatgttgctggccaataaggtgccagctgctgcccgtgctggtgccattgccccatgtgaagtcactgtgccagcccagaacactggtctcgggcccgagaagacctcctttttccaggctttaggtatcaccactaaaatctccaggggcaccattgaaatcctgagtgatgtgcagctgatcaagactggagacaaagtgggagccagcgaagccacgctgctgaacatgctcaacatctcccccttctcctttgggctggtcatccagcaggtgttcgacaactggcagcatctacaacctgaagtgcttgataaaacagaggaaactctgcattctcgcttcctggagggtgtccgcaatgttgccagtgtctgtctgcagactggctacccaactgttgcatcagtaccccattctatcatcaacgggtacaaacgagtcctggccttgtctgtggagacggattacaccttcccacttgctgaaaatgtcaaggccttcttggctgatccatctgcctttgtg

SEQ ID NO: 58453 - DNA, 935 bp, Homo sapiens
cgggaccgcggggatgggtgtcggcgtgaccaggcctgagctccctgtttctcctcagtgacatcgtctttaaaccctgcgtggcaatccctgacgcaccgccgtgatgcccagggaagacagggcgacctggaagtccaactacttccttaagatcatccaactattggatgattatccgaaatgtttcattgtgggagcagacaatgtgggctccaagcagatgcagcagatccgcatgtcccttcgcgggaaggtcgtggtgctgatgggcaagaacaccatgatgcggcaaggccatccgagggcacctggaaaacaacccagctctggagaaactgctgcctcatatccgggggaatgtgggctttgtgttcaccaaggaggacctcactgagatcagggacatgttgctggccaataaggtgccagctgctgcccgtgctggtgccattgccccatgtgaagtcactgtgccagcccagaacactggtctcgggcccgagaagacctcctttttccaggctttaggtatcaccactaaaatctccaggggcaccattgaaatcctgagtgatgtgcagctgatcaagactggagacaaagtgggagccagcgaagccacgctgctgaacatgctcaacatctcccccttctcctttgggctggtcatccagcaggtgttcgacaactggcagcatctacaacctgaagtgcttgataaaacagaggaaactctgcattctcgcttcctggagggtgtccgcaatgttgccagtgtctgtctgcagactggctacccaactgttgcatcagtaccccattctatcatcaacgggtacaaacgagtcctggccttgtctgtggagacggattacaccttcccacttgctgaaaatgtcaaggccttcttggctgatccatctgcctttgtg

SEQ ID NO: 58454 - DNA, 292 bp, Homo sapiens
  misc_feature (191)..(191): n is a, c, g, or t
caattttagaatattttcatcactctgcaaataaaccatatacccattagcagtcatcccttatttcccccattccacacccccacccccagccttaggcaaccattaattgactcaggattaaacaagtttaatcaggattcttcatggatgtactttttagctaactacagtttttcacatggaaatgnaacttacagtaaacacttaacgtaccacagaatttttttctggatttctggtcctgaagcatgaagtgtactagaaaccaattcttctgcggtacttgtgg

SEQ ID NO: 58455 - DNA, 244 bp, Homo sapiens
ctcagctcagctccaggcaaaaagggtttttgaagaaatttctttttccttattgtgtgtagccttggtcgatctgccagtgaagaagccctgcccgcccatggccaagaggtgggcatgtgacttatgctgggacaatcagacacttctcccaggactttgactgcagagtgaagtgggttagaaaagggagaaacttggagtccatccatcttggcagcagagacccagagacagaccagcc

SEQ ID NO: 58456 - DNA, 656 bp, Homo sapiens
tgctattgagttgtatgagttccttatatattttggatattaatgccttactgaaaacatggtttgcaaatattttctcccattctgtaggctgccttttcattttgtagattgttttctttgctgtgcgttatcaccttcctcttagctatctgtattcaaatcttggtactactgactccgtcttatgcctcactgttagtcttcaaagtggaaacctcttgattccttcttcattgcatttgtcaaattcatttttcacttgccatttacattgtcaccattcatggcttaaactactataacagtctttcttctttccctttttctgtaatctgtagtagacacaacagggcaatactaccttcctgtggtttacagtactcatatcattctcatactcaaattttcaataagtccatacagcttccacaataaaggctaaactgtgctagcatttaagctaccatcagacagatttctcaagcccaaatctaatattactctacttaaaatacctccacgggccaggcacaatggctcacgcctgtaatcccagcacttcgggaggctgaggcaagcggatcacttgaggtcaggagttcgaggccagccggaccaacatggtgaaacccaatctctactaaaaatacaaa

SEQ ID NO: 58457 - DNA, 302 bp, Homo sapiens
cctaaaaaaaaaaaaaaaaaaaaagaaaagcttcacagagatatttacatgctatacaactcaccacttaaggcagataattcagtggtttttagtgtagtcacagacatgtgcaaccactaccacatgtgcaattttagaatacttcatcaccttgaaataaaagctcctgtaccctttacgtatccataccctaaacaccccaccccagccccgggcaaccactaatctgctttctgtttctatggatttgcctgttgttgtggacatttcacataaatgaaatcttataatttgtgaca

SEQ ID NO: 58458 - DNA, 676 bp, Homo sapiens
tactatgattattccttccaggagcagcttttaaaagtgcacagcctgtgtagttggagagttctttggaattccaaagccccctgctctttattgaactaaggtttaactggtgttgttatgggctcatctctgtgtcaggtgtccagaattcagcagcaaataaaatgggcatagtcctgacccttaagagcttcaatatagtggaagatttggaacaataaaaaaagacatcgtcgttccatgtaatgggaacaatgacaggagcagtagggggcatgatgagcgcagttaggatactgaccaaaaacatttctagggtcaatgaaagcatcccaggtgcatgaaaataatatttattgacaacatttgccaggcagcatgccaaccactttacaagcattatctcatttaacatttatatagttatatgagataacatatttccattatcctcattttaaagaggaggtagttgcaaattagagaagttaaacaactccttcaggttcacactgtaagaaatgatagagtcccagttcaaacacaggccgagttaaaagtatgagcatttattgttgaaaaaaaacttgaaagataagtgaagtgttaatcagaaggagagagaggttggggaaggaaggaaaggaagagcccccccctcaaaaaaaaagaa

SEQ ID NO: 58459 - DNA, 285 bp, Homo sapiens
cttttccctcaggaacaccaattattcttagatttggccattttacatgatcccatatttcttgtacactttattcatttcttgagattcttttttcttcatctttgactgggttaattctagagcctgatctttgagctccaagattctttctagtctattgaagaaacttttccactgtattttgcatttccctaagtgtgactttcatttccagaagttctgactggttttacttcatgacatcaatctctctggaaaattttcattcatatcctaaattta

SEQ ID NO: 58460 - DNA, 318 bp, Homo sapiens
tttgttagcgtttttatgttatagttgacaaaataaagcttagagaattgccttctaagttcccaggaataagtagtatactttggacaacataggccctaaaataagaaagacttaaatctaattctggctcagccacatgcttgcaatacaacccagtgatattgaaactgagtctcagcagcctcttaactgtgaaaagttgacagcatagtttttcccttgcagggtttttatgaaaccacatctatgaaaatccaagtttgtatgtgaaaagatgtagcacagtgcatgacatgttatgcctatttaattatg

SEQ ID NO: 58461 - DNA, 997 bp, Homo sapiens
cttctctagtttaggtttaacaaagttaaacaatatacatccagatccacgttgatatgctggacataagattgggttgtgtttagctctgagtcacgccctgaagaaacccctgcgaggcatcctgtttgcctctgtgagtggagcgagggagccagctccctgaatcagcccatctccgaggtggctccgaacattgttgctggaagcttagagtccagccttattctctagtccttccaacaattaaaccagctgaatgtggattctctttgcaactgagaacctaactgacagagctggccgcatgttcctggtcattgtagatctttggggatgcccaggtgtgcagaggtaactcctggttggtgacccatgaggacacttcctatgcaaacatcaaggatgtctacttcgtgccatgtcgtgaattctcagggtaggtaatttcgactcgtggccatgagcaaaaggaagcccgatgtgtttctgtttaagcctctcatgatttttttccacaaatgctctcacttggctggttttctgcagccaaacatcagaccttttactgcacccagacacctgggacagccttttcctcacagagggttgaggtatccttatcttatctgctcacccagcatgcactttcaccagcagccctgcttgtgcagtgagcagccaacagaagcctgcttcctgacgcttccggctcctccctacatgggactctgaggtgttcttgagccatgtgacaaaccaacacttcaagatgaaccctctggggccctggactctgacttaaagctgaggaagaggcataagtgacattactcttctgggtggcaacatgtgtgaaaattgccctctagggaaagacaacttggattgaatcaaacgctagagcaagctgcactcatttgccaaatcccctaaacacacatgtgaatttatttgtatctaattattgattaaaccccattgatccccaaattgt

SEQ ID NO: 58462 - DNA, 177 bp, Homo sapiens
aaaccatgaagactttgatatttaaaattcttattttaatactaaatctttgaaatcagtgtatattttatacttacaagacatctgaatttggacttagtcacatttcaagtaagtgctcattagttagtgactaccttagtggacagtgtagatgtagattatgaactttttagg

SEQ ID NO: 58463 - DNA, 549 bp, Homo sapiens
ctgagtctcttgggtgctgtggtagaaattcctacaggggactttgggggtgtagttgcaggcatggtggtcacatgccctcaccaggactccccaagcccagggaacctcttgggcaaaggctccaaggcatgaaacagcctctcattgagggaactgcagaaagccccatgtgtcctcactgaggtcagcagcattctgctctcccagctcctcttcatgcctgcactcgagcagcactgacccgcccagccacttctgtgccggaaagaccgggtaacgaagacgacaacatccctgctctcttggggtgtgtcagcgggtgatggaatagtgaggagctatgaggaagacaaaacagggaccaggcacagagaggaatgcactccgccttcttgagcgcctcctctctgcttgttagtttgcagtctccttgctcggcccatcctcctccaagcctcttctctccccagtctactctccatgagtgatgtctccccagatcatcttctcccattcttctcccactcctaccagatttatgccctc

SEQ ID NO: 58464 - DNA, 614 bp, Homo sapiens
tgagggacctccctagtataagcattacagagcaaattgaccatgcctgcaggaagatttaatacagcagagcagcaagacttttatgcctaaaaattctaaagttattattaaaaagatgtgtatttaatttagctcatgtctttaagacaaagccatctagtggatatttaataaatacttgaaggaaggaaataaaataccaataccaatattacagatgtctgtaaatcccaaataattgaaatcttgcaggtcaaaggaatagtgattgcttctaagaaagaggcaagttcaaagaagttctcttgctaattaagagaactaacttactccaggcaaaccaaggaagacgatggaaaggaggaaaactatacaaatattttcagggtgtggatatgggtgtttcagaaatcaaatggggaaagaaaacaaaaggagaacagaaagagttacgatatcagcaatgggaaatggaagagacaaattcctgaaactgtggggaaactattgctaattaacaaattattttgagaatggaggagtgggttgaatcataaaatgataaagtatatttaaatggaaataaagactttcataacctgaaaaaatca

SEQ ID NO: 58465 - DNA, 619 bp, Homo sapiens
acagctattactgggtagggactccctcaattggcgcaccacagtctatccatcaaaaatttctcaaccatggccctgggattgattgcccaaaacccattagaggactgcagggatctgccagaaggtgggacatgagatatgaatacattccttaaggctctgtagccctgaaaactcagccccagaagatgatctgtgcaggaggttttgagcctatccaggttaccagagacaccaggactacctcctccagccaagactgaccacagtccagagaacaaaacccagatatcagaatctatctctgacactggactcttctttcttgcattgtgggaaatgtaagaactactcttggaaagaaacagtagagaccaagagacactgcgatggaagctgactggtttcagggttcaaaggtctgtgttccaccccaacttggccagttatcagcaggaggggccatgaacaatccagaaaaaccctctgggcctctggttccccatctgaaaaattaaggatagtgaaacttgccttgcctactcacaagtctgtcctgaactcatgaaactctagcagcttttctatctcctcagcttttctatcacttaggtga

SEQ ID NO: 58466 - DNA, 7418 bp, Homo sapiens
  misc_feature (7404)..(7404): n is a, c, g, or t
  misc_feature (7406)..(7406): n is a, c, g, or t
  misc_feature (7408)..(7408): n is a, c, g, or t
  misc_feature (7411)..(7411): n is a, c, g, or t
  misc_feature (7418)..(7418): n is a, c, g, or t
tcgagagcgccgcgaagaggcagcggggcgcgggtggattggggctggaggtgcgcgtcccgtggggtggcaaggcggcactcctggcgctgcgggcgtccccacaggaacagactttgacccagaacacagaacctcacttgtcaacaagaaccttctggaagagaagactggcagaatattttttaagtactaagacttgcctgcgatgtggtctctgcacatagtactaatgaggtgctccttcagattgaccaagtccttggccacaggtccctggtcacttatactcattctcttttctgtacaatatgtatatgggagtggaaagaaatacattggtccttgtggaggaagagattgctctgtttgccactgtgttcctgaaaaggggtctcggggtccaccaggaccaccagggccacagggtccaattggacccctgggagccccaggacccattgggctttcaggagagaaaggaatgagaggggaccgcggccctcctggagcagcaggggacaaaggagataagggtccaactggtgttcctggatttccaggtttagatggcatacctgggcacccagggcctcctggacccagaggcaaacctggtatgagtggccacaatggctcaagaggtgacccagggtttccaggaggaagaggagctcttggcccaggaggccccctaggccatcctggggaaaagggagaaaaaggaaattcagtgttcattttaggtgccgttaaaggtattcagggagacagaggggacccaggactgcctggcttaccaggatcttggggtgcaggaggaccggcaggtcccacaggatatcctggagagccagggttagtgggacctccgggccaaccagggcgtccaggtttgaagggaaatcccggtgtgggagtaaaggggcaaatgggagacccgggtgaggttggtcagcaaggttctcctggacccaccctgttggtagagccacctgacttttgtctctataaaggagaaaagggtataaaaggaattcctggaatggttggactgccaggaccaccaggacgcaagggagaatctggtattggggcaaaaggagaaaaaggtattcctggatttccagggcctcggggggatcctggttcctatggatctccaggttttccaggattaaagggagaactaggactggttggagatcctgggctatttggattaattggcccaaagggggatcctggaaatcgagggcacccaggaccaccaggtgttttggtgactccacctcttccacttaaaggcccaccaggggacccagggttccctggccgctatggagaaacaggggatgttggaccacctggtcccccaggtctcttgggcagaccaggggaagcctgtgcaggcatgataggaccccctgggccacaaggatttcctggtcttcctgggcttccaggagaagctggtattcctgggagacctgattctgctccaggaaaaccagggaagccaggatcacctggcttgcctggagcaccaggcctgcagggcctcccaggatcaagtgtgatatactgtagtgttgggaaccccggaccacaaggaataaaaggcaaagttggtcccccaggaggaagaggcccaaaaggagaaaaaggaaatgaaggactctgtgcctgtgagcctggacccatgggcccccctggccctccaggacttcctgggaggcaggggagtaagggagacttggggctccctggctggcttggaacaaaaggtgacccaggacctcctggtgctgaaggacctccagggctaccaggaaagcatggtgcctctggaccacctggcaacaaaggggcgaagggtgacatggttgtatcaagagttaaagggcacaaaggagaaagaggtcctgatgggcccccaggatttccagggcagccaggatcacatggtcgggatggacatgctggagaaaaaggggatccaggacctccaggggatcatgaagatgcgaccccaggtggtaaaggatttcctggacctctgggccccccaggcaaagcaggacctgttgggcccccaggactgggatttcctggtccaccaggagagcgaggccacccaggagttccaggccacccaggtgtgaggggccctgatggcttaaagggtcagaaaggtgacacaatttcttgcaacgtaacctaccctgggaggcatggccctccaggttttgatggacctccaggtccgaagggatttccaggtccccaaggtgcccctgggctgagtggttcagatgggcataaaggcagacctggcacaccaggaacagcggaaataccaggtccacctggttttcgtggtgacatgggagatccgggttttggaggtgaaaaggggtcctcccctgttgggcccccaggccctcccggctcaccaggagtgaatggtcagaaaggaatcccgggagaccctgcatttggtcacctgggacccccgggaaagaggggtctttcaggagtgccagggataaaaggacccagaggtgatccgggatgtccaggggctgaagggccagctggcattcctggattcctaggtctcaaaggtcccaaaggcagagagggacatgctgggtttccaggtgtcccaggtccacctggccattcctgtgaaagaggtgctccagggataccagggcaaccgggactccctgggtatccaggtagcccaggtgctccaggtgggaaaggacagccgggagatgtggggcctcccgggccagctggaatgaaaggcctccccggactcccaggacggcctggggcacatggtcccccaggcctcccaggaatcccaggtccctttggagatgatgggctacctggtcctccaggtccaaagggaccccgggggctgcctggtttcccaggttttcccggagaaagaggaaagcctggtgcagagggatgtcctggcgcaaagggagaacctggagagaagggcatgtctggccttcctggagaccggggactgagaggggccaaaggagccataggacctcccggagatgaaggagaaatggctatcatttcacaaaagggaacacctggggaacctggacctcctggagatgatggattcccaggagaaagaggtgataaaggaactcccgggatgcaagggagaagaggagagctgggaagatacggaccacctggatttcacagaggggaacctggtgagaaaggtcagccagggcctcctggacccccaggccctccaggctcaactggtctaagagggttcattggttttccaggacttccaggtgaccagggtgagccaggttctccaggtccccctggattttcaggaattgatggagcaagaggacctaaaggaaacaaaggtgaccctgccagtcactttggtccacctggtccaaagggtgagccaggtagccctggatgtccagggcattttggagcatccggagagcagggcttgcctggtattcaagggcccagaggatcacctggaaggccagggccacctggctcctctggaccaccagggtgcccaggtgatcacgggatgcctgggctgaggggacagccaggagaaatgggagaccctgggccaagaggcctccagggggatccagggataccaggtcctccgggaataaaaggtccctccggatcacctggcctgaacggcttgcatggattgaaaggtcagaaaggaactaaaggtgcttcaggtttgcatgatgtggggccacctggtccagtgggaatacctgggctaaaaggggagagaggagaccctgggagcccaggaatctctcctccaggtcctcgtggaaagaaaggtcccccaggacccccagggagttcaggaccacctggtcctgcaggtgccacaggaagagctcctaaggacattcctgacccgggtccacctggagatcagggacctcctggtcctgatggcccaagaggagcacctgggcctccaggcctccctgggagtgttgaccttctgagaggggagccaggtgactgtggtctaccagggccaccaggtccccctggcccaccaggccctccaggatacaaaggctttccaggatgtgatggaaaagatggccagaaaggaccaatgggattcccgggaccgcagggaccacatggatttcctgggccacctggagagaagggtttacctggacctccagggagaaaagggcccactggtcttccaggtcccagaggtgaaccggggccacctgcagatgtggatgactgtccccgaatcccaggccttcctggggcgccaggcatgagaggaccagaaggagccatggggctccctggaatgagaggccccccaggaccagggtgcaaaggagagcctgggctggatggcaggaggggtgtggatggcgtccctgggtctcctgggcctcccggacgtaaaggtgacacaggagaagacggctaccctggaggaccagggcctcctggtcccattggggatcctgggcccaaagggtttggccctggatacctcggtggcttcctcctggttctccacagtcagacggaccaggagcccacctgccccctgggcatgcccaggctctggactgggtatagtctgttatacctggaagggcaagagaaagctcacaatcaagaccttggtctggcagggtcttgccttcccgtatttagcacgctgccctttgcctactgcaacatccaccaggtgtgccactatgcccagagaaacgacagatcctactggctggccagcgctgcgcccctccccatgatgccactctctgaagaggcgatccgcccctatgtcagccgctgtgcggtatgcgaggccccggcccaggcggtggcggtgcacagccaggaccagtccatccccccatgtccgcagacctggaggagcctctggatcgggtattcattcctgatgcacacaggagctggggaccaaggaggagggcaggcccttatgtcacctggcagctgcctggaagatttcagagcagcaccattccttgaatgccagggccggcagggaacttgccactttttcgcaaataagtatagcttctggctcacaacggtgaaagcagacttgcagttttcctctgctccagcaccagacaccttaaaagaaagccaggcccaacgccagaaaatcagccggtgccaggtctgcgtgaagtatagctagagaatgcgaaattcaccaacacgtggccaagagaaacttcctagggggctaagacttcctagactgtgctaagagatgtcatggtgctcattttggactccctttcagtggttccttctgttttgtcgtggttattcccagagtcctctggttccttacacattaagcaaatgctgcacagatggatttgtttggacctcccaatctagggagcctagatactcttattttactgaggatgatcgaagaactggctttacttaaaaatatgctaattctcagaaaggcaagtagatgataaaggccagattacaaattacattactgaaaacttcattcttgggttaacagtatctcaaacaattgaagtcaattactctataatacagtgggcttctggatggattttataggaaaaaataaacaggtcaatgaatgaaactagaaagcagagattttcaacatttcaaaatgatttcctctgtaatctatttttccatatactttaaataatggtaaaaccatgacgcaaagagagatttttttttaaagagaaaaaaaaaaattcacactgccagcgttaacagttcctttcaaaggagaatgaatcatgatggcaggaaggcccacagtcgccgtattccagagatgcgacattagcataaacacatcacagatgaatataaaacattatgttctcttctgcatttttcagagaatagaaatgcctactttggcaacccttttgaaaagtagcaattatggaaaaaaaaatattcaataagagattaggagcctaaaagctattagtgaatattaaggtagttattcacaaaaattgactccccattgcagtgaacttccagacagactgcttttccccagtcggggtccggcgtgtcacaggtgcgtgcgtgctaatgggactgacgctacatggggctcactcaggcaggcacgcgcttcatacaaagcatctcactcccctccccaggagagcctgcacagcttcttgcactcacaacggacactttgctccacacacataatggcagctcacacagggacgtgacagagctatcattatgcacttgggagaaaattaagggccgatttaattaaacttaggtaagaagattcatttaagtcagggttaccccatcaggaggacatggcactatctttaaacgaaacaaagacaatttataatttgaattttatgctcccgtggttggctgttacaggagcatcccattttgccaattttaaagacattcttatatttcatatcagtcttgtaccaaggcaacagtttgacatttggcattagtattttctaaaaaagtttagaatgtgtgtcaatttataatgattatttttttctgtaaagcaaaagatccctttttctgttttgctaggaatttggtgatctaatcctaaatttaaaagatttgttggaaaaaatttttaggaaactcaccttcctcatctaaaagaaaaaggcattttagagaaaactaaagaaatttctcatgagcgtgacactcattttagtgctttgtttccgtgcacttaaaaataattgagaagaaaaactcaattaaaattttgtttataagaaatgttttccttgccaaaccttgatttgtaatgagctcttatatgcagaacacatttcaaatgagttttgctatgggctgcccccagggtggcaatttattttaagagtattttctggtaaaaagaaaaatgtgtattttaagatgaaatattttcttgatgtagcagaatatttcctagttcatttgacccatttgatattttttaaaccatgctctggcatgttgaatatttttgtgcacctaaaacttaagccaatttcaatcttatttgtgattacctttctccttcccaaaaagctttatctattaccaaaagtcaaccctcctaaaagttcaacctgttcatcttgaacttggcctgagaacattttctgggaagaggtaagggtgacaaatggaacatcagaaacgtatcttgcttgctaattattttaaacactttaatgttggtattagaatattatcttcataagttaataaataagtaaaaaaaaaaacccncncnaanacagccn

SEQ ID NO: 58467 - DNA, 1541 bp, Homo sapiens
tcgagagcgccgcgaagaggcagcggggcgcgggtggattggggctggaggtgcgcgtcccgtggggtggcaaggcggcactcctggcgctgcgggcgtccccacaggaacagactttgacccagaacacagaacctcacttgtcaacaagaaccttctggaagagaagactggcagaatattttttaagtactaagacttgcctgcgatgtggtctctgcacatagtactaatgaggtgctccttcagattgaccaagtccttggccacaggtccctggtcacttatactcattctcttttctgtacaatatgtatatgggagtggaaagaaatacattggtccttgtggaggaagagattgctctgtttgccactgtgttcctgaaaaggggtctcggggtccaccaggaccaccagggccacagggtccaattggacccctgggagccccaggacccattgggctttcaggagagaaaggaatgagaggggaccgcggccctcctggagcagcaggggacaaaggagataagggtccaactggtgttcctggatttccaggtttagatggcatacctgggcacccagggcctcctggacccagaggcaaacctggtatgagtggccacaatggctcaagaggtgacccagggtttccaggaggaagaggagctcttggcccaggaggccccctaggccatcctggggaaaagggagaaaaaggaaattcagtgttcattttaggtgccgttaaaggtattcagggagacagaggggacccaggactgcctggcttaccaggatcttggggtgcaggaggaccggcaggtcccacaggatatcctggagagccagggttagtgggacctccgggccaaccagggcgtccaggtttgaagggaaatcccggtgtgggagtaaaggggcaaatgggagacccgggtgaggttggtcagcaaggttctcctggacccaccctgttggtagagccacctgacttttgtctctataaaggagaaaagggtataaaaggaattcctggaatggttggactgccaggaccaccaggacgcaagggagaatctggtattggggcaaaaggagaaaaaggtattcctggatttccagggcctcgggtaagcatcatttgctgttaacatcagtgaatttggagatatttctctttcatgtttttataaaaccaggtcagtagtcccacaagctcaaaagtgaagaatagctcatgtaagaacaaaacattttggacgagaattatggaatatctaaatatcccagagcatccttccattcacatcatttagataaaacaggcaagcaaaagatagaagaatttgggaaaagtgacaggattgtggcatctcttgtctggcacctcagtgccagtaggaaagtagcttggaatagttaatttaagtctatttgaggaaacaacatggtgatataggggcaggagctagaaaaaaagtacaatattaagctccaaacatcaccacatgtcactaatagaaagcccactca

SEQ ID NO: 58468 - DNA, 626 bp, Homo sapiens
gtgttctcaagtttacccagctgctgagtggcagacctagctcaggctgctaaattatgacatgtgcttgttaatgttgttttgacgtgtggattgaaaagaccaccggaagcccagttgtcctttagatgttacagatgagtttgatgtcttgataattgagaaggtaacaaatgcatagaactgggccgtaatagattcttggcaaatattaattcctctgtcagctaccagtgctggtattattggtgccacatgaagattctattgttgcttttcaattgctgggttaaatttctttactttgctcaaaataagccactttttcaatggctgcattcccaaattgtatctgctgcctggttccgtggtccactgtggtatcccatatacctctcacatagagaactggctcaaatagtatctggtttataagtgtgctaattagaacaggtgaagagtaatctcttaagatttttttttttaaggtgaaacagattgtaaaaagagatgatttctgaaggagatggaattcagtatgttaaataataagaatagaccaaattatattcattgtaatttttagggtataaaaggaattcctggaatggttggactgccaggac

SEQ ID NO: 58469 - DNA, 326 bp, Homo sapiens
gtgacacaatttcttgcaacgtaacctaccctgggaggcatggccctccaggttttgatggacctccaggtattatcaatgagaagttactgtcttatatacttcccagagtaaaaaaaaaaaaaccagccagacagataaaccaagagtgaatcctcagactagttaggacatttctgaagttttgagggaccatggataggggaaaacagcatttgtagtaatttgtagttgggcctctagtctgctggtttgagaacactccagatgggcttttcaaatctttgtacaataaaatttaccttgatttgctcacatatcagtta

SEQ ID NO: 58470 - DNA, 522 bp, Homo sapiens
acagatcctactggctggccagcgctgcgcccctccccatgatgccactctctgaagaggcgatccgcccctatgtcagccgctgtgcggtatgcgaggccccggcccaggcggtggcggtgcacagccaggaccagtccatccccccatgtccgcagacctggaggagcctctggatcgggtattcattcctgatggtgagtcccgtgcccttgaaaaccctggctcattcaccatttcctaacaccttctcccgccatttctctctggattggacagtaattctgagcactctgcgcttaggacataaggttacggggactgttgcaaaccatagcctgttgggatgcagggccattatcttttaaaaacacttgtgattgattttgatcacattggtagaatttagaagatgagtttgcttcagccatcggtgaaactggagccaatttgtgtgcatacttaccatgctgagtacgactccttttcagcgcttgtattttgttctttatggaataatct

SEQ ID NO: 58471 - DNA, 369 bp, Homo sapiens
tttcagaacacgtatctgcaaaggccagatggaggaaggaagggtctgggaacacctacatggggtgtgtggacacgaggtgtctcttcttcccttcccaaaggtctggcagggtcttgccttcccgtatttagcacgctgccctttgcctactgcaacatccaccaggtgtgccactatgcccagagaaacgacagatcctactggctggccagcgctgcgcccctccccatgatgccactctctgaagaggcgatccgcccctatgtcagccgctgtgcggtatgcgaggccccggcccaggcggtggcggtgcacagccaggaccagtccatccccccatgtccgcagacctggaggagcctctgg

SEQ ID NO: 58472 - DNA, 350 bp, Homo sapiens
tacacattaagcaaatgctgcacagatggatttgtttggacctcccaatctagggagcctagatactcttattttactgaggatgatcgaagaactggctttacttaaaaatatgctaattctcagaaaggcaagtagatgataaaggccagattacaaattacattactgaaaacttcattcttgggttaacagtatctcaaacaattgaagtcaattactctataatacagtgggcttctggatggattttataggaaaaaataaacaggtcaatgaatgaaactagaaagcagagattttcaacatttcaaaatgatttcctctgtaatctatttttccatatactt

SEQ ID NO: 58473 - DNA, 2988 bp, Homo sapiens
atttggttgaggacgcagccaaactatgtcagtctcttatttgccaacaaaagcatcctaactgatagaggccagacagatttgtttctttttgttttttcaatcttttgttgtgaagaagtaagcataaactctcaataggttacgttttacaagcctctgatgaagttcaaaggacaaccatgcttaggatttccaggacaacctggaaaaaaaaacaggttgagaaataggtgtgttaatctcccttccctctgctcctccctctggccttcctttctttgatggaataggccctaggacacctttctaaaaagactccctgtggtgttcagaatcactcctacagtcaggttctccacaatggatctcagtgctgcaagtcaccgcatacctctaagtgatggaaacagcattcccatcatcggacttggtacctactcagaacctaaatcgacccctaagggagcctgtgcaacatcggtgaaggttgctattgacacagggtaccgacatattgatggggcctacatctaccaaaatgaacacgaagttggggaggccatcagggagaagatagcagaaggaaaggtgcggagggaagatatcttctactgtggaaagctatgggctacaaatcatgtcccagagatggtccgcccaaccctggagaggacactcagggtcctccagctagattatgtggatctttacatcattgaagtacccatggcctttaagccaggagatgaaatataccctagagatgagaatggcaaatggttatatcacaagtcaaatctgtgtgccacttgggaggcgatggaagcttgcaaagacgctggcttggtgaaatccctgggagtgtccaattttaaccgcaggcagctggagctcatcctgaacaagccaggactcaaacacaagccagtcagcaaccaggttgagtgccatccgtatttcacccagccaaaactcttgaaattttgccaacaacatgacattgtcattactgcatatagccctttggggaccagtaggaatccaatctgggtgaatgtttcttctccacctttgttaaaggatgcacttctaaactcattggggaaaaggtacaataagacagcagctcaaattgttttgcgtttcaacatccagcgaggggtggttgtcattcctaaaagctttaatcttgaaaggatcaaagaaaattttcagatctttgacttttctctcactgaagaagaaatgaaggacattgaagccttgaataaaaatgtccgctttgtagaattgctcatgtggcgcgatcatcctgaatacccatttcatgatgaatactgactgccgggagttcctgaacagatttttcactcccatgagtgccaagacggtgcaatgggtagtcccctagatgtgaaaatgaagagagagggttttaccatcctgagaagaaataatgatggaaacatgtttaatgtttgtgcagtgtaaatgactttgactcagtcacattgaagtaaaaatattaaaatctgttgaaataactcttaggaaattatcaactaattttttcagatcagtatcttctagattccagacagaaaaaaattacacttcagaaaagacatcaaaggcaacatatgacaacaagtaatttatgaatctgggtagtagcgttggtaatctgagttctttaagggttcacaggacaacgaagtgcatgtggcagtgtgctggcagtggccttgaggctttggaccattggttacaaaacagacacagccaagataagatccacacacacattattaacaaggaagtgatttgctgcaccttgagttgagaggactacatgtagaaaagtcttaaaatagagctaaacaccacagtggtcaacaaagccatcataatgttggtgtttgtttccctccaatgtatgtatgtttagtttttatccaacctgaggaatgaaaacttaactggatctctcttgcatccttaaagggcctgagtctcaacatggctgctgatccatacttacacatcttactgtcaatcttgcctacattgattatagaaccactattacgtgaaaaggcttgaaacaaccaacatatacaaataaaaccctgccttgtaaaatagtaaaagagaagccatatattggcttttcttcttaacttgggagatatattgaaacaaggtgctttataagattattgtacttaagactttaatagtgttacttggatagcttatatgaattttgagaattttatatgaattttgagaaagcaagttcaaaagaactctggtaattttcctgtatgtacaatttaaagagtgaataagattattagaattcagcaatagagatatatctattttcaattcaactacagaaatatattttattggccgggtgcggtggctcatgcctataatcccagcactttgggaggccaaggtgggcagatcaggaggtcaggagatcgagaccatcttggctaacaaggtgaaaccccgtctctactaaaaatacaaaaaattagccaggcgcggtggcgggggcctgtaatcccagctactcaggaggctgaggcagaagaatggcatgaacccgggaggaggagcttgcagtgagccgagatagcgccactgcagtccggcctgggtgaaagagcgagactccgtctcaaaaacaaaaaaaaaaaagaaaagaaatatattttattcattcacattaggtcactgtcatactgtcataggctgagagagttcttcaaaaattatgttttcccaagatcagttgcttatagataatgttcaatgacctcaagacatatatttttgagaaattatcattttaaaaaatttggtctatactgattgttttcactgattccaatattattacttataacactgacctctggaaaatattttgttcacaagaaataataaagtataatgatttgttgcatc

SEQ ID NO: 58474 - DNA, 2683 bp, Homo sapiens
atttggttgaggacgcagccaaactatgtcagtctcttatttgccaacaaaagcatcctaactgatagaggccagacagatttgtttctttttgttttttcaatcttttgttgtgaagaagtaagcataaactctcaataggttacgttttacaagcctctgatgaagttcaaaggacaaccatgcttaggatttccaggacaacctggaaaaaaaaacaggttgagaaataggtgtgttaatctcccttccctctgctcctccctctggccttcctttctttgatggaataggccctaggacacctttctagatctcagtgctgcaagtcaccgcatacctctaagtgatggaaacagcattcccatcatcggacttggtacctactcagaacctaaatcgctatgggctacaaatcatgtcccagagatggtccgcccaaccctggagaggacactcagggtcctccagctagattatgtggatctttacatcattgaagtacccatggcctttaagccaggagatgaaatataccctagagatgagaatggcaaatggttatatcacaagtcaaatctgtgtgccacttgggaggcgatggaagcttgcaaagacgctggcttggtgaaatccctgggagtgtccaattttaaccgcaggcagctggagctcatcctgaacaagccaggactcaaacacaagccagtcagcaaccaggttgagtgccatccgtatttcacccagccaaaactcttgaaattttgccaacaacatgacattgtcattactgcatatagccctttggggaccagtaggaatccaatctgggtgaatgtttcttctccacctttgttaaaggatgcacttctaaactcattggggaaaaggtacaataagacagcagctcaaattgttttgcgtttcaacatccagcgaggggtggttgtcattcctaaaagctttaatcttgaaaggatcaaagaaaattttcaggtggcgcgatcatcctgaatacccatttcatgatgaatactgactgccgggagttcctgaacagatttttcactcccatgagtgccaagacggtgcaatgggtagtcccctagatgtgaaaatgaagagagagggttttaccatcctgagaagaaataatgatggaaacatgtttaatgtttgtgcagtgtaaatgactttgactcagtcacattgaagtaaaaatattaaaatctgttgaaataactcttaggaaattatcaactaattttttcagatcagtatcttctagattccagacagaaaaaaattacacttcagaaaagacatcaaaggcaacatatgacaacaagtaatttatgaatctgggtagtagcgttggtaatctgagttctttaagggttcacaggacaacgaagtgcatgtggcagtgtgctggcagtggccttgaggctttggaccattggttacaaaacagacacagccaagataagatccacacacacattattaacaaggaagtgatttgctgcaccttgagttgagaggactacatgtagaaaagtcttaaaatagagctaaacaccacagtggtcaacaaagccatcataatgttggtgtttgtttccctccaatgtatgtatgtttagtttttatccaacctgaggaatgaaaacttaactggatctctcttgcatccttaaagggcctgagtctcaacatggctgctgatccatacttacacatcttactgtcaatcttgcctacattgattatagaaccactattacgtgaaaaggcttgaaacaaccaacatatacaaataaaaccctgccttgtaaaatagtaaaagagaagccatatattggcttttcttcttaacttgggagatatattgaaacaaggtgctttataagattattgtacttaagactttaatagtgttacttggatagcttatatgaattttgagaattttatatgaattttgagaaagcaagttcaaaagaactctggtaattttcctgtatgtacaatttaaagagtgaataagattattagaattcagcaatagagatatatctattttcaattcaactacagaaatatattttattggccgggtgcggtggctcatgcctataatcccagcactttgggaggccaaggtgggcagatcaggaggtcaggagatcgagaccatcttggctaacaaggtgaaaccccgtctctactaaaaatacaaaaaattagccaggcgcggtggcgggggcctgtaatcccagctactcaggaggctgaggcagaagaatggcatgaacccgggaggaggagcttgcagtgagccgagatagcgccactgcagtccggcctgggtgaaagagcgagactccgtctcaaaaacaaaaaaaaaaaagaaaagaaatatattttattcattcacattaggtcactgtcatactgtcataggctgagagagttcttcaaaaattatgttttcccaagatcagttgcttatagataatgttcaatgacctcaagacatatatttttgagaaattatcattttaaaaaatttggtctatactgattgttttcactgattccaatattattacttataacactgacctctggaaaatattttgttcacaagaaataataaagtataatgatttgttgcatc

SEQ ID NO: 58475 - DNA, 2629 bp, Homo sapiens
atttggttgaggacgcagccaaactatgtcagtctcttatttgccaacaaaagcatcctaactgatagaggccagacagatttgtttctttttgttttttcaatcttttgttgtgaagaagtaagcataaactctcaataggttacgttttacaagcctctgatgaagttcaaaggacaaccatgcttaggatttccaggacaacctggaaaaaaaaacaggttgagaaataggtgtgttaatctcccttccctctgctcctccctctggccttcctttctttgatggaataggccctaggacacctttctagatctcagtgctgcaagtcaccgcatacctctaagtgatggaaacagcattcccatcatcggacttggtacctactcagaacctaaatcgctatgggctacaaatcatgtcccagagatggtccgcccaaccctggagaggacactcagggtcctccagctagattatgtggatctttacatcattgaagtacccatggcctttaagccaggagatgaaatataccctagagatgagaatggcaaatggttatatcacaagtcaaatctgtgtgccacttgggaggcgatggaagcttgcaaagacgctggcttggtgaaatccctgggagtgtccaattttaaccgcaggcagctggagctcatcctgaacaagccaggactcaaacacaagccagtcagcaaccaggttgagtgccatccgtatttcacccagccaaaactcttgaaattttgccaacaacatgacattgtcattactgcatatagccctttggggaccagtaggaatccaatctgggtgaatgtttcttctccacctttgttaaaggatgcacttctaaactcattggggaaaaggtacaataagacagcagctcaaattgttttgcgtttcaacatccagcgaggggtggttgtcattcctaaaagctttaatcttgaaaggatcaaagaaaattttcaggtggcgcgatcatcctgaatacccatttcatgatgaatactgactgccgggagttcctgaacagatttttcactcccatgagtgccaagacggtgcaatgggtagtcccctagatgtgaaaatgaagagagagggttttaccatcctgagaagaaataatgatggaaacatgtttaatgtttgtgcagtgtaaatgactttgactcagtcacattgaagtaaaaatattaaaatctgttgaaataactcttaggaaattatcaactaattttttcagatcagtatcttctagattccagacagaaaaaaattacacttcagaaaagacatcaaaggcaacatatgacaacaagtaatttatgaatctgggtagtagcgttggtaatctgagttctttaagggttcacaggacaacgaagtgcatgtggcagtgtgctggcagtggccttgaggctttggaccattggttacaaaacagacacagccaagataagatccacacacacattattaacaaggaagtgatttgctgcaccttgagttgagaggactacatgtagaaaagtcttaaaatagagctaaacaccacagtggtcaacaaagccatcataatgttggtgtttgtttccctccaatgtatgtatgtttagtttttatccaacctgaggaatgaaaacttaactggatctctcttgcatccttaaagggcctgagtctcaacatggctgctgatccatacttacacatcttactgtcaatcttgcctacattgattatagaaccactattacgtgaaaaggcttgaaacaaccaacatatacaaataaaaccctgccttgtaaaatagtaaaagagaagccatatattggcttttcttcttaacttgggagatatattgaaacaaggtgctttataagattattgtacttaagactttaatagtgttacttggatagcttatatgaattttgagaattttatatgaattttgagaaagcaaattattagaattcagcaatagagatatatctattttcaattcaactacagaaatatattttattggccgggtgcggtggctcatgcctataatcccagcactttgggaggccaaggtgggcagatcaggaggtcaggagatcgagaccatcttggctaacaaggtgaaaccccgtctctactaaaaatacaaaaaattagccaggcgcggtggcgggggcctgtaatcccagctactcaggaggctgaggcagaagaatggcatgaacccgggaggaggagcttgcagtgagccgagatagcgccactgcagtccggcctgggtgaaagagcgagactccgtctcaaaaacaaaaaaaaaaaagaaaagaaatatattttattcattcacattaggtcactgtcatactgtcataggctgagagagttcttcaaaaattatgttttcccaagatcagttgcttatagataatgttcaatgacctcaagacatatatttttgagaaattatcattttaaaaaatttggtctatactgattgttttcactgattccaatattattacttataacactgacctctggaaaatattttgttcacaagaaataataaagtataatgatttgttgcatc

SEQ ID NO: 58476 - DNA, 2852 bp, Homo sapiens
atttggttgaggacgcagccaaactatgtcagtctcttatttgccaacaaaagcatcctaactgatagaggccagacagatttgtttctttttgttttttcaatcttttgttgtgaagaagtaagcataaactctcaataggttacgttttacaagcctctgatgaagttcaaaggacaaccatgcttaggatttccaggacaacctggaaaaaaaaacaggttgagaaataggtgtgttaatctcccttccctctgctcctccctctggccttcctttctttgatggaataggccctaggacacctttctaaaaagactccctgtggtgttcagaatcactcctacagtcaggttctccacaatggatctcagtgctgcaagtcaccgcatacctctaagtgatggaaacagcattcccatcatcggacttggtacctactcagaacctaaatcgacccctaagggagcctgtgcaacatcggtgaaggttgctattgacacagggtaccgacatattgatggggcctacatctaccgtgcggagggaagatatcttctactgtggaaagctatgggctacaaatcatgtcccagagatggtccgcccaaccctggagaggacactcagggtcctccagctagattatgtggatctttacatcattgaagtacccatggcctttaagccaggagatgaaatataccctagagatgagaatggcaaatggttatatcacaagtcaaatctgtgtgccacttgggaggcgatggaagcttgcaaagacgctggcttggtgaaatccctgggagtgtccaattttaaccgcaggcagctggagctcatcctgaacaagccaggactcaaacacaagccagtcagcaaccaggttgagtgccatccgtatttcacccagccaaaactcttgaaattttgccaacaacatgacattgtcattactgcatatagccctttggggaccagtaggaatccaatctgggtgaatgtttcttctccacctttgttaaaggatgcacttctaaactcattggggaaaaggtacaataagacagcagctcaaattgttttgcgtttcaacatccagcgaggggtggttgtcattcctaaaagctttaatcttgaaaggatcaaagaaaattttcaggtggcgcgatcatcctgaatacccatttcatgatgaatactgactgccgggagttcctgaacagatttttcactcccatgagtgccaagacggtgcaatgggtagtcccctagatgtgaaaatgaagagagagggttttaccatcctgagaagaaataatgatggaaacatgtttaatgtttgtgcagtgtaaatgactttgactcagtcacattgaagtaaaaatattaaaatctgttgaaataactcttaggaaattatcaactaattttttcagatcagtatcttctagattccagacagaaaaaaattacacttcagaaaagacatcaaaggcaacatatgacaacaagtaatttatgaatctgggtagtagcgttggtaatctgagttctttaagggttcacaggacaacgaagtgcatgtggcagtgtgctggcagtggccttgaggctttggaccattggttacaaaacagacacagccaagataagatccacacacacattattaacaaggaagtgatttgctgcaccttgagttgagaggactacatgtagaaaagtcttaaaatagagctaaacaccacagtggtcaacaaagccatcataatgttggtgtttgtttccctccaatgtatgtatgtttagtttttatccaacctgaggaatgaaaacttaactggatctctcttgcatccttaaagggcctgagtctcaacatggctgctgatccatacttacacatcttactgtcaatcttgcctacattgattatagaaccactattacgtgaaaaggcttgaaacaaccaacatatacaaataaaaccctgccttgtaaaatagtaaaagagaagccatatattggcttttcttcttaacttgggagatatattgaaacaaggtgctttataagattattgtacttaagactttaatagtgttacttggatagcttatatgaattttgagaattttatatgaattttgagaaagcaagttcaaaagaactctggtaattttcctgtatgtacaatttaaagagtgaataagattattagaattcagcaatagagatatatctattttcaattcaactacagaaatatattttattggccgggtgcggtggctcatgcctataatcccagcactttgggaggccaaggtgggcagatcaggaggtcaggagatcgagaccatcttggctaacaaggtgaaaccccgtctctactaaaaatacaaaaaattagccaggcgcggtggcgggggcctgtaatcccagctactcaggaggctgaggcagaagaatggcatgaacccgggaggaggagcttgcagtgagccgagatagcgccactgcagtccggcctgggtgaaagagcgagactccgtctcaaaaacaaaaaaaaaaaagaaaagaaatatattttattcattcacattaggtcactgtcatactgtcataggctgagagagttcttcaaaaattatgttttcccaagatcagttgcttatagataatgttcaatgacctcaagacatatatttttgagaaattatcattttaaaaaatttggtctatactgattgttttcactgattccaatattattacttataacactgacctctggaaaatattttgttcacaagaaataataaagtataatgatttgttgcatc

SEQ ID NO: 58477 - DNA, 964 bp, Homo sapiens
atttggttgaggacgcagccaaactatgtcagtctcttatttgccaacaaaagcatcctaactgatagaggccagacagatttgtttctttttgttttttcaatcttttgttgtgaagaagtaagcataaactctcaataggttacgttttacaagcctctgatgaagttcaaaggacaaccatgcttaggatttccaggacaacctggaaaaaaaaacaggttgagaaataggtgtgttaatctcccttccctctgctcctccctctggccttcctttctttgatggaataggccctaggacacctttctagatctcagtgctgcaagtcaccgcatacctctaagtgatggaaacagcattcccatcatcggacttggtacctactcagaacctaaatcgctatgggctacaaatcatgtcccagagatggtccgcccaaccctggagaggacactcagggtcctccagctagattatgtggatctttacatcattgaagtacccatggcctttaagccaggagatgaaatataccctagagatgagaatggcaaatggttatatcacaagtcaaatctgtgtgccacttgggaggtaagttcaaatgtgcttcttattttaaaagacgatatttttaaaactgtgatctgattattcctgtcatatttatggagagagatgcaccctttactttcaatgaaaagtaacagtcagaacaggcattcctaaccataagtacaggtatatgaaatctccacttctgggtactaaataattcttacttttgttttgctggaatgccaaagaaaagagagaggggtggaaggaaaaacagtgtaaacaaaatatgttctaatataaaagtaattaaaatatatgaataagataaattcacaaatcaaaaaatatatatcaagttgttaatatgatgcctacaagaaacaaacttaaaatgatacat

SEQ ID NO: 58478 - DNA, 367 bp, Homo sapiens
gcaatgggatctggagccaaagaaaaatatatctgagttctagctcctcactaagtaactgtgtgataatgggtatgtcactcaccctctttcagctttgggtcctttatgtgtaaaagggaaaaacatatgcctacatcataaggcagatgtgaacatcaaatgttatcagtaactgtcaatctgttttattaattgtagaatgtccaaaatattagtttgtatggacttcaatgagtatgttttgtggagtggagtggggaaagggatcattgcttaccctctgcacatatcatgtttgagcctagtacaagacagccatgagcacaaaggactaagctacttaaatcagccccaaaacaacttc

SEQ ID NO: 58479 - DNA, 194 bp, Homo sapiens
agggcagggcagacagtgcaccaggggaagtgcttccacagggcagagctgggtgcggggacccccagatgcgggcggcaaactggagaccccacaggagccgggactggcttcattcctcattccctgcacctgtgatgggcagcagcggccaccggtgcccactgggcagttccaggccgggccgagggact

SEQ ID NO: 58480 - DNA, 402 bp, Homo sapiens
caagactttgctgtattccaagaatgacaagttcatggagaaatttgactgctttgtcaaagctgggtcacataagcacatgaccctttttgaggacttcgtagggcagagacagaaaggtagttacctgacaacttcaatgggtgagtatgaagccctctccctgtggtctctaaagtcggggtaccatatattctggatttgggggtccagtcttaggttgagaatctgtagcagcccgtatattctcctgactaggcccaggagagcttaaatgttgagatatgtaggtaggttatctgccatatttggggattaaaaccaaccaaaaatatacctctaaaaggacctggacctctttgagggtcttctaggcaaatcctagcaaaatgatggtgggcc

SEQ ID NO: 58481 - DNA, 447 bp, Homo sapiens
aagcttccattcttttcccatcttgatatggagggttctccagaggaaaataaggaaatgagatattacatgcttcaaaggtaagtgttaggctaccacatttgggtaatatatatatctttaaaaaaacagtaaggtactgacagctaagccctgagatttatttgatcattttttttctatctttaaaaaatgaaggctattttttttaagaaaatgaataaaaatgggcatattggctcctgaatgtctaaacctttattttatattgggaatttgaataaaagatccctgagcccatgtgtgatattttagctacgttgaaaacaagcaccccatgcagaccctgctgtgctattatttcctgaagggaacctcagatgtatcagatttactccctggatttggctagtatttccagtgaagtctcttcaactgctgtaaagg

SEQ ID NO: 58482 - DNA, 336 bp, Homo sapiens
taaaatatatttgttgtaaggaagaggagcaaatcaatacttcttgtcctttttataccattggctaaaagccgtgagccaattctcagaatattatatagacccattaagattgcatactgaggtatactgtcagaaggtttgtgagcttttgactgtagccagtgtgtacgtttcttgattacattttatggaaataattcctacttaaatacctttctttgacttatccattaggatgacatcagaattgtgacccttgtacactattgaatctatttcattgttgcctagatagagtaccttcatgtagttaatgtactttaaaaatagaga

SEQ ID NO: 58483 - DNA, 469 bp, Homo sapiens
aatgatgcagccacaaacaaaggaagagtagcagccaccagaaaccagaagaggcaaggaagagattgtcccctaaagcctccaagggaacatggctctgcctacaccttgatttcaacccaacaaaactgtcattgaacttccagcctccagaactaagagaagagtaaattattgtcagctgaaggcaccaagtttgtggaaatttattaaggcagccacaggaaactaatacagcctgtgttaggcaatcctttgcatgtatctcagtaaccaaatatcacaggatcatctacttattgtttactttttttcttatgccccaaaaagcactttgatgttaacttgtaagaaaatatggaattatggatattcttccaatggcaaatgcctttgttactacacattgattctctatttccattactttctatgcataaaataacattttttcaatatggaatcagag

SEQ ID NO: 58484 - DNA, 3571 bp, Homo sapiens
agtttcttgggcccccggcagccggcgggacagaacgcggagagtcgccgcctggccgggcgtagacgcggtggcagagcccgcgcggcgctggaagcgagtggcggagcggcgggacctcggcggactcgccatggaggaggaggatgatcagaagtgtgtggagactgtggagctgggcagctatgagaagtgccaggaccttcgtgccctcctcaagcgaaaacaccgctttatcctgctgcgatccccagggaacaaggtcagcgacatcaaattccaggcacccaccggggaggagaaggaatcctggatcaaagccctcaatgaagggattaaccgaggcaaaaacaaggctttcgatgaggtaaaggtggacaagagctgcgccctggagcatgtgacacgggaccgggtgcgagggggccagcgacgccggccaccaacgagagtccacctgaaggaggtggccagtgcagcttctgacggtcttctgcgcctggatcttgatgttccggacagtgggccaccagtgtttgcccccagcaatcatgtcagtgaagcccaacctcgggagacaccccggcccctcatgcctcctaccaagcctttcctagcacctgagaccaccagccctggtgacagggtggagacccctgtgggggagagagccccaacccctgtctcagcaagctctgaggtctcccctgagagccaagaggactcagagaccccagcagaggaggacagtggctctgagcagcctcccaacagcgtcctgcctgacaaactgaaggtgagctgggagaaccccagcccccaggaggcccctgctgcagagagtgcagaaccgtcccaggcaccctgttctgagacttctgaggctgcccccagggagggtgggaagccccctacaacccccacccaagatcttatcagagaaactgaaagcctccatgggtgagatgcaggcttctgggccacctgctccaggcacagtgcaggtctcagtgaatggcatggatgacagtcctgagcctgccaagccctctcaggctgagggcaccccaggaactcctccaaaggatgcaacaacatccacagcactgcccccctgggacctgccacctcagttccatccccgctgctcctcccttggggacttgcttggggaaggcccgcggcatcccttgcagcccagggaacggctatatcgggcccagctggaggtgaaggtggcctcggaacagacggagaaactgttgaacaaggtgctgggcagtgagccggcccctgttagtgccgaaacattgctcagccaggctgtggagcagctgaggcaggccacccaggtcctgcaggaaatgagagatttgggagagctgagccaggaagcacctgggctaagggagaagcggaaggagctggtgaccctctacaggagaagtgcaccctagggccttctgggccagaggcaccatcccttctggccatccatcaagtccatcaaggcccagccctgctgagaaatgtgcttctgcttctacagcaatggctgcaggagggccattgggcatgtcagggtttggccatgacccgaagagactcctggcgtccttcctactctgctctggccagtggtgccaggtgccacccagggctactgcctggctatctggcctggcctctgggctggggctggggctgggagcacacacgctgggacctatgtgtttgtgtggtcgttccaaactgccccagggctttgggggcggcacttggggtttctgggaatgacatcatctctgttccccatccccagtagtttacattcctgacttctgaatacagcacagctgagccccctgcagctcccatctccagctattcctaggcaaagagcctcatggctaaggcagcctcaaagccagcccctcctcccacctattctgagtagctgcagaggccttgggtccaggctctaggttcatccctcagttggggggaacgtaggacccagctggagcctcttgagggagatgagaggcctctttgtgaggaggacattagctgtgtggcctctctctctttggccctgtttccttttttgcaaaacaaggacattttctgcagccccttcctctcagtgagctatgattggagggcttaggtctggaggattcaagagtggaagaggaatttaaggggtcccctagtctagtctctgcccctggatagtgtccagccttgtatatttctgaagaggtggatcccagagtggctctgatgtccacattagaaaaacttacttgtaatgatcatgtcagccttcagaagagaatccccaccaacttctgtgcctcctcagatggggatttatctggatctctgtggttccttctcagccgaaacaggtccagtatcccagtcatttcttcaaatgctgataggggtatgttggaatccgaagccacttccccgccttcaagccccagatgggctgctctcctgtaactttctaggagaagagacattttcttctttccctttcctggtccatccctgcaccctggtcctctcccagcctctcccccacattgtccctgactctaggggcacatccagtctccatcgtgctgcagcagctggactgagggcagagcctgtaggtgcagaggccctggctcccgaggtccagccactctccctggggcctctggggtgagagcagcttccgataggacctgcccagatttctgcatgtgcacttttgtttactgaaagagagaaaggggggggtcacagcaacatgccctggcctttctgccctgttccccaaccccactgaggcctgctgcacaggtcaatgccttcgttatcgttattgtactgtcactttgttcttgaggtagtagtcaaggatcaggaggggcagatgtcttctctgggctgcgtggggccggagcagaggtgagcagcaatgcactggttcgggagcccccatcagcctccttgtgcaaactgggcccccatgccacagtctggctttccctccatctgccccaggacaagagcaagaaggacatcagttgcccagtcatgtgatcccctgccatcttgccttaggaacagccttcccccaccagcagccatggctggctggggctttagccaagccacctactgccaggaattggagcctcagttccctcctgtgtcaagtagctaactgcagcagctggactgagggcagagtctgtgggtgcagagaccctgcatgtaggtcacaggttgaggcccagccactctccctggggcctggtgggtaggcaagtagctctggggccacctcaagtgaccaaatgctattaatttccatcctttagcaggctgggccctaggcaggaagctggcttctgggagaggagtgagaacgtgcagggcctgcctagcttgcgtgcttgaggaaggtggcattccgtgcttgcctccttgaggagggtggcattctgtgtcttctgcttatgaagcgcctttcttaaagtttggcaataaatccatttttatggaa

SEQ ID NO: 58485 - DNA, 370 bp, Homo sapiens
ggagaggagtgagaacgtgcagggcctgcctagcttgcgtgcttgaggaaggtggcattccgtgcttgcctccttgaggagggtggcattctgtgtcttctgcttatgaagcgcctttcttaagcagaagacacagaatgccaccctcctcaagtgaccaaatgctattaatttccatcctttagcaggctgggccctaggcaggaagctggcttctgggagaggagtgagaacgtgcagggcctgcctagcttgcgtgcttgaggaaggtggcattccgtgcttgcctccttgaggagggtggcattctgtgtcttctgcttatgaagcgcctttcttaaagtttggcaataaatccatttttatggaa

SEQ ID NO: 58486 - DNA, 751 bp, Homo sapiens
ttgggaggagggttaacaccaggccagaaaccacgtgggcagggtggccctgcactgggctgcaggtgcagggcacgagcaggctgtgcgtctgcttctggagcacgaggctgctgtggacgaggaggatgcggtaggggccctcacagaggaggggaacactgcccttcatctggctgctggtcggggccatatggctgtgctgcagcgacttgtggacatcgggctggacctggaggagcagaatgcggaaggtctgactgccctgcattcggctgctggaggatcccaccctgactgtgtgcagctcctcctcagggctgggagcaccgtgaatgccctcacccaggtagccaggccctcccaagactgcggtcggctcttggctgctgagccatagccatgtcggcagtaacggcacagggattcctgaaccctgagtgaatagaggcttcgaggcagcagacaaggttctgatcttggcttctccactgctgagccctgtgacctggagcaagttacttaacctctctgagccttgtttcccaactataaagtgcagtgacatttacttttttacattgttgtgaggattaaatacctaacacagtgcccaggacataatagggcccaacacctcaatacctgttagtgtttttttgttttaatttttttgagatgggtcttactctgtcgcccaggctgaagtgcaatggtgcgatcttggctcactgtaacctccgcctcctgg

SEQ ID NO: 58487 - DNA, 3721 bp, Homo sapiens
agtttcttgggcccccggcagccggcgggacagaacgcggagagtcgccgcctggccgggcgtagacgcggtggcagagcccgcgcggcgctggaagcgagtggcggagcggcgggacctcggcggactcgccatggaggaggagggtgtgaaggaagccggtgagaagcctcggggagcacagatggtggacaaggctggctggatcaagaagagcagtgggggcctcctgggtttctggaaagaccgatatctgctcctctgccaggcccagctgctggtctatgagaatgaggatgatcagaagtgtgtggagactgtggagctgggcagctatgagaagtgccaggaccttcgtgccctcctcaagcgaaaacaccgctttatcctgctgcgatccccagggaacaaggtcagcgacatcaaattccaggcacccaccggggaggagaaggaatcctggatcaaagccctcaatgaagggattaaccgaggcaaaaacaaggctttcgatgaggtaaaggtggacaagagctgcgccctggagcatgtgacacgggaccgggtgcgagggggccagcgacgccggccaccaacgagagtccacctgaaggaggtggccagtgcagcttctgacggtcttctgcgcctggatcttgatgttccggacagtgggccaccagtgtttgcccccagcaatcatgtcagtgaagcccaacctcgggagacaccccggcccctcatgcctcctaccaagcctttcctagcacctgagaccaccagccctggtgacagggtggagacccctgtgggggagagagccccaacccctgtctcagcaagctctgaggtctcccctgagagccaagaggactcagagaccccagcagaggaggacagtggctctgagcagcctcccaacagcgtcctgcctgacaaactgaaggtgagctgggagaaccccagcccccaggaggcccctgctgcagagagtgcagaaccgtcccaggcaccctgttctgagacttctgaggctgcccccagggagggtgggaagccccctacaacccccacccaagatcttatcagagaaactgaaagcctccatgggtgagatgcaggcttctgggccacctgctccaggcacagtgcaggtctcagtgaatggcatggatgacagtcctgagcctgccaagccctctcaggctgagggcaccccaggaactcctccaaaggatgcaacaacatccacagcactgcccccctgggacctgccacctcagttccatccccgctgctcctcccttggggacttgcttggggaaggcccgcggcatcccttgcagcccagggaacggctatatcgggcccagctggaggtgaaggtggcctcggaacagacggagaaactgttgaacaaggtgctgggcagtgagccggcccctgttagtgccgaaacattgctcagccaggctgtggagcagctgaggcaggccacccaggtcctgcaggaaatgagagatttgggagagctgagccaggaagcacctgggctaagggagaagcggaaggagctggtgaccctctacaggagaagtgcaccctagggccttctgggccagaggcaccatcccttctggccatccatcaagtccatcaaggcccagccctgctgagaaatgtgcttctgcttctacagcaatggctgcaggagggccattgggcatgtcagggtttggccatgacccgaagagactcctggcgtccttcctactctgctctggccagtggtgccaggtgccacccagggctactgcctggctatctggcctggcctctgggctggggctggggctgggagcacacacgctgggacctatgtgtttgtgtggtcgttccaaactgccccagggctttgggggcggcacttggggtttctgggaatgacatcatctctgttccccatccccagtagtttacattcctgacttctgaatacagcacagctgagccccctgcagctcccatctccagctattcctaggcaaagagcctcatggctaaggcagcctcaaagccagcccctcctcccacctattctgagtagctgcagaggccttgggtccaggctctaggttcatccctcagttggggggaacgtaggacccagctggagcctcttgagggagatgagaggcctctttgtgaggaggacattagctgtgtggcctctctctctttggccctgtttccttttttgcaaaacaaggacattttctgcagccccttcctctcagtgagctatgattggagggcttaggtctggaggattcaagagtggaagaggaatttaaggggtcccctagtctagtctctgcccctggatagtgtccagccttgtatatttctgaagaggtggatcccagagtggctctgatgtccacattagaaaaacttacttgtaatgatcatgtcagccttcagaagagaatccccaccaacttctgtgcctcctcagatggggatttatctggatctctgtggttccttctcagccgaaacaggtccagtatcccagtcatttcttcaaatgctgataggggtatgttggaatccgaagccacttccccgccttcaagccccagatgggctgctctcctgtaactttctaggagaagagacattttcttctttccctttcctggtccatccctgcaccctggtcctctcccagcctctcccccacattgtccctgactctaggggcacatccagtctccatcgtgctgcagcagctggactgagggcagagcctgtaggtgcagaggccctggctcccgaggtccagccactctccctggggcctctggggtgagagcagcttccgataggacctgcccagatttctgcatgtgcacttttgtttactgaaagagagaaaggggggggtcacagcaacatgccctggcctttctgccctgttccccaaccccactgaggcctgctgcacaggtcaatgccttcgttatcgttattgtactgtcactttgttcttgaggtagtagtcaaggatcaggaggggcagatgtcttctctgggctgcgtggggccggagcagaggtgagcagcaatgcactggttcgggagcccccatcagcctccttgtgcaaactgggcccccatgccacagtctggctttccctccatctgccccaggacaagagcaagaaggacatcagttgcccagtcatgtgatcccctgccatcttgccttaggaacagccttcccccaccagcagccatggctggctggggctttagccaagccacctactgccaggaattggagcctcagttccctcctgtgtcaagtagctaactgcagcagctggactgagggcagagtctgtgggtgcagagaccctgcatgtaggtcacaggttgaggcccagccactctccctggggcctggtgggtaggcaagtagctctggggccacctcaagtgaccaaatgctattaatttccatcctttagcaggctgggccctaggcaggaagctggcttctgggagaggagtgagaacgtgcagggcctgcctagcttgcgtgcttgaggaaggtggcattccgtgcttgcctccttgaggagggtggcattctgtgtcttctgcttatgaagcgcctttcttaaagtttggcaataaatccatttttatggaa

SEQ ID NO: 58488 - DNA, 2941 bp, Homo sapiens
agtttcttgggcccccggcagccggcgggacagaacgcggagagtcgccgcctggccgggcgtagacgcggtggcagagcccgcgcggcgctggaagcgagtggcggagcggcgggacctcggcggactcgccatggaggaggagggtgtgaaggaagccggtgagaagcctcggggagcacagatggtggacaaggcccctgctgcagagagtgcagaaccgtcccaggcaccctgttctgagacttctgaggctgcccccagggagggtgggaagccccctacaacccccacccaagatcttatcagagaaactgaaagcctccatgggtgagatgcaggcttctgggccacctgctccaggcacagtgcaggtctcagtgaatggcatggatgacagtcctgagcctgccaagccctctcaggctgagggcaccccaggaactcctccaaaggatgcaacaacatccacagcactgcccccctgggacctgccacctcagttccatccccgctgctcctcccttggggacttgcttggggaaggcccgcggcatcccttgcagcccagggaacggctatatcgggcccagctggaggtgaaggtggcctcggaacagacggagaaactgttgaacaaggtgctgggcagtgagccggcccctgttagtgccgaaacattgctcagccaggctgtggagcagctgaggcaggccacccaggtcctgcaggaaatgagagatttgggagagctgagccaggaagcacctgggctaagggagaagcggaaggagctggtgaccctctacaggagaagtgcaccctagggccttctgggccagaggcaccatcccttctggccatccatcaagtccatcaaggcccagccctgctgagaaatgtgcttctgcttctacagcaatggctgcaggagggccattgggcatgtcagggtttggccatgacccgaagagactcctggcgtccttcctactctgctctggccagtggtgccaggtgccacccagggctactgcctggctatctggcctggcctctgggctggggctggggctgggagcacacacgctgggacctatgtgtttgtgtggtcgttccaaactgccccagggctttgggggcggcacttggggtttctgggaatgacatcatctctgttccccatccccagtagtttacattcctgacttctgaatacagcacagctgagccccctgcagctcccatctccagctattcctaggcaaagagcctcatggctaaggcagcctcaaagccagcccctcctcccacctattctgagtagctgcagaggccttgggtccaggctctaggttcatccctcagttggggggaacgtaggacccagctggagcctcttgagggagatgagaggcctctttgtgaggaggacattagctgtgtggcctctctctctttggccctgtttccttttttgcaaaacaaggacattttctgcagccccttcctctcagtgagctatgattggagggcttaggtctggaggattcaagagtggaagaggaatttaaggggtcccctagtctagtctctgcccctggatagtgtccagccttgtatatttctgaagaggtggatcccagagtggctctgatgtccacattagaaaaacttacttgtaatgatcatgtcagccttcagaagagaatccccaccaacttctgtgcctcctcagatggggatttatctggatctctgtggttccttctcagccgaaacaggtccagtatcccagtcatttcttcaaatgctgataggggtatgttggaatccgaagccacttccccgccttcaagccccagatgggctgctctcctgtaactttctaggagaagagacattttcttctttccctttcctggtccatccctgcaccctggtcctctcccagcctctcccccacattgtccctgactctaggggcacatccagtctccatcgtgctgcagcagctggactgagggcagagcctgtaggtgcagaggccctggctcccgaggtccagccactctccctggggcctctggggtgagagcagcttccgataggacctgcccagatttctgcatgtgcacttttgtttactgaaagagagaaaggggggggtcacagcaacatgccctggcctttctgccctgttccccaaccccactgaggcctgctgcacaggtcaatgccttcgttatcgttattgtactgtcactttgttcttgaggtagtagtcaaggatcaggaggggcagatgtcttctctgggctgcgtggggccggagcagaggtgagcagcaatgcactggttcgggagcccccatcagcctccttgtgcaaactgggcccccatgccacagtctggctttccctccatctgccccaggacaagagcaagaaggacatcagttgcccagtcatgtgatcccctgccatcttgccttaggaacagccttcccccaccagcagccatggctggctggggctttagccaagccacctactgccaggaattggagcctcagttccctcctgtgtcaagtagctaactgcagcagctggactgagggcagagtctgtgggtgcagagaccctgcatgtaggtcacaggttgaggcccagccactctccctggggcctggtgggtaggcaagtagctctggggccacctcaagtgaccaaatgctattaatttccatcctttagcaggctgggccctaggcaggaagctggcttctgggagaggagtgagaacgtgcagggcctgcctagcttgcgtgcttgaggaaggtggcattccgtgcttgcctccttgaggagggtggcattctgtgtcttctgcttatgaagcgcctttcttaaagtttggcaataaatccatttttatggaa

SEQ ID NO: 58489 - DNA, 3787 bp, Homo sapiens
agtttcttgggcccccggcagccggcgggacagaacgcggagagtcgccgcctggccgggcgtagacgcggtggcagagcccgcgcggcgctggaagcgagtggcggagcggcgggacctcggcggactcgccatggaggaggagggtgtgaaggaagccggtgagaagcctcggggagcacagatggtggacaaggctggctggatcaagaagagcagtgggggcctcctgggtttctggaaagaccgatatctgctcctctgccaggcccagctgctggtctatgagaatgaggatgatcagaagtgtgtggagactgtggagctgggcagctatgagaagtgccaggaccttcgtgccctcctcaagcgaaaacaccgctttatcctgctgcgatccccagggaacaaggtcagcgacatcaaattccaggcacccaccggggaggagaaggaatcctggatcaaagccctcaatgaagggattaaccgaggcaaaaacaaggctttcgatgaggtaaaggtggacaagagctgcgccctggagcatgtgacacgggaccgggtgcgagggggccagcgacgccggccaccaacgagagtccacctgaaggaggtggccagtgcagcttctgacggtcttctgcgcctggatcttgatgttccggacagtgggccaccagtgtttgcccccagcaatcatgtcagtgaagcccaacctcgggagacaccccggcccctcatgcctcctaccaagcctttcctagcacctgagaccaccagccctggtgacagggtggagacccctgtgggggagagagccccaacccctgtctcagcaagctctgaggtctcccctgagagccaagaggactcagagaccccagcagaggaggacagtggctctgagcagcctcccaacagcgtcctgcctgacaaactgaaggtgagctgggagaaccccagcccccaggaggcccctgctgcagagagtgcagaaccgtcccaggcaccctgttctgagacttctgaggctgcccccagggagggtgggaagccccctacaacccccacccaagatcttatcagagaaactgaaagcctccatgggtgagatgcaggcttctgggccacctgctccaggcacagtgcaggtctcagtgaatggcatggatgacagtcctgagcctgccaagccctctcaggctgagggcaccccaggaactcctccaaaggatgcaacaacatccacagcactgcccccctgggacctgccacctcagttccatccccgctgctcctcccttggggacttgcttggggaaggcccgcggcatcccttgcagcccagggaacggctatatcgggcccagctggaggtgaaggtggcctcggaacagacggagaaactgttgaacaaggtgctgggcagtgagccggcccctgttagtgccgaaacattgctcagccaggctgtggagcagctgaggcaggccacccaggtcctgcaggaaatgagagatttgggagagctgagccaggaagcacctgggctaagggagaagcggaaggagctggtgaccctctacaggagaagtgcaccctagggccttctgggccagaggcaccatcccttctggccatccatcaagtccatcaaggcccagccctgctgagaaatgtgcttctgcttctacagcaatggctgcaggagggccattgggcatgtcagggtttggccatgacccgaagagactcctggcgtccttcctactctgctctggccagtggtgccaggtgccacccagggctactgcctggctatctggcctggcctctgggctggggctggggctgggagcacacacgctgggacctatgtgtttgtgtggtcgttccaaactgccccagggctttgggggcggcacttggggtttctgggaatgacatcatctctgttccccatccccagtagtttacattcctgacttctgaatacagcacagctgagccccctgcagctcccatctccagctattcctaggcaaagagcctcatggctaaggcagcctcaaagccagcccctcctcccacctattctgagtagctgcagaggccttgggtccaggctctaggttcatccctcagttggggggaacgtaggacccagctggagcctcttgagggagatgagaggcctctttgtgaggaggacattagctgtgtggcctctctctctttggccctgtttccttttttgcaaaacaaggacattttctgcagccccttcctctcagtgagctatgattggagggcttaggtctggaggattcaagagtggaagaggaatttaaggggtcccctagtctagtctctgcccctggatagtgtccagccttgtatatttctgaagaggtggatcccagagtggctctgatgtccacattagaaaaacttacttgtaatgatcatgtcagccttcagaagagaatccccaccaacttctgtgcctcctcagatggggatttatctggatctctgtggttccttctcagccgaaacaggtccagtatcccagtcatttcttcaaatgctgataggggtatgttggaatccgaagccacttccccgccttcaagccccagatgggctgctctcctgtaactttctaggagaagagacattttcttctttccctttcctggtccatccctgcaccctggtcctctcccagcctctcccccacattgtccctgactctaggggcacatccagtctccatcgtgctgcagcagctggactgagggcagagcctgtaggtgcagaggccctggctcccgaggtccagccactctccctggggcctctggggtgagagcagcttccgataggacctgcccagatttctgcatgtgcacttttgtttactgaaagagagaaaggggggggtcacagcaacatgccctggcctttctgccctgttccccaaccccactgaggcctgctgcacaggtcaatgccttcgttatcgttattgtactgtcactttgttcttgaggtagtagtcaaggatcaggaggggcagatgtcttctctgggctgcgtggggccggagcagaggtgagcagcaatgcactggttcgggagcccccatcagcctccttgtgcaaactgggcccccatgccacagtctggctttccctccatctgccccaggacaagagcaagaaggacatcagttgcccagtcatgtgatcccctgccatcttgccttaggaacagccttcccccaccagcagccatggctggctggggctttagccaagccacctactgccaggaattggagcctcagttccctcctgtgtcaagtagctaactgcagcagctggactgagggcagagtctgtgggtgcagagaccctgcatgtaggtcacaggttgaggcccagccactctccctggggcctggtgggtaggcaagtagctctggggccacctcaagtgaccaaatgctattaatttccatcctttagcaggctgggccctaggcaggaagctggcttctgggagaggagtgagaacgtgcagggcctgcctagcttgcgtgcttgaggaaggtggcattccgtgcttgcctccttgaggagggtggcattctgtgtcttctgcttatgaagcgcctttcttaaagtttggcaataaatccatttttatggaaaaaaaaagaaaataataaaaatagaagaaaaacaacgaggggaatataggtgggagaaaaaggata

SEQ ID NO: 58490 - DNA, 3611 bp, Homo sapiens
agtttcttgggcccccggcagccggcgggacagaacgcggagagtcgccgcctggccgggcgtagacgcggtggcagagcccgcgcggcgctggaagcgagtggcggagcggcgggacctcggcggactcgccatggaggaggagggtgtgaaggaagccggtgagaagcctcggggagcacagatggtggacaaggctggctggatcaagaagagcagtgggggcctcctgggtttctggaaagaccgatatctgctcctctgccaggcccagctgctggtctatgagaatgaggatgatcagaagtgtgtggagactgtggagctgggcagctatgagaagtgccaggaccttcgtgccctcctcaagcgaaaacaccgctttatcctgctgcgatccccagggaacaaggtcagcgacatcaaattccaggcacccaccggggaggagaaggaatcctggatcaaagccctcaatgaagggattaaccgaggcaaaaacaaggctttcgatgaggtaaaggtggacaagagctgcgccctggagcatgtgacacgggaccgggtgcgagggggccagcgacgccggccaccaacgagagtccacctgaaggaggtggccagtgcagcttctgacggtcttctgcgcctggatcttgatgttccggacagtgggccaccagtgtttgcccccagcaatcatgtcagtgaagcccaacctcgggagacaccccggcccctcatgcctcctaccaagcctttcctagcacctgagaccaccagccctggtgacagggtggagacccctgtgggggagagagccccaacccctgtctcagcaagctctgaggtctcccctgagagccaagaggactcagagaccccagcagaggaggacagtggctctgagcagcctcccaacagcgtcctgcctgacaaactgaaggtgagctgggagaaccccagcccccaggaggcccctgctgcagagagtgcagaaccgtcccaggcaccctgttctgagacttctgaggctgcccccagggagggtgggaagccccctacaacccccacccaagatcttatcagagaaactgaaagcctccatgggtgagatgcaggcttctgggccacctgctccaggcacagtgcaggtctcagtgaatggcatggatgacagtcctgagcctgccaagccctctcaggctgagggcaccccaggaactcctccaaaggatgcaacaacatccacagcactgcccccctgggacctgccacctcagttccatccccgctgctcctcccttggggacttgcttggggaaggcccgcggcatcccttgcagcccagggaacggctatatcgggcccagctggaggtgaaggtggcctcggaacagacggagaaactgttgaacaaggtgctgggcagtgagccggcccctgttagtgccgaaacattgctcagccaggctgtggagcagctgaggcaggccacccaggtcctgcaggaaatgagagatttgggagagctgagccaggaagcacctgggctaagggagaagcggaaggagctggtgaccctctacaggagaagtgcaccctagggccttctgggccagaggcaccatcccttctggccatccatcaagtccatcaaggcccagccctgctgagaaatgtgcttctgcttctacagcaatggctgcaggagggccattgggcatgtcagggtttggccatgacccgaagagactcctggcgtccttcctactctgctctggccagtggtgccaggtgccacccagggctactgcctggctatctggcctggcctctgggctggggctggggctgggagcacacacgctgggacctatgtgtttgtgtggtcgttccaaactgccccagggctttgggggcggcacttggggtttctgggaatgacatcatctctgttccccatccccagtagtttacattcctgacttctgaatacagcacagctgagccccctgcagctcccatctccagctattcctaggcaaagagcctcatggctaaggcagcctcaaagccagcccctcctcccacctattctgagtagctgcagaggccttgggtccaggctctaggttcatccctcagttggggggaacgtaggacccagctggagcctcttgagggagatgagaggcctctttgtgaggaggacattagctgtgtggcctctctctctttggccctgtttccttttttgcaaaacaaggacattttctgcagccccttcctctcagtgagctatgattggagggcttaggtctggaggattcaagagtggaagaggaatttaaggggtcccctagtctagtctctgcccctggatagtgtccagccttgtatatttctgaagaggtggatcccagagtggctctgatgtccacattagaaaaacttacttgtaatgatcatgtcagccttcagaagagaatccccaccaacttctgtgcctcctcagatggggatttatctggatctctgtggttccttctcagccgaaacaggtccagtatcccagtcatttcttcaaatgctgataggggtatgttggaatccgaagccacttccccgccttcaagccccagatgggctgctctcctgtaactttctaggagaagagacattttcttctttccctttcctggtccatccctgcaccctggtcctctcccagcctctcccccacattgtccctgactctaggggcacatccagtctccatcgtgctgcagcagctggactgagggcagagcctgtaggtgcagaggccctggctcccgaggtccagccactctccctggggcctctggggtgagagcagcttccgataggacctgcccagatttctgcatgtgcacttttgtttactgaaagagagaaaggggggggtcacagcaacatgccctggcctttctgccctgttccccaaccccactgaggcctgctgcacaggtcaatgccttcgttatcgttattgtactgtcactttgttcttgaggtagtagtcaaggatcaggaggggcagatgtcttctctgggctgcgtggggccggagcagaggtgagcagcaatgcactggttcgggagcccccatcagcctccttgtgcaaactgggcccccatgccacagtctggctttccctccatctgccccaggacaagagcaagaaggacatcagttgcccagtcatgtgatcccctgccatcttgccttaggaacagccttcccccaccagcagccatggctggctggggctttagccaagccacctactgccaggaattggagcctcagttccctcctgtgtcaagtagctaactgcagcagctggactgagggcagagtctgtgggtgcagagaccctgcatgctgggccctaggcaggaagctggcttctgggagaggagtgagaacgtgcagggcctgcctagcttgcgtgcttgaggaaggtggcattccgtgcttgcctccttgaggagggtggcattctgtgtcttctgcttatgaagcgcctttcttaaagtttggcaataaatccatttttatggaa

SEQ ID NO: 58491 - DNA, 1315 bp, Homo sapiens
agtttcttgggcccccggcagccggcgggacagaacgcggagagtcgccgcctggccgggcgtagacgcggtggcagagcccgcgcggcgctggaagcgagtggcggagcggcgggacctcggcggactcgccatggaggaggagggtgtgaaggaagccggtgagaagcctcggggagcacagatggtggacaaggctggctggatcaagaagagcagtgggggcctcctgggtttctggaaagaccgatatctgctcctctgccaggcccagctgctggtctatgagaatgaggatgatcagaagtgtgtggagactgtggagctgggcagctatgagaagtgccaggaccttcgtgccctcctcaagcgaaaacaccgctttatcctgctgcgatccccagggaacaaggtcagcgacatcaaattccaggcacccaccggggaggagaaggaatcctggatcaaagccctcaatgaagggattaaccgaggcaaaaacaaggctttcgatgaggtaaaggtggacaagagctgcgccctggagcatgtgacacgggaccgggtgcgagggggccagcgacgccggccaccaacgagagtccacctgaaggagtttgggatgaatgcgcttctcctgtctgcctggttcggccacttacgaatcctccagatcttggtaaactcaggggccaagatccactgtgagagcaaggaggggaacactgcccttcatctggctgctggtcggggccatatggctgtgctgcagcgacttgtggacatcgggctggacctggaggagcagaatgcggaaggtctgactgccctgcattcggctgctggaggatcccaccctgactgtgtgcagctcctcctcagggctgggagcaccgtgaatgccctcacccaggtagccaggccctcccaagactgcggtcggctcttggctgctgagccatagccatgtcggcagtaacggcacagggattcctgaaccctgagtgaatagaggcttcgaggcagcagacaaggttctgatcttggcttctccactgctgagccctgtgacctggagcaagttacttaacctctctgagccttgtttcccaactataaagtgcagtgacatttacttttttacattgttgtgaggattaaatacctaacacagtgcccaggacataatagggcccaacacctcaatacctgttagtgtttttttgttttaatttttttgagatgggtcttactctgtcgcccaggctgaagtgcaatggtgcgatcttggctcactgtaacctccgcctcctgg

SEQ ID NO: 58492 - DNA, 1519 bp, Homo sapiens
agtttcttgggcccccggcagccggcgggacagaacgcggagagtcgccgcctggccgggcgtagacgcggtggcagagcccgcgcggcgctggaagcgagtggcggagcggcgggacctcggcggactcgccatggaggaggagggtgtgaaggaagccggtgagaagcctcggggagcacagatggtggacaaggctggctggatcaagaagagcagtgggggcctcctgggtttctggaaagaccgatatctgctcctctgccaggcccagctgctggtctatgagaatgaggatgatcagaagtgtgtggagactgtggagctgggcagctatgagaagtgccaggaccttcgtgccctcctcaagcgaaaacaccgctttatcctgctgcgatccccagggaacaaggtcagcgacatcaaattccaggcacccaccggggaggagaaggaatcctggatcaaagccctcaatgaagggattaaccgaggcaaaaacaaggctttcgatgaggtaaaggtggacaagagctgcgccctggagcatgtgacacgggaccgggtgcgagggggccagcgacgccggccaccaacgagagtccacctgaaggagtttgggatgaatgcgcttctcctgtctgcctggttcggccacttacgaatcctccagatcttggtaaactcaggggccaagatccactgtgagagcaaggatggcctgaccttactgcactgcgcagcccaaaaaggccatgtgcctgtgctggcgttcataatggaggacctggaggatgtggccctggaccacgtagacaagctggggaggacggcgtttcacagggcagctgagcacgggcagctggatgctctggacttcctcgtgggctctggctgtgaccacaatgtcaaagacaaggaggggaacactgcccttcatctggctgctggtcggggccatatggctgtgctgcagcgacttgtggacatcgggctggacctggaggagcagaatgcggaaggtctgactgccctgcattcggctgctggaggatcccaccctgactgtgtgcagctcctcctcagggctgggagcaccgtgaatgccctcacccaggtagccaggccctcccaagactgcggtcggctcttggctgctgagccatagccatgtcggcagtaacggcacagggattcctgaaccctgagtgaatagaggcttcgaggcagcagacaaggttctgatcttggcttctccactgctgagccctgtgacctggagcaagttacttaacctctctgagccttgtttcccaactataaagtgcagtgacatttacttttttacattgttgtgaggattaaatacctaacacagtgcccaggacataatagggcccaacacctcaatacctgttagtgtttttttgttttaatttttttgagatgggtcttactctgtcgcccaggctgaagtgcaatggtgcgatcttggctcactgtaacctccgcctcctgg

SEQ ID NO: 58493 - DNA, 1314 bp, Homo sapiens
agtttcttgggcccccggcagccggcgggacagaacgcggagagtcgccgcctggccgggcgtagacgcggtggcagagcccgcgcggcgctggaagcgagtggcggagcggcgggacctcggcggactcgccatggaggaggagggtgtgaaggaagccggtgagaagcctcggggagcacagatggtggacaaggctggctggatcaagaagagcagtgggggcctcctgggtttctggaaagaccgatatctgctcctctgccaggcccagctgctggtctatgagaatgaggatgatcagaagtgtgtggagactgtggagctgggcagctatgagaagtgccaggaccttcgtgccctcctcaagcgaaaacaccgctttatcctgctgcgatccccagggaacaaggtcagcgacatcaaattccaggcacccaccggggaggagaaggaatcctggatcaaagccctcaatgaagggattaaccgaggcaaaaacaaggctttcgatgaggtaaaggtggacaagagctgcgccctggagcatgtgacacgggaccgggtgcgagggggccagcgacgccggccaccaacgagagtccacctgaaggagtttgggatgaatgcgcttctcctgtctgcctggttcggccacttacgaatcctccagatcttggtaaactcaggggccaagatccactgtgagagcaaggatggcctgaccttactgcactgcgcagcccaaaaaggccatgtgcctgtgctggcgttcataatggaggacctggaggatgtggccctggaccacgtagacaagctggggaggacggcgtttcacagggcagctgagcacgggcagctggatgctctggacttcctcgtgggctctggctgtgaccacaatgtcaaagacaaggaggggaacactgcccttcatctggctgctggtcggggccatatggctgtgctgcagcgacttgtggacatcgggctggacctggaggagcagaatgcggaaggtctgactgccctgcattcggctgctggaggatcccaccctgactgtgtgcagctcctcctcagggctgggagcaccgtgaatgccctcacccagaaaaacctaagctgccttcactatgcagccctcagtggctcggaggatgtgtctcgggtcctcatccacgcaggaggctgcgccaacgtggttgatcatcagggtgcctctcctctgcacctcgctgtgaggcacaacttccctgccttggtccggctcctcatcaactccgacagtgacgtgaatgccgtggacaa

SEQ ID NO: 58494 - DNA, 640 bp, Homo sapiens
tagctgcactggcagctgactagatggtgcccacccagattgagggtgggtctgcctctccccagtcccactgactcaaatgttaatctcctttggcaacaccctcacagacacacccaggaactatactttgcatccttcaatccaatcaagttgacactcaatattaaccatcacatttcctaaaccaatataccaattattgattatgattatgacaatcatttcacattgtatacatacatgtatcatcacactgtacatctcaaatatatgcaagttttatttgtcaatcatacttcagtatagctgagaacaagttaaatggaacaaataaaccatgctttcaaaggagccttggctaccaaaattcaaaaaagaaaaacatgttattaataggaaagtaaattccaaataaacatatatatacttgactactcatttaagccttctgtgaagaaaacccaagaaattatgggagaaagctataaaaatatacaacaaaatgattaaaaacattaaattttcatggtagacctcaaagttatttaactttcttctttgtaagtgtattctaagttgaagcaaggaatatgcaacagcttaaaattttataaattatataattttttcacagaat

SEQ ID NO: 58495 - DNA, 99 bp, Homo sapiens
acactagcaatggcaaagctttgtgcggaggcattgctggctgctctgaactaaaagcatccgtggggaccgaaagaggtttttgcacaccttattaag

SEQ ID NO: 58496 - DNA, 678 bp, Homo sapiens
gcccactgctcatcaaggtggaaggcagaactcatcagcttgtagtcaatgcagtacctgcaacaaagctgctccaatccagaatgcacccgagggagaaagatgtctgaagtcctcatagctgtctcatctgcaaagtgacttcccagcgggttacctgccctcggccctactgcaaaggaatcatcactgtggggtccagaacctcaggtgggtgtcagggccatccgtgggcactgcaggaatactcttccatggacagagttcacatgtcaccctcactgttggaaagtgtcatctatgggtgcagatatccgtggaagtgacatatctgctacctgctttggctcagggaagcatgcggggcgacatggaggcctccatgcagcctggtgtctgtcatcttgctggctgtgctgtgtttgggccaggccctctttcgggcctgcctgaaggtcagccaccctgtccagagcttctcctgagccccatgaggactcacagactgtgcctggtcccttcaagggagctgggagccagcagctgccatcctttctgggtagaggtgggaaggagctaggctgtgctcgggtctggggtaggcagagcctctgctgggcagccgctccctcaaggccgctgtgtttacagaaaagcaaaccaggtgttcttcctaaa

SEQ ID NO: 58497 - DNA, 1600 bp, Homo sapiens
tacaacactccaaagttatttttttttaacctaaagaaccctacttctagcacctcctctgaaagaatattttgctccaataccacgtgcaacaaacttatttagacagtatcaactctagcccttaataggttcaaggacaagtttactgcttcctttctacacgcttaagttacactctcttctcctgttctgatgactctaaatcttcagcctctcccagcattaatgtgtgagtcaacattgcagacctgagaaaggtttctagaatggtaacccaatgttctttagaactggagaattccattttccttttctggctttagtgttaatgtctgggaagggaggctcatgataagaaaataaaaatgagaaaagaagatctagttcataaaatgactataccccacgtaagtttgtaactgcacagtgttttgttgtacggctcagaaatgagcaagtgttagtattattaggcacacatcacgttcacagcttcgcgcagagacggatagtgtatttggatatatggaagtcatccaaatgcgttgctagaatatcaggcctatgtttgttctggtagaaccacagagactcacacaaagttctgaccctaccactctggtctgggctgagaccaccccaaaaaatcatctagagaatcaaaggggctcacatctcagttgcattctatttaaaagataaaggggccatactctccactgcaaagaagcattagtaaaacttcccgcacccaaattataatccggcaaccctagcttcagctaaaaagattatccccagaatctaaaagcttactattgttctttcttggagtccaaaatgcttagcagttctgcagttcacatacaaaactcaaaactctttttatcctgtattctgtgagttccttgatgatagtaattgggtcttattcatcactctgtatcctgtggctcacacagaatctggcaaattgcatatattcaataaatgttgaatatctaataacctccttattaatataacaaatattatcaacattctgtgcacatcaatgtcccatgctgctactgtagtcaggagttatttggctgggaagtggaaagtgttcacaaacatgatgcttatctaataaaatatcactgagcaataaggagaaatattttaaatagatttgaagttgtgaacaaataatttagagtccaaagaggaaaaagaaaattaactctgttttttatccctagaactcagaaactttactggattggtcaacaaagacaaactttttattgtataaaacagtagaattcatggaagggataattcttttggaacaggcttctcggttacttgccttagtaaaagaagtatctggagggcctggagagttcataaacatagttttctgtgcaagtgaagatctgtagtttggcttaaaaatccttgcatgtagttttgcttggcgtggaaagttattaggagacaatcctttatcctgttctgcaagcaatcaaacacatgatctcccttctagccattcctcatccagtacatgggcatttccagcctcctacatgtaacacttcaaacttcctct

SEQ ID NO: 58498 - DNA, 408 bp, Homo sapiens
atccaaaggatataggcaagcatcagatacagccaaagcattcttttcctaaaagagtctgaacgcatctgatgcaacacccaaaagtatcccttttctcctcgttacagtatgttttggctttggaataaatgattagttattgaacaatatatggagaaatatcttacaaaaggaagtcatttccattttctaacatcttttacattgcactaattacatggtttaaatgactatccctaatcttcatccaactacaccccatgaattttaggtttatttaatcaacctagttagaccagatatatccttctaaaatcatttgtagatagagattctccttttgctagtaaataccattaacatatttacagaaggtctggtctaggtcatttattccaggcctct

SEQ ID NO: 58499 - DNA, 524 bp, Homo sapiens
cattatataatgataaagggatcaattcaacaagaagatatagcaattctaaatatatatgcacccaatactaggccacccagattcataaagcagatactgctatacttaagaaaacagatagtaatacaataatagtggataggggacttcagccccccactgacagcactaaatgggtcatcaagacagaaagtcaacaaagaaacactggacttaaattggactctagatcaaatggacctggtagaaatttacagaatattcacagcagccatagaatatacattcttctcattagtgcatggaacagaacaccaatgaagtcactgatgacaaaagcaaatggacaaacattctaagctcttggattgtaagagcttaaattaatatggttaaaattgccacctacatattcagtataattcctatcaaaataccaaggtcatttttcatggaattagaaaaaataatctgaaaattcatattgaaaaaagcccaaatggtgaaagcagtcttaagca

SEQ ID NO: 58500 - DNA, 523 bp, Homo sapiens
agctccaggggtcagggagggggactcaggagggcttagctcagcagtgatgggcacagcatgtgcacaggctcagcacacatggggcctgccccaggccctggagggcacggaacaaggctccacaagaaaagaaaaaaaaagcagggggaaccaggagaccctacagtagggataatggggaaaggaacacaaaattgggtcaggttgcgtttattgatacgggcccactaagcagaggttctggacctcgtgctaccactgctggggtttgactggttggttggtgagctacaacacagaccaaaaagtgacctacacaaagtgaggctgaaatgccaggcctgcctctctgcgtggcagaggatgggactcaaaggcttggggaggttggagtgtcagagtggatttatcttttgagacctactcacccacccctggagaggagagaggacacacctcttaccacccccacgagaaataaatttgtgaggggaacactcctccttcatgaaaaaaaaaa

SEQ ID NO: 58501 - DNA, 246 bp, Homo sapiens
gtgaggtagtgtcagaagatgatagggctgggagcaactgcagcagagtaatgatgctaggatgtgtggaggaagctccaggggtcagggagggggactcaggagggcttagctcagcagtgatgggcacagcatgtgcacaggctcagcacacatggggcctgccccaggccctggagggcacggaacaaggctccacaagaaatgcaccattttcccaatttatacccacagaaatccggggag

SEQ ID NO: 58502 - DNA, 414 bp, Homo sapiens
ttcctgcgccaatcaccaccaatatcaattgtgtgagcttgggtgtctgtggggcaagaggctgcaatattccatcctgggtgtctgggctgctaacctggcctgctcaggcttcccaccctgtgccctgggctgggcacagccccaggaagggaccccggacacggctcccacatccaggctcaaggcggatgcacttcctgcacctccagtcttctgtgtagcggctttaacccacgtatgtctgtcacgtccagtcccgagacggctgagtgaccccaagaaaggcttccctgacacccggacagaggctggagggctggggctgcgtgagggtggtgggcctgcggggacattcttactgtgctaaaaagccactgcaaacatagcaataaaaacctgtcattttccaaa

SEQ ID NO: 58503 - DNA, 391 bp, Homo sapiens
gtcttggaagaatctctatcccaatctatcagatcactttttgctctacttccctccttcccagcctgaagtctaacagttcaacatttcaacaaatctatcataccctaactctcctgctcatctgtctttcactggattaatctagaaaaaccctttgtggcttcaagctttcattctccttgagctcctactgaccacggccctccctcaagattccataaatacccaacaagtgtctgcaatgcaccagtgacatagcatttaaacacactgtattttaacaaactgctgacttgtttattacaaaatatttattacaaatgttcaacagatatttattgagcatttcctaagaacagaaaggcactattcttaactgtgagaattt

SEQ ID NO: 58504 - DNA, 187 bp, Homo sapiens
cttttgaaaaataacatttattggattgttcctgattatgaatttaaaatatcattgaagaaatcttgcaaaacaaaaaaaagccaaaaaattaaatctcccatatcaatcttaaattcttggcatatttacttctggtaaatattacttctggtccttattctatatgtgttattgaaattgtgtt

SEQ ID NO: 58505 - DNA, 326 bp, Homo sapiens
ctgagaggctgatatggcaaggaatgctgtctcaagagaagatgccagcgggtggccgctgtcctggcctgtggctcttccctgctcccttcaccctctcaggaccagtcacaggatgggggccagcctcccgctccctatatgcccatcagtccccgaggtgcggggtgggaacttggagagcaccgtgctgcatggaacgctcttgtcaccagcaaatgcctcagtggctatgtgggaacacaagactaacccctcccaaagaccagcaacctggcaccagcccatcctctccaaggttctgctttcaggaagctctgagggca

SEQ ID NO: 58506 - DNA, 313 bp, Homo sapiens
  misc_feature (223)..(223): n is a, c, g, or t
gggattgggattgtgtggctctgaggctgttaagtctggactgatgctggaaactaatatcaatgtttaacagggttgactgtcattaatgatgtgcctagctgtgggtacagatgctttgcacattactaccctctattctcacaatcttccatgggggatgtattagaatccccttttataaaggataaaggtgagggtcagagagactaggaagcctgtncagggtgacacaatacaaagtgtcataaattgggtttgtactcagccactctgcttattaacatcagcagtatggttaatggggtgaccg

SEQ ID NO: 58507 - DNA, 378 bp, Homo sapiens
cagcaatttttgtgaagcaatctccaaagcttgtaggtttcatttgtttaatatttcagggatgtgtaacaatgtggttggctccatggtcacactcttgagtcttgcgtgagtcatttctcacttcagttcctataatagtctcttgttcgttccctcaacctctctgttctccgcctgaaatcgatttacaattctgctgctcacttaatttatttagtgctttttattgatttatgtcatagaactgaaacgtgcatagatcagagcatgctgagcagagaggggagcccctctccacagctgcttccacagctgcccaaactgacatctgagctaaaaacaggtcaacctactggctgcagccggaatacgcca

SEQ ID NO: 58508 - DNA, 594 bp, Homo sapiens
aagctgttaagagttaggaaacttgaaacttaagcccaaaacttttagggatcgtccagcaaaactcaacatatgaatcacctagattcaggtcataaaagagaatacttattttgaaaagaatttgaaaagaaatgcttcattcacattgatacccttatctacacacttttttggtctgtattggaaagcattgtaaaatacagttggggcacatagattcccattggtggcttgaaaactaaataacagaactcaaacctgctattagtggtgagaaaagcattttctttaaaaggcattcacaaacattttttaaaaaaacattgtaacacttgtatgatcatcctaaggtttttttttttctgggcggtggaagggatcgttttttaaatgtgttttttgctttttgtttttttgtttgtttgtttgtttgttttgagatggagtcttgccctgtcgctgggctggagtgcagtggcacgatctcggctcactgcaacctccacctcccaggttcaagctattctcctgcctcagcctcccgagtagctgggactacaggcacatgccaccacacccagttaatttttc

SEQ ID NO: 58509 - DNA, 216 bp, Homo sapiens
ctgaagaaacaaagaaataaataatactccaagttagagagtggtacacattttagaaaagtttacaggagcaaggtaaggaagactgggatgctggagtgggaggaggatattggtgcaatttcaaatgtggaagaaggaggtcagtgtatcccactgagtaggtgacccacgagccagagactgaagtgggtgaatgggtagcattctgggcag

SEQ ID NO: 58510 - DNA, 291 bp, Homo sapiens
aattacctacttctaaattgaatcattatccccaaagaaaagtgctattagaaccctgcagactccaggtcatctgcaatatacatccaatctcataaaaagaaataacaaaaggaaaaaataaagggaaaaataaaaaccaaaataaaaggtacacctcattttattttattatgttaatttaatccccaggtagaaagaatgagcttctgttgtacttcaatgtttaaaatctggccaatttttaatgtttacaaaattatttttaattttaagagagtataatttacc

SEQ ID NO: 58511 - DNA, 419 bp, Homo sapiens
aagacaaggggcagaggcagagagagagagaggagccaccctgagaaggaagagaccaggtgggctctgagacagggagaccctttctacgtcggtgccttgacatgtgacttttttgtcacttcgtgctccaggatcacacctggatgaactatcactttcaaatgaccttgtcttttctcgggccttccgaactgatcatctcttccttctgatacaagaggatcttccctggaagaccactgcacaccttctagtaacactgggaccctggataatattctactttgaagaacaccagtagaccgaagcaagatgacgaatttttaatgccaaagtatgcaaaacctgccacttcactggcaagccatgaattattcataaatatagacttggttaatatctttaaaaatgcagca

SEQ ID NO: 58512 - DNA, 539 bp, Homo sapiens
aagacaaggggcagaggcagagagagagagaggagccaccctgagaaggaagagaccaggtgggctctgagacagggagaccctttctacgtcggtgccttgacatgtgacttttttgtcacttcgtgctccaggatcacacctggatgaactatcactttcaaatgaccttgtcttttctcgggccttccgaactgatcatctcttccttctgatacaagaggatcttccctggaagaccactgcacaccttctagtaacactgggaccctggatgcatatttagaaaaatctcagcacatctctgggcaatgaaatcattcttttgggacctgacacatgaactgaagtgtaattggcattcttcatggaaggggcatggatttaaattgtcataatattctactttgaagaacaccagtagaccgaagcaagatgacgaatttttaatgccaaagtatgcaaaacctgccacttcactggcaagccatgaattattcataaatatagacttggttaatatctttaaaaatgcagca

SEQ ID NO: 58513 - DNA, 504 bp, Homo sapiens
aagacaaggggcagaggcagagagagagagaggagccaccctgagaaggaagagaccaggtgggctctgagacagggagaccctttctacgtcggtgccttgacatgtgacttttttgtcacttcgtgctccaggatcacacctggatgaactatcactttcaaatgaccttgtcttttctcgggccttccgaactgatcatctcttccttctgatacaagaggatcttccctggaagaccactgcacaccttctagtaacactgggaccctggtctccatcactctctgctgcctggtaactggtattggacacctggacatctgcatccccgagccttgagaacccaacacgtgttctggaatgactggcagtagcaccccaccactcaacccccatatgagaagaaaaaggcctcctgcctcctcttctttcaccagacactgtgggcccacaattcccatgtgcaccccaaagatccaagccactagctctctctccacc

SEQ ID NO: 58514 - DNA, 609 bp, Homo sapiens
aagacaaggggcagaggcagagagagagagaggagccaccctgagaaggaagagaccaggtgggctctgagacagggagaccctttctacgtcggtgccttgacatgtgacttttttgtcacttcgtgctccaggatcacacctggatgaactatcactttcaaatgaccttgtcttttctcgggccttccgaactgatcatctcttccttctgatacaagaggatcttccctggaagaccactgcacaccttctagtaacactgggaccctggatgctgctggtgctgggtagagaagagaccttggaacacgctgctgactgcatcatctgaaacaggaggaatcaagccaggggctggaataacaatcccaggattccagtggacagactctcaggatgattcctctaagaaccacagcatctcctgcccgggggaaggcccattgaaatcaaccaagccccacacagactaagagcagtgcgtttgggtttgtggaatattgtggttggaactggctgcttcccaaaagtttacggtcctgcagccacagaagcacgcctatattgggatggtatgagataataaacaacgcatgatgtattttc

SEQ ID NO: 58515 - DNA, 493 bp, Homo sapiens
tacacacttaatttcaattatttaatttgattctaacaatgaatcccctgagatggataatatcctcttcattttacagatgagacaattgagacttaaaggttaaacaaatgatttcctaagctcattcagctaataaacggtaggggactgcttgacaccagtccagttgaccctcaaatccatgatttctgccaccatattcacagaaacaagacaagagctgaaaatatagcctgactcttgaaacagtcaaagaattgtgtatgtttatgaaagttctgattaataagatattctgaggacaaaagacaaggcatgggtagaggggcaatgtgtagattagaatgtatcacaatgcccactaaatagtaaaaccatagaaaatgaaatttaatccttactgtgtagaatatttagagtagattgttttttcctcggtgtcaattactattacaactatcaaagaatgaaattaaacaagaaacggttc

SEQ ID NO: 58516 - DNA, 805 bp, Homo sapiens
tagtagagacagggtttcaccatgttggccaggctggtctcgaactcctgacctcaactgatccgcccacctcagcttcccaatgtgctgggattacaggtgtgagccactgcaccccaccagagtgtgagttttgatctccaacagtatgcattttctagtgaaattcggtttaataaaatgaataatgagataatagctaacatatattgagaacttcccatgtgtcaggtagtgctctgggtgtttagggtattctattatttaattcttaccacaaccctatgaggtgggtactaggatatctccagtttacagagaaaacaaggtgccagagagattaagtaaccttgtctaaggtcacacagacaaggagtgctggagcctaggtctaagccagacagcactagatcttcatgactttgtcacagtgcttcaccttggagaataatgagatgatgctggtatgtagacatgctaaggaggtcttccttgcctcacagtcctgatcaatatggaggcttttatgtagttctgtttgcgttcattcttccaatgcaaagctggagtttacctagtgggataagatttgattttcatccttgagaatgagttgttcttcaggctggcccatgagtcttcatcctgtcagcattctgattacatttctcattatcattctcctgcagtgattcatgagtatgataaaaccgaacagccttctcagtaaataagcaaagcttagcttacggggaaaaaaaaaaaaaaaaaaaagtagagctttccttgaatctggagaaattaa

SEQ ID NO: 58517 - DNA, 870 bp, Homo sapiens
tggaagaaacagaaaatttttcagtgtgctaaccaaagatgagctggatttccatgggagctgaatttagggtagtgcatcttgtggtgttagcatcatgaagggaaatgactcagcttaagtcacgttcaatggacattgttcattcatttcacaaaaatgaacgtgtcggacactaggtaggagctggggatgggggatgcatgtgggttataacggtaagcaaaaactgtgaaagtatgaatgttagtacagtgaaagtatgaattgaaggcagtaatgtgtgggatcagagagagttttcctggaaaaggtatttgagctgagatctaaaaccttgctactcaaggccgggcacagtggctcatgcctgtaatcccagcactttgcgaggctgaggcaggtgaatcacctgaggtcaggagttcaagaccagcctggccaaatggcaaaaccccatctctactaaaaatacaaaaaaattagccaggcatggttgtacatgcatgtaatcccagctactcaggaggctgaggcaggagaatcacttgaacccaggaggcagagttgcagtgagccaagatcatgccacttcactccagcctgggcaatagagtgagactctgtctcaaaaaataaataaataaaacaaaataaaataaaactttgctactcaaaatatgattcatggacagtgtgcttgagcatcacctaagagtttagtagaaatccagattcacaggtcccaccccagacctaccaaatcagaccctgcattttaataagatccccaggtgatttatgtgtgcattaaagtttgagaagtgctgatctgaagcatcagtaggagttgaagtataaagcgttgag

SEQ ID NO: 58518 - DNA, 338 bp, Homo sapiens
ctcctgaccttgtgatccacccgcctcggcctcccaaagtactgggattacaggtgtgagccaccgcgcccggcctttttttttagagacagggtcttgctatgttgcccaggctggtcttgaactccttgtctcaagtgattctcccacctcagcctcccaaaatgcttgggattataggcatgagctactgtgcccggctttgtcttactattattgttgttattcttattgccatgattatttaccttcccctcctccacaaagacaattctgttcacagtgaattccttgccattctccaaatttccagtgtgctttcacacttctacccgctg

SEQ ID NO: 58519 - DNA, 424 bp, Homo sapiens
ggagatcgcgaattctcaggccccacctgctgaatcagaccttagagatggagtccaacaattggtgctttaacaagccctttcgttgggagatctcagtccacacttaagtttgacaaccactgatttactccaaactcttgattgcacaggtgagataaatgagaaccagaaaagtaaagtgatttgcttggggtgatccagcttagcatcaaaatcaggaccagaatctgggcctcctgactcctagtgccatgtatttgcatcttgaactggacttccttcccttctctgcaattgcaacctgagaagcccaggttaggtccaatcatcattgctttttgtctgtgccctcctatcctacatcagggaaagatatgcttcaccgaagcacctgggctctttcatttcattttggacagtt

SEQ ID NO: 58520 - DNA, 410 bp, Homo sapiens
attacctttttataacccaagagtgccattattacacccggaaccctcaccaaataagtaggaaaactacactgagaacaattcggcccagctgtctctggcccatttccctttctaccgcctcttgtgcattccagcaatctaactcgatgaatgatcttccagttggaaagatggggacttcacaatgtgcagacccaaagatctgtcttccaaaggccaatcaccactgtatccttcgttcctttaaatgtcgttgtttatttgaatatattaagaataatatcaaggtaattatctatgtataaaatgtatgtttaattttttaggaaccatcatactgttttccacagtggctgtacattttacattcccaccaacaatgcacaagggttccaatcgctccatat

SEQ ID NO: 58521 - DNA, 552 bp, Homo sapiens
caggccatagacaaaaaggagttccaagtagattaaacataaaagataaaattctgggaaaaaaatttttttaagcagactattggaataattttctggctaagaaaggccttttgaagctataaaaaccagaagtcgttaagaggcaaaaatggacagtcaacaatatgcaaaaattaaaatgtctatgtttcaaaatatatgagaccaagggttacataaagggttacccctgttacataaagattccgaacagttcactttgaaagacacccacaagccttaaacaattggcagagggtgggaagggacattcacagatgaagtaaaaagtcagttatttaaaaaatacatgaaaagatgcttagcttcttgggtgatcagaaaaatgcaagttataaaacaaaatagcattgttcctctgtcaaatgagcaagtttaaaagtctggtaatatccagctttgtcaagagtataggacagtggatataatatacattgttagcatggttgtataaattggttaagcgatttggaaggcaatttggcagtg

SEQ ID NO: 58522 - DNA, 363 bp, Homo sapiens
ggaggcagaggttgcagtgagccgagataacaccattgcactccagcctgggcgacagagccagactgggtctcaaaaaaaaaaagagtgctacatggctcaaagccggagcaaataagacggccaacagaacatcagtatgtaagttaaatgttttatttctttctaatcttatctgaacaatataggcagagatggactgccaaaatatgttgtggggatcagggtagaagacagtttaagtttttcattctggtaacttgtccacataacccaaattcatttcttgctgttaaattccgtgtcttatactagagtaaataaagctgaaaatctcattagataacacgagggagttaaggt

SEQ ID NO: 58523 - DNA, 368 bp, Homo sapiens
tctatttcaatagcttttggggtacaagtggtttttgattacaaggatgaattgtatcacagtgaagtctgagattttagtgcacctgtcagcctagtagtggacactgtacctgatctgtggctttttatccttattcctgctcccacccttcccccttctgagtctccagcgtccatgatatcactctgtatgcttttgtgcacccacagctcagctcctacttagaagtaagaatatggtatttcgttttccattcctgaggaaaactcatttctgtaaactgctgggggccccactggaagactcaggagcccttttcaaggcttttcatcggtgctgccatggcttctctcgggagccttgga

SEQ ID NO: 58524 - DNA, 211 bp, Homo sapiens
attgcaaggcaaataagtggagaaggtttcaatgacatgaaggaagaagatgtggaggaaattttgtcagagaaggcagtagaacccacaaacaaaaacctggatgagatggcaaaacatgggagcatagtcagggatgaaagtcaccctaagactccaagaattgtccttctcacagcagccaaaatatcagaatagaattctgccttgg

SEQ ID NO: 58525 - DNA, 418 bp, Homo sapiens
gcagaaaagatgaaagaaagcttcccatcagtgtttcaaataaagaagtttatgatgagatgttaccattgaccccttaatttctgccccgtttgaaacacctaagggagtccaaccattgtccatgccccttttggaatggttgtgatttcccagggccttggttaactattactcctagcccaaatcctggtgagctccactagctgcagaggccaccatttgcaagagcagatatgcagaagatccctggccagcctcctcatacctaccttcattgctatgtggagacaatagaatcattaaaagttatgggctggacatggtggctaacacctgtaatcccagcactttgggagaccgagatggatggatcgcttgagtacagcagtttgagaccagcctgggcaacatgatg

SEQ ID NO: 58526 - DNA, 369 bp, Homo sapiens
cttatctctgacctcaatcttccatcttgccacttctcccactcccaaaccatctttttcttggccccagtaaaaacctccagtttcttgacccttccattttcttccaatgcaggccactgttgattcatcaattcttacaacatttatggcaaatcttactagtctctctcttttcacatttcatatggtacttatttcaaaccttagctattttcaggaactgtgaaactactacttctgcctatcaccctcagtaaataaatttcaattccctatatgaaaagaaagctataattccattttctgctgttttaccattttatttgcacactactatctttccctacccaaccaatgcatttatcc

SEQ ID NO: 58527 - DNA, 113 bp, Homo sapiens
tcctttcctttcctttcccctttcctttcctttcttttccttttttttgagacaaggtctcgctctgttgcccaggatggaatgcagtggcgcaacttcagctcacagcaacc

SEQ ID NO: 58528 - DNA, 1237 bp, Homo sapiens
ttggctggtctccctggctggccggacccgccgccttccggccagcgcacctccgctgcgtggaagcggccgtgccatggcgccttgcggccacgagagggcagccgcgggccgcagaaacaccaccgcgcccggcttcccgagcctgcgcctgcgcagacccgaggccgacccgaggcggtcgctggccaagcgcccggccagcgcttccggctgccgaggctgcagccttcagtgagctgtggctctgccgccccgggagggaacaaatggcggatttcaggcctccgggccatgcagcctccctctgaggccccaaaggcgcgatagaggcggtgagatgcggctggagctgggaacgaattccccggccggcggggaggccgcccagcccggtgcgctgaccgcactcgccttgctttcacccctcgggtcgcctctcgcacctcgcagccgaaagcccctccgctgggtcacgtttctccatcccgctgcagcctgagcaaggtcgccttcatcctttacagacagaagttcctctacccggaggcccggagcctgggagagggccactgggaacgtcgcatttgcagagccccagtaaccgggctgtggaccgtcttcttactgcttgaagtttcaggctcagagcaggaaacgattccagagctcagccaggcaccgatgagaagaaaaacagaagcagcacattgcccagggccatggagcttgccagtgaagagcaaaccaggccacgtagggccgctgcttgggaccctgtcctggcacccccagctcttggagaaagtcagcgctcccaaggcctccaggcccgccagcatcgtctggccctgactgctctccaccataccccactctccactgcagctcttccccatgtcccggctgtgcacatccggccccatgatcccagccgcgcccagcttcactctctgcccagcaaactcttgcttgtcttctaggtgttggcttagaaaacattctccctgcaaagttttctaggcgttccccgcacctctcacacaaccctatgcaacactgtattccagggtagcccacacagaacctcacctgcttgttcacttatctgacccagaatacgaaaggcccacactaggtcttaattaatatgtcccctacatcccagctgccccttccaagtccccagtttctgggcccatgtactttttaccgtgttgcccactggccctttcac

SEQ ID NO: 58529 - DNA, 1523 bp, Homo sapiens
tatcccggggagtgactgctaatgtagtatagggcttctttttgggtgataaaaatgttgtaaagttgattgtggtaaaggttatacaactccatgaatatgctaaaaagtattacattgcacattttatttatttatttttatttttaaaaaaatagagacaaggtctcaccatgttgcccaggctggtctcaaactcctgagctcaagcaatctttccaccccagcttcccaaagtgctgggattacaggcatgacattgtatattttaaatgagagaattatatctcaataaagctgttttaaaaagatatataaccacataaaatatcaagtactcatgatttatctaataaaagactgcaagacttctacatagaacactataacatattattgtaagaaactgcagaactaaataaacagagagctatgtcatgatcagacttagaagactcagtaaagttgtcattctctctccaattgttctatagattcatttcactaccaggtcaaagacacaatcaaaagcccgacaaatggaatttgtggaattggaacaaaaagcttttcttcctaggcacaagaacatcaaagcataaatccttcaggtatcagcaatgacatcacttaagaatttctcagaatctttggcaccaccccaggcctaccggatcagaatctgaattttttaacaagatctcagatctagtcaagagtccagtctgatttctctttattgggactaccacccaaagcagaatgaggatgatgtaaccacgcccagtgacttctggataccactgactctaggcattttgcagatcctgaattccagcagaatggctgacaccaactggtctgaagaccctcaccaaggaactgactcagtgcaggaatgcagtttcttcatctccctatccctgacttcacccctcacttctcaaccaatcagtgatcaccacactttaggccatcacctgtgtccagaccccttaaaaaccccatctgcaaacctcttgaagaggcatatttgaggtttcctctcatctcctcatttggtttccctacaattattaaattctttctctgctgcaactcctactttttcagtgtattggtctgttactgtgcaacaggaaatcagacctggtggtcctatagtaagagttcacagaatatgatatacaaagtgatctgtgatatacaaaaaccggcacaatctcactcttaataagaaaaattcaacttaaaattaaaagttttttttcctcagaatggcaaagatcaaagtttgataacatggttggaaagtatgcagaccgatattctcatattcattgatgaagtgtaaattgatacatcctttgtcagtacggacaggtttcccaactctaggggtgaaatttatacagactacagtgtgaatgacaaccacttcaaattgggtgatatgatgaccttgactctgtggagggtcatttggcaaaatatctcaaaataaaaatgtacatacaatttga

SEQ ID NO: 58530 - DNA, 1146 bp, Homo sapiens
ttaagcgttgtgcgccgcggccgggcgcggtgattcacgcctgtaatcccagcactttggggggccgaggcgggcggatcacgacgtcaggagatcgagaccattctggctaacacgattcatttcactaccaggtcaaagacacaatcaaaagcccgacaaatggaatttgtggaattggaacaaaaagcttttcttcctaggcacaagaacatcaaagcataaatccttcaggtatcagcaatgacatcacttaagaatttctcagaatctttggcaccaccccaggcctaccggatcagaatctgaattttttaacaagatctcagatctagtcaagagtccagtctgatttctctttattgggactaccacccaaagcagaatgaggatgatgtaaccacgcccagtgacttctggataccactgactctaggcattttgcagatcctgaattccagcagaatggctgacaccaactggtctgaagaccctcaccaaggaactgactcagtgcaggaatgcagtttcttcatctccctatccctgacttcacccctcacttctcaaccaatcagtgatcaccacactttaggccatcacctgtgtccagaccccttaaaaaccccatctgcaaacctcttgaagaggcatatttgaggtttcctctcatctcctcatttggtttccctacaattattaaattctttctctgctgcaactcctactttttcagtgtattggtctgttactgtgcaacaggaaatcagacctggtggtcctatagtaagagttcacagaatatgatatacaaagtgatctgtgatatacaaaaaccggcacaatctcactcttaataagaaaaattcaacttaaaattaaaagttttttttcctcagaatggcaaagatcaaagtttgataacatggttggaaagtatgcagaccgatattctcatattcattgatgaagtgtaaattgatacatcctttgtcagtacggacaggtttcccaactctaggggtgaaatttatacagactacagtgtgaatgacaaccacttcaaattgggtgatatgatgaccttgactctgtggagggtcatttggcaaaatatctcaaaataaaaatgtacatacaatttga

SEQ ID NO: 58531 - DNA, 1452 bp, Homo sapiens
tatcccggggagtgactgctaatgtagtatagggcttctttttgggtgataaaaatgttgtaaagttgattgtggtaaaggttatacaactccatgaatatgctaaaaagtattacattgcacattttatttatttatttttatttttaaaaaaatagagacaaggtctcaccatgttgcccaggctggtctcaaactcctgagctcaagcaatctttccaccccagcttcccaaagtgctgggattacaggcatgacattgtatattttaaatgagagaattatatctcaataaagctgttttaaaaagatatataaccacataaaatatcaagtactcatgatttatctaataaaagactgcaagacttctacatagaacactataacatattattgtaagaaactgcagaactaaataaacagagagctatgtcatgatcagacttagaagactcagtaaagttgtcattctctctccaattgttctatagattcatttcactaccaggtcaaagacacaatcaaaagcccgacaaatggaatttgtggaattggaacaaaaagcttttcttcctaggcacaagaacatcaaagcataaatccttcaggtatcagcaatgacatcacttaagaatttctcagaatctttggcaccaccccaggcctaccggatcagaatctgaattttttaacaagatctcagatctagtcaagagtccagtctgatttctctttattgggactaccacccaaagcagaatgaggatgatgtaaccacgcccagtgacttctggataccactgactctagatgagcaaggagagactcagaggaagtcagcgttactcgattagaaagtgactgtggcactaccatagtagtaaaatctaccatggcagagaaaatgccatatgttcaccttgccagtcgtttttctttttcctcctgggtttataggaagatggcagcccctggctcccctgcaatcaggcagggccatgtgactgagtcttagctcaccaatgtgggagaaagtgatgtgtgacacattaaggccaggccactgaaacctctcatgggaacttccatactcacttccctcatctgctagccaacccaaaagattgagtggaggattttacagccccagggcctagagatgctggaaagaagcctgattcagccctgaatgaacctgtgcaaaggtgcctctgacctccaacccttgttggactaggatgttggaaaatactgtgttaagctactgggatttcaaagttgtttgtcatagcagctagccatatttactctacctgatagatctatgttctgtaattacagtgtttgcctttcatgtcctaagggtaaataagtgatatatgcaacaataaactgtgatgtactatatattgtttttattacattaaaattcttaaaatttgctttttc

SEQ ID NO: 58532 - DNA, 5874 bp, Homo sapiens
ggcacgagggttgtcatgagagtggaggctgcggccggggctatgggcagaggcggccgggtctgcttcttccctgtcactgccgcagcagcttggggtgcaaggcggcctggggcggcggaaggggcgccccccgagttccgtctgaggaagcggcggctgccgaggaagtccacgagagccgggtcccgcacgcccctggggtccgggtgctgaggcgccgcctggccgcctccccgggccgcggcaccgctccgacctagccgccctctccaccggggccgcggcagcgccagtcggggcccttccctctaagcagcccaaacgtgcagaatgccccacaagattggatttgtagtcgtcagctcatctggacacgaagacggcttcagtgcccgggagctcatgatccacgcgccaactgtcagtgggtggcggtcacctagattttgccagtttccacaagaaattgtccttcaaatggtggagagatgtcgaataaggaaactgcagttacttgctcaccagtatatgatttcaagtaaaattgagttctacattagtgaaagcttgcctgaatattttgcaccctatcaagcagagcggtttcgaagacttggctacgtgtctctctgtgataatgaaaagacaggttgcaaagcccgggaactaaaatcagtttatgtggatgcagtaggacaatttcttaaactgatttttcaccaaaaccatgtcaacaaatacaacatatataatcaggttgctttggttgccataaatatcattggagaccctgcagatttcagtgatgaaagcaatactgcctctcgagagaagttgattgaccactaccttgggcacaacagcgaggaccctgctctagaaggaacatacgccaggaaatctgactatatctctccgctagatgacttagcttttgatatgtaccaagatccagaagttgcacagatcatacgaaaattagatgaaagaaaacgggaagctgtccaaaaggaacgctatgattatgccaagaaactaaaacaagccattgctgatttgcaaaaggttggtgagcgccttgggaggtatgaggtagagaaacgctgtgccgtggagaaggaagactacgatctcgccaaggagaagaagcagcagatggagcagtatcgtgccgaggtgtacgagcagctggagctgcacagcctcctggatgccgagctgatgcgaagaccttttgatttgcccctccagcccctcgctcgttctggcagtccttgccaccaaaagccaatgccctcactaccacaactggaagaaagaggaacagaaaaccagtttgcagaacctttccttcaggaaaagccttcatcatattctctaactatttctcctcagcattctgcagtagacccgttactccctgccacagatcctcatccaaagatcaatgcagagtccctgccctacgatgagcggcctcttccagctattcgtaagcattatggggaggcagtggtggagccggaaatgagtaatgcagacatcagcgatgctcggaggggaggcatgttaggggagccagagcccttaaccgagaaggccttgagagaagccagctctgccatcgatgtgttgggagaaaccttggttgctgaggcctattgtaagacgtggtcctaccgagaggatgcactgcttgccttgtctaagaagttaatggaaatgcctgttggaaccccaaaagaagatttaaagaacacactgagagcatccgtctttctcgttagaagagccataaaggacattgtgacctccgtttttcaggcttctttgaaattgttgaaaatgatcattacacaatatattcctaaacataaactgagtaaacttgaaacagctcactgtgtggagaggaccattcccgttttgctcaccagaactggagattcttctgcccgcctccgcgtcacagctgcaaattttattcaggaaatggccttgtttaaagaagttaagtctctccaaattattccatcctacctggtgcagccattgaaagcaaactcttcagttcacctggcaatgagtcagatgggcctcctggcccggctgctgaaagacctgggcactggcagctcgggcttcaccattgacaacgtgatgaagttttcagtgagtgccctggagcatagagtgtatgaggtccgcgagacggcggttcgaattattttggacatgtacagacagcaccaggcttccatcctggagtaccttcctccagacgacagcaacacacgcaggaacattctctacaaaacaatttttgagggatttgctaaaatagatggcagagctacagatgctgagatgagggcacggagaaaagcggctacagaagaagcagaaaaacaaaagaaagaagaaataaaagctttacaagggcagctggcagcactgaaagaaattcaggctgaagttcaggaaaaagaaagtgatgctgtgaagccaaagaatcaggacattcaaggagggaaagcagcccctgctgaagctctgggaatcccggatgagcactatctagataatttgtgtattttttgtggggaaaggagtgaatccttcacagaggaaggtctggatctccactactggaagcactgtctcatgctgacaagatgtgaccactgcaaacaggtggtcgagatatccagtctgacggagcacttgctgacggaatgtgacaaaaaagacgggtttggaaagtgttaccgttgcagtgaggctgttttcaaggaagagctgcccagacacataaaacacaaggattgcaaccctgccaaaccggagaagctggcaaaccggtgtcccctgtgtcatgagaacttcagccctggagaagaggcatggaaagctcacctgatgggcccagccggctgcacgatgaacctgcgcaagacacacattctgcagaaggccccggcactgcagccagggaaaagctcagctgtggccgcatcaggccccttggggtcaaaggccggaagcaagatccccaccccgaagggcggactgagcaagagctccagcaggacgtacgccaagcgctgacgcggcgctcgggctccttggtctctgtgagggatggagcgggtctcctgattctacaccatctctccagaactctctggccttggtggccccatgctctggctgctgtccccagctccccgccgtgcacgcctcttacgcgtctgtgccgtcagctctcgtgcaaacgatatggatgcagctaaccaaagatcctgcgtgcagtgccaggacctggccgcactgtacattaagccttcagggctgtctcaggccttccttagaatcagagaaggaagcgtcctgtttggagagagccagagagcaccgccagggaggcgctcgcgcaaggccacggtcagcacaggcacggtcccgctttccttagtgcttggagcaatttccataaaacattcaccagaaaccttttgcacatcggtctctgccacacgcagtagaatttccgcagggctgtggctcggccagcagcggttccaggagagtggcggtgcgcacgggcctccagccgtgccttccccctgcaggccccgtctgctgggcctgctgcccagtgcactcagccccaggtagcagaactcacgttcccactatagcaagaaataaaggcaaaagagaacatcttttttttaatcgtagtttttttgagaattggtcccacctcagccgcaccttgctggatgcttctccagtagtgctgcccctgtgacaggcatcagctccctgctggaactgaggtagacacaggtgtgggcccttcccgtgcctttgctcagaggcgcttcactttctccacactttcgaattcctaaagacatgtggaggaagtcactgttaaatgaatttccacctgatcaccctgtgttcacagcaggcagaagcccactggtatgggcctcccgccccttccacatccatgttgtgattggatccataagtttactttcttcaaagagttgataggatgtttaaaacatcaacacattgcttaaaatgatgaaaccaaccctcaaaaaacagtctcctaaccagccatcccctcctgtgggagtgagctgggggttttgtccatagctttggttgggcctgtgtcacatccaggcagccatgtggagggagtcagggtctgtctggaagcatccaccctctcgctgccccagcctgtgctcccaggggcctaggctaccatggactgaagggcagtcccctcccacctggtgcccagggcttctgcttgcctcgctgatgttgcatgggcagacttcaaaaaggatagttagaaaggtttgggttgatggagtttgcattaatgcaattagtgtataaatatgttttaattgccaaccgtgtgaaacaacaaaatatctaaaaactaatcccgatttgaacaatgtactccctggcctggatacattaataaccataaatttgcatgaattaatctccacgtttggtaaactaatacctctggttgactgagaatactgagtaagatataagacctaccaggaacctttaagaatatgctctgctcggtgttgtttgtctgcttgtttgcgacagagcgagactccgtctcgaaaaaaaaaaaaaagtataaggagagaaataactttaaagtttattagacaaaacagagtatagatgccaagatgtctgtaaaatgattttttctggttttaaagagatgttggccattattttctaatccatttttaaaatacagacaaaacacttctttaaacagaacaagaatgagaaaagttaaccaaggaattattcttttctcaccaatcaacacttttaagaaatatatatatatatacacacacatatacacatgccttctatatattgtaacttaaagaaaatacttataaaaagacttcatttttagtgattgacaagcaaacgggttcatttaaaacaggttcctcttttgttagttacagggggtttttttgttgtttttttgtttttgtttttgttttgcgggggtggtggggtttgagacggagtcttgctctgttgcctaggctggagtgcagtggcgcgatcttggccccctgcaacctccgcctcccgggttcgagcaattctcctgcctcagcctcccgagtagctgggattacaggcgtgtgtcaccacgcctggctaatttttttgtatttttagtagagacggggtttcaccatattggccaggctggtctcaaactcctgaccttgtgatccacccacctccgcctcccaaagtgctggaattacaggcatgagccaccgcgcccggcccaatcatgtgtttttgttgaaatgatcctaccagtgattagtggctattgagagttttacagggttatacattgttaagggaccaagaatcaagtacaaaaaattaaaaaggaactgtaaaatcccttggtcattcataaataaatatctaaattaggaatactaattaattgaattttcactcatgagtatgttctgaatatttaatatttatttctattattttcatatgttaagatattccattaaatctaacttaaaagaattgtatgtataaattggcattaggatacaaatgtaaatgtttttaatgaaattttgcaactttttaatattttaacatagttttctatttgtctttatttcaagtaccagaattacaaaatatctaagtaatatatttttgttgtcgttttagggcttaagggttaattcacccagagtatattaatataataaaaagatcactaaatgt

SEQ ID NO: 58533 - DNA, 414 bp, Homo sapiens
tctagctttaaaaaataaaacaataaacataaatgagcctattgagttcaatcagagtagggagcagttttattgaacagcacattttcaaattcttcagttgtgttttgtttttcagctacgtgtctctctgtgataatgaaaagacaggttgcaaagcccgggaactaaaatcagtttatgtggatgcagtaggacaatttcttaaactgatttttcaccaaaaccatgtcaacaaatacaacatatataatcaggttgctttggttgccataaatatcattggagaccctgcagatttcagtgatgaaagcaatactgcctctcgagagaagttgattgaccactaccttgggcacaacagcgaggaccctgctctagaaggaacatacgccaggtaagagtcctgctccc

SEQ ID NO: 58534 - DNA, 4982 bp, Homo sapiens
ggcacgagggttgtcatgagagtggaggctgcggccggggctatgggcagaggcggccgggtctgcttcttccctgtcactgccgcagcagcttggggtgcaaggcggcctggggcggcggaaggggcgccccccgagttccgtctgaggaagcggcggctgccgaggaagtccacgagagccgggtcccgcacgcccctggggtccgggtgctgaggcgccgcctggccgcctccccgggccgcggcaccgctccgacctagccgccctctccaccggggccgcggcagcgccagtcggggcccttccctctaagcagcccaaacgtgcagaatgccccacaagattggatttgtagtcgtcagctcatctggacacgaagacggcttcagtgcccgggagctcatgatccacgcgccaactgtcagtgggtggcggtcacctagattttgccagtttccacaagaaattgtccttcaaatggtggagagatgtcgaataaggaaactgcagttacttgctcaccagtatatgatttcaagtaaaattgagttctacattagtgaaagcttgcctgaatattttgcaccctatcaagcagagcggtttcgaagacttggctacgtgtctctctgtgataatgaaaagacaggttgcaaagcccgggaactaaaatcagtttatgtggatgcagtaggacaatttcttaaactgatttttcaccaaaaccatgtcaacaaatacaacatatataatcaggttgctttggttgccataaatatcattggagaccctgcagatttcagtgatgaaagcaatactgcctctcgagagaagttgattgaccactaccttgggcacaacagcgaggaccctgctctagaaggaacatacgccaggaaatctgactatatctctccgctagatgacttagcttttgatatgtaccaagatccagaagttgcacagatcatacgaaaattagatgaaagaaaacgggaagctgtccaaaaggaacgctatgattatgccaagaaactaaaacaagccattgctgatttgcaaaaggttggtgagcgccttgggaggtatgaggtagagaaacgctgtgccgtggagaaggaagactacgatctcgccaaggagaagaagcagcagatggagcagtatcgtgccgaggtgtacgagcagctggagctgcacagcctcctggatgccgagctgatgcgaagaccttttgatttgcccctccagcccctcgctcgttctggcagtccttgccaccaaaagccaatgccctcactaccacaactggaagaaagaggaacagaaaaccagtttgcagaacctttccttcaggaaaagccttcatcatattctctaactatttctcctcagcattctgcagtagacccgttactccctgccacagatcctcatccaaagatcaatgcagagtccctgccctacgatgagcggcctcttccagctattcgtaagcattatggggaggcagtggtggagccggaaatgagtaatgcagacatcagcgatgctcggaggggaggcatgttaggggagccagagcccttaaccgagaaggccttgagagaagccagctctgccatcgatgtgttgggagaaaccttggttgctgaggcctattgtaagacgtggtcctaccgagaggatgcactgcttgccttgtctaagaagttaatggaaatgcctgttggaaccccaaaagaagatttaaagaacacactgagagcatccgtctttctcgttagaagagccataaaggacattgtgacctccgtttttcaggcttctttgaaattgttgaaaatgatcattacacaatatattcctaaacataaactgagtaaacttgaaacagctcactgtgtggagaggaccattcccgttttgctcaccagaactggagattcttctgcccgcctccgcgtcacagctgcaaattttattcaggaaatggccttgtttaaagaagttaagtctctccaaattattccatcctacctggtgcagccattgaaagcaaactcttcagttcacctggcaatgagtcagatgggcctcctggcccggctgctgaaagacctgggcactggcagctcgggcttcaccattgacaacgtgatgaagttttcagtgagtgccctggagcatagagtgtatgaggtccgcgagacggcggttcgaattattttggacatgtacagacagcaccaggcttccatcctggagtaccttcctccagacgacagcaacacacgcaggaacattctctacaaaacaatttttgagggatttgctaaaatagatggcagagctacagatgctgagatgagggcacggagaaaagcggctacagaagaagcagaaaaacaaaagaaagaagaaataaaagctttacaagggcagctggcagcactgaaagaaattcaggctgaagttcaggaaaaagaaagtgatgctgtgaagccaaagaatcaggacattcaaggagggaaagcagcccctgctgaagctctgggaatcccggatgagcactatctagataatttgtgtattttttgtggggaaaggagtgaatccttcacagaggaaggtctggatctccactactggaagcactgtctcatgctgacaagatgtgaccactgcaaacaggtggtcgagatatccagtctgacggagcacttgctgacggaatgtgacaaaaaagacgggtttggaaagtgttaccgttgcagtgaggctgttttcaaggaagagctgcccagacacataaaacacaaggattgcaaccctgccaaaccggagaagctggcaaaccggtgtcccctgtgtcatgagaacttcagccctggagaagaggcatggaaagctcacctgatgggcccagccggctgcacgatgaacctgcgcaagacacacattctgcagaaggccccggcactgcagccagggaaaagctcagctgtggccgcatcaggccccttggggtcaaaggccggaagcaagatccccaccccgaagggcggactgagcaagagctccagcaggacgtacgccaagcgctgacgcggcgctcgggctccttggtctctgtgagggatggagcgggtctcctgattctacaccatctctccagaactctctggccttggtggccccatgctctggctgctgtccccagctccccgccgtgcacgcctcttacgcgtctgtgccgtcagctctcgtgcaaacgatatggatgcagctaaccaaagatcctgcgtgcagtgccaggacctggccgcactgtacattaagccttcagggctgtctcaggccttccttagaatcagagaaggaagcgtcctgtttggagagagccagagagcaccgccagggaggcgctcgcgcaaggccacggtcagcacaggcacggtcccgctttccttagtgcttggagcaatttccataaaacattcaccagaaaccttttgcacatcggtctctgccacacgcagtagaatttccgcagggctgtggctcggccagcagcggttccaggagagtggcggtgcgcacgggcctccagccgtgccttccccctgcaggccccgtctgctgggcctgctgcccagtgcactcagccccaggtagcagaactcacgttcccactatagcaagaaataaaggcaaaagagaacatcttttttttaatcgtagtttttttgagaattggtcccacctcagccgcaccttgctggatgcttctccagtagtgctgcccctgtgacaggcatcagctccctgctggaactgaggtagacacaggtgtgggcccttcccgtgcctttgctcagaggcgcttcactttctccacactttcgaattcctaaagacatgtggaggaagtcactgttaaatgaatttccacctgatcaccctgtgttcacagcaggcagaagcccactggtatgggcctcccgccccttccacatccatgttgtgattggatccataagtttactttcttcaaagagttgataggatgtttaaaacatcaacacattgcttaaaatgatgaaaccaaccctcaaaaaacagtctcctaaccagccatcccctcctgtgggagtgagctgggggttttgtccatagctttggttgggcctgtgtcacatccaggcagccatgtggagggagtcagggtctgtctggaagcatccaccctctcgctgccccagcctgtgctcccaggggcctaggctaccatggactgaagggcagtcccctcccacctggtgcccagggcttctgcttgcctcgctgatgttgcatgggcagacttcaaaaaggatagttagaaaggtttgggttgatggagtttgcattaatgcaattagtgtataaatatgttttaattgccaaccgtgtgaaacaacaaaatatctaaaaactaatcccgatttgaacaatgtactccctggcctggatacattaataaccataaatttgcatgaattaatctccacgtttggtaaactaatacctctggttgactgagaatactgagtaagatataagacctaccaggaacctttaagaatatgctctgctcggtgttgtttgtctgcttgtttgcgacggagtctcgctgtgtcgcccgggctgcagtgcaatggcgtgatcttggctcacagtaacctccacctcctgggttcaagcagttctcctgcctcagcctccctagtagctgggattacaggtgcacaccaccatgctcggctgattttttctatttttagtagagatggggtttcaccgtgttggccaggctggtctcgaactcgtgacctcataatctgcccaccttggcctcccaaagtgctgggattacaggcgtgagccaccacgcccaggttaaatgtgtttataaggagagaggaggccaggcgcgg

SEQ ID NO: 58535 - DNA, 3133 bp, Homo sapiens
ggcacgagggttgtcatgagagtggaggctgcggccggggctatgggcagaggcggccgggtctgcttcttccctgtcactgccgcagcagcttggggtgcaaggcggcctggggcggcggaaggggcgccccccgagttccgtctgaggaagcggcggctgccgaggaagtccacgagagccgggtcccgcacgcccctggggtccgggtgctgaggcgccgcctggccgcctccccgggccgcggcaccgctccgacctagccgccctctccaccggggccgcggcagcgccagtcggggcccttccctctaagcagcccaaacgtgcagaatgccccacaagattggatttgtagtcgtcagctcatctggacacgaagacggcttcagtgcccgggagctcatgatccacgcgccaactgtcagtgggtggcggtcacctagattttgccagtttccacaagaaattgtccttcaaatggtggagagatgtcgaataaggaaactgcagttacttgctcaccagtatatgatttcaagtaaaattgagttctacattagtgaaagcttgcctgaatattttgcaccctatcaagcagagcggtttcgaagacttggctacgtgtctctctgtgataatgaaaagacaggttgcaaagcccgggaactaaaatcagtttatgtggatgcagtaggacaatttcttaaactgatttttcaccaaaaccatgtcaacaaatacaacatatataatcaggttgctttggttgccataaatatcattggagaccctgcagatttcagtgatgaaagcaatactgcctctcgagagaagttgattgaccactaccttgggcacaacagcgaggaccctgctctagaaggaacatacgccaggaaatctgactatatctctccgctagatgacttagcttttgatatgtaccaagatccagaagttgcacagatcatacgaaaattagatgaaagaaaacgggaagctgtccaaaaggaacgctatgattatgccaagaaactaaaacaagccattgctgatttgcaaaaggttggtgagcgccttgggaggtatgaggtagagaaacgctgtgccgtggagaaggaagactacgatctcgccaaggagaagaagcagcagatggagcagtatcgtgccgaggtgtacgagcagctggagctgcacagcctcctggatgccgagctgatgcgaagaccttttgatttgcccctccagcccctcgctcgttctggcagtccttgccaccaaaagccaatgccctcactaccacaactggaagaaagaggaacagaaaaccagtttgcagaacctttccttcaggaaaagccttcatcatattctctaactatttctcctcagcattctgcagtagacccgttactccctgccacagatcctcatccaaagatcaatgcagagtccctgccctacgatgagcggcctcttccagctattcgtaagcattatggggaggcagtggtggagccggaaatgagtaatgcagacatcagcgatgctcggaggggaggcatgttaggggagccagagcccttaaccgagaaggccttgagagaagccagctctgccatcgatgtgttgggagaaaccttggttgctgaggcctattgtaagacgtggtcctaccgagaggatgcactgcttgccttgtctaagaagttaatggaaatgcctgttggaaccccaaaagaagatttaaagaacacactgagagcatccgtctttctcgttagaagagccataaaggacattgtgacctccgtttttcaggcttctttgaaattgttgaaaatgatcattacacaatatattcctaaacataaactgagtaaacttgaaacagctcactgtgtggagaggaccattcccgttttgctcaccagaactggagattcttctgcccgcctccgcgtcacagctgcaaattttattcaggaaatggccttgtttaaagaagttaagtctctccaaattattccatcctacctggtgcagccattgaaagcaaactcttcagttcacctggcaatgagtcagatgggcctcctggcccggctgctgaaagacctgggcactggcagctcgggcttcaccattgacaacgtgatgaagttttcagtgagtgccctggagcatagagtgtatgaggtccgcgagacggcggttcgaattattttggacatgtacagacagcaccaggcttccatcctggagtaccttcctccagacgacagcaacacacgcaggaacattctctacaaaacaatttttgagggatttgctaaaatagatggcagagctacagatgctgagatgagggcacggagaaaagcggctacagaagaagcagaaaaacaaaagaaagaagaaataaaagctttacaagggcagctggcagcactgaaagaaattcaggctgaagttcaggaaaaagaaagtgatgctgtgaagccaaagaatcaggacattcaaggagggaaagcagcccctgctgaagctctgggaatcccggatgagcactatctagataatttgtgtattttttgtggggaaaggagtgaatccttcacagaggaaggtctggatctccactactggaagcactgtctcatgctgacaagatgtgaccactgcaaacaggtggtcgagatatccagtctgacggagcacttgctgacggaatgtgacaaaaaagacgggtttggaaagtgttaccgttgcagtgaggctgttttcaaggaagagctgcccagacacataaaacacaaggattgcaaccctgccaaaccggagaagctggcaaaccggtgtcccctgtgtcatgagaacttcagccctggagaagaggcatggaaagctcacctgatgggcccagccggctgcacgatgaacctgcgcaagacacacattctgcagaaggccccggcactgcagccaggtgagggacagcgccgctgagcaggtgtagtctgcatccctccattttgacttattcaaaagagcatccccgtccagggcaacatggcaagaccccatccctttaaaagcaaaataaagcatccaagcctgacttcat

SEQ ID NO: 58536 - DNA, 3175 bp, Homo sapiens
ggcacgagggttgtcatgagagtggaggctgcggccggggctatgggcagaggcggccgggtctgcttcttccctgtcactgccgcagcagcttggggtgcaaggcggcctggggcggcggaaggggcgccccccgagttccgtctgaggaagcggcggctgccgaggaagtccacgagagccgggtcccgcacgcccctggggtccgggtgctgaggcgccgcctggccgcctccccgggccgcggcaccgctccgacctagccgccctctccaccggggccgcggcagcgccagtcggggcccttccctctaagcagcccaaacgtgcagaatgccccacaagattggatttgtagtcgtcagctcatctggacacgaagacggcttcagtgcccgggagctcatgatccacgcgccaactgtcagtgggtggcggtcacctagattttgccagtttccacaagaaattgtccttcaaatggtggagagatgtcgaataaggaaactgcagttacttgctcaccagtatatgatttcaagtaaaattgagttctacattagtgaaagcttgcctgaatattttgcaccctatcaagcagagcggtttcgaagacttggctacgtgtctctctgtgataatgaaaagacaggttgcaaagcccgggaactaaaatcagtttatgtggatgcagtaggacaatttcttaaactgatttttcaccaaaaccatgtcaacaaatacaacatatataatcaggttgctttggttgccataaatatcattggagaccctgcagatttcagtgatgaaagcaatactgcctctcgagagaagttgattgaccactaccttgggcacaacagcgaggaccctgctctagaaggaacatacgccaggaaatctgactatatctctccgctagatgacttagcttttgatatgtaccaagatccagaagttgcacagatcatacgaaaattagatgaaagaaaacgggaagctgtccaaaaggaacgctatgattatgccaagaaactaaaacaagccattgctgatttgcaaaaggttggtgagcgccttgggaggtatgaggtagagaaacgctgtgccgtggagaaggaagactacgatctcgccaaggagaagaagcagcagatggagcagtatcgtgccgaggtgtacgagcagctggagctgcacagcctcctggatgccgagctgatgcgaagaccttttgatttgcccctccagcccctcgctcgttctggcagtccttgccaccaaaagccaatgccctcactaccacaactggaagaaagaggaacagaaaaccagtttgcagaacctttccttcaggaaaagccttcatcatattctctaactatttctcctcagcattctgcagtagacccgttactccctgccacagatcctcatccaaagatcaatgcagagtccctgccctacgatgagcggcctcttccagctattcgtaagcattatggggaggcagtggtggagccggaaatgagtaatgcagacatcagcgatgctcggaggggaggcatgttaggggagccagagcccttaaccgagaaggccttgagagaagccagctctgccatcgatgtgttgggagaaaccttggttgctgaggcctattgtaagacgtggtcctaccgagaggatgcactgcttgccttgtctaagaagttaatggaaatgcctgttggaaccccaaaagaagatttaaagaacacactgagagcatccgtctttctcgttagaagagccataaaggacattgtgacctccgtttttcaggcttctttgaaattgttgaaaatgatcattacacaatatattcctaaacataaactgagtaaacttgaaacagctcactgtgtggagaggaccattcccgttttgctcaccagaactggagattcttctgcccgcctccgcgtcacagctgcaaattttattcaggaaatggccttgtttaaagaagttaagtctctccaaattattccatcctacctggtgcagccattgaaagcaaactcttcagttcacctggcaatgagtcagatgggcctcctggcccggctgctgaaagacctgggcactggcagctcgggcttcaccattgacaacgtgatgaagttttcagtgagtgccctggagcatagagtgtatgaggtccgcgagacggcggttcgaattattttggacatgtacagacagcaccaggcttccatcctggagtaccttcctccagacgacagcaacacacgcaggaacattctctacaaaacaatttttgagggatttgctaaaatagatggcagagctacagatgctgagatgagggcacggagaaaagcggctacagaagaagcagaaaaacaaaagaaagaagaaataaaagctttacaagggcagctggcagcactgaaagaaattcaggctgaagttcaggaaaaagaaagtgatgctgtgaagccaaagaatcaggacattcaaggagggaaagcagcccctgctgaagctctgggaatcccggatgagcactatctagataatttgtgtattttttgtggggaaaggagtgaatccttcacagaggaaggtctggatctccactactggaagcactgtctcatgctgacaagatgtgaccactgcaaacaggtggtcgagatatccagtctgacggagcacttgctgacggaatgtgacaaaaaagacgggtttggaaagtgttaccgttgcagtgaggctgttttcaaggaagagctgcccagacacataaaacacaaggattgcaaccctgccaaaccggagaagctggcaaaccggtgtcccctgtgtcatgagaacttcagccctggagaagaggtgaggggcctggggagaagggaccagtgaagtaggtgacacacctgtggatggcagtggtggtgacagtggtggtgtcagtgcgggaccatagccacagagtacagtacatgagtgttcagggaggggacagcgtctagtgagccctgtctgagcagtcgttccgtttacctacgtgttcacatgatttccttccgtacatttatgaatggtttatcgaggagcctcaactcactgaggcccagcctgtgtcactgggatacagcatgaa

SEQ ID NO: 58537 - DNA, 2825 bp, Homo sapiens
ggcacgagggttgtcatgagagtggaggctgcggccggggctatgggcagaggcggccgggtctgcttcttccctgtcactgccgcagcagcttggggtgcaaggcggcctggggcggcggaaggggcgccccccgagttccgtctgaggaagcggcggctgccgaggaagtccacgagagccgggtcccgcacgcccctggggtccgggtgctgaggcgccgcctggccgcctccccgggccgcggcaccgctccgacctagccgccctctccaccggggccgcggcagcgccagtcggggcccttccctctaagcagcccaaacgtgcagaatgccccacaagattggatttgtagtcgtcagctcatctggacacgaagacggcttcagtgcccgggagctcatgatccacgcgccaactgtcagtgggtggcggtcacctagattttgccagtttccacaagaaattgtccttcaaatggtggagagatgtcgaataaggaaactgcagttacttgctcaccagtatatgatttcaagtaaaattgagttctacattagtgaaagcttgcctgaatattttgcaccctatcaagcagagcggtttcgaagacttggctacgtgtctctctgtgataatgaaaagacaggttgcaaagcccgggaactaaaatcagtttatgtggatgcagtaggacaatttcttaaactgatttttcaccaaaaccatgtcaacaaatacaacatatataatcaggttgctttggttgccataaatatcattggagaccctgcagatttcagtgatgaaagcaatactgcctctcgagagaagttgattgaccactaccttgggcacaacagcgaggaccctgctctagaaggaacatacgccaggaaatctgactatatctctccgctagatgacttagcttttgatatgtaccaagatccagaagttgcacagatcatacgaaaattagatgaaagaaaacgggaagctgtccaaaaggaacgctatgattatgccaagaaactaaaacaagccattgctgatttgcaaaaggttggtgagcgccttgggaggtatgaggtagagaaacgctgtgccgtggagaaggaagactacgatctcgccaaggagaagaagcagcagatggagcagtatcgtgccgaggtgtacgagcagctggagctgcacagcctcctggatgccgagctgatgcgaagaccttttgatttgcccctccagcccctcgctcgttctggcagtccttgccaccaaaagccaatgccctcactaccacaactggaagaaagaggaacagaaaaccagtttgcagaacctttccttcaggaaaagccttcatcatattctctaactatttctcctcagcattctgcagtagacccgttactccctgccacagatcctcatccaaagatcaatgcagagtccctgccctacgatgagcggcctcttccagctattcgtaagcattatggggaggcagtggtggagccggaaatgagtaatgcagacatcagcgatgctcggaggggaggcatgttaggggagccagagcccttaaccgagaaggccttgagagaagccagctctgccatcgatgtgttgggagaaaccttggttgctgaggcctattgtaagacgtggtcctaccgagaggatgcactgcttgccttgtctaagaagttaatggaaatgcctgttggaaccccaaaagaagatttaaagaacacactgagagcatccgtctttctcgttagaagagccataaaggacattgtgacctccgtttttcaggcttctttgaaattgttgaaaatgatcattacacaatatattcctaaacataaactgagtaaacttgaaacagctcactgtgtggagaggaccattcccgttttgctcaccagaactggagattcttctgcccgcctccgcgtcacagctgcaaattttattcaggaaatggccttgtttaaagaagttaagtctctccaaattattccatcctacctggtgcagccattgaaagcaaactcttcagttcacctggcaatgagtcagatgggcctcctggcccggctgctgaaagacctgggcactggcagctcgggcttcaccattgacaacgtgatgaagttttcagtgagtgccctggagcatagagtgtatgaggtccgcgagacggcggttcgaattattttggacatgtacagacagcaccaggcttccatcctggagtaccttcctccagacgacagcaacacacgcaggaacattctctacaaaacaatttttgagggatttgctaaaatagatggcagagctacagatgctgagatgagggcacggagaaaagcggctacagaagaagcagaaaaacaaaagaaagaagaaataaaagctttacaagggcagctggcagcactgaaagaaattcaggctgaagttcaggttggaagttaacacgtctttcacctgtgtgcttttagctgaaatgtattttgctgtatagatccacatcatacttgacttatttttcatgggattatgcaaatgagcgtcttgattccttttggttttttaggttagttttggggtggatgacagaagccctccatggagaggtggaattgggtggcagatactcttcctgcccctccatcctctgtcagaattgatgtgagctgctgctgaggtttagggagggaccaggggctgtgggcccagagctgctctcctccacagctctccagccaccttcagaggcaaaggagaaaaatcagcttgactat

SEQ ID NO: 58538 - DNA, 5700 bp, Homo sapiens
ggcacgagggttgtcatgagagtggaggctgcggccggggctatgggcagaggcggccgggtctgcttcttccctgtcactgccgcagcagcttggggtgcaaggcggcctggggcggcggaaggggcgccccccgagttccgtctgaggaagcggcggctgccgaggaagtccacgagagccgggtcccgcacgcccctggggtccgggtgctgaggcgccgcctggccgcctccccgggccgcggcaccgctccgacctagccgccctctccaccggggccgcggcagcgccagtcggggcccttccctctaagcagcccaaacgtgcagaatgccccacaagattggatttgtagtcgtcagctcatctggacacgaagacggcttcagtgcccgggagctcatgatccacgcgccaactgtcagtgggtggcggtcacctagattttgccagtttccacaagaaattgtccttcaaatggtggagagatgtcgaataaggaaactgcagttacttgctcaccagtatatgatttcaagtaaaattgagttctacattagtgaaagcttgcctgaatattttgcaccctatcaagcagagcggtttcgaagacttggctacgtgtctctctgtgataatgaaaagacaggttgcaaagcccgggaactaaaatcagtttatgtggatgcagtaggacaatttcttaaactgatttttcaccaaaaccatgtcaacaaatacaacatatataatcaggttgctttggttgccataaatatcattggagaccctgcagatttcagtgatgaaagcaatactgcctctcgagagaagttgattgaccactaccttgggcacaacagcgaggaccctgctctagaaggaacatacgccaggaaatctgactatatctctccgctagatgacttagcttttgatatgtaccaagatccagaagttgcacagatcatacgaaaattagatgaaagaaaacgggaagctgtccaaaaggaacgctatgattatgccaagaaactaaaacaagccattgctgatttgcaaaaggttggtgagcgccttgggaggtatgaggtagagaaacgctgtgccgtggagaaggaagactacgatctcgccaaggagaagaagcagcagatggagcagtatcgtgccgaggtgtacgagcagctggagctgcacagcctcctggatgccgagctgcattctgcagtagacccgttactccctgccacagatcctcatccaaagatcaatgcagagtccctgccctacgatgagcggcctcttccagctattcgtaagcattatggggaggcagtggtggagccggaaatgagtaatgcagacatcagcgatgctcggaggggaggcatgttaggggagccagagcccttaaccgagaaggccttgagagaagccagctctgccatcgatgtgttgggagaaaccttggttgctgaggcctattgtaagacgtggtcctaccgagaggatgcactgcttgccttgtctaagaagttaatggaaatgcctgttggaaccccaaaagaagatttaaagaacacactgagagcatccgtctttctcgttagaagagccataaaggacattgtgacctccgtttttcaggcttctttgaaattgttgaaaatgatcattacacaatatattcctaaacataaactgagtaaacttgaaacagctcactgtgtggagaggaccattcccgttttgctcaccagaactggagattcttctgcccgcctccgcgtcacagctgcaaattttattcaggaaatggccttgtttaaagaagttaagtctctccaaattattccatcctacctggtgcagccattgaaagcaaactcttcagttcacctggcaatgagtcagatgggcctcctggcccggctgctgaaagacctgggcactggcagctcgggcttcaccattgacaacgtgatgaagttttcagtgagtgccctggagcatagagtgtatgaggtccgcgagacggcggttcgaattattttggacatgtacagacagcaccaggcttccatcctggagtaccttcctccagacgacagcaacacacgcaggaacattctctacaaaacaatttttgagggatttgctaaaatagatggcagagctacagatgctgagatgagggcacggagaaaagcggctacagaagaagcagaaaaacaaaagaaagaagaaataaaagctttacaagggcagctggcagcactgaaagaaattcaggctgaagttcaggaaaaagaaagtgatgctgtgaagccaaagaatcaggacattcaaggagggaaagcagcccctgctgaagctctgggaatcccggatgagcactatctagataatttgtgtattttttgtggggaaaggagtgaatccttcacagaggaaggtctggatctccactactggaagcactgtctcatgctgacaagatgtgaccactgcaaacaggtggtcgagatatccagtctgacggagcacttgctgacggaatgtgacaaaaaagacgggtttggaaagtgttaccgttgcagtgaggctgttttcaaggaagagctgcccagacacataaaacacaaggattgcaaccctgccaaaccggagaagctggcaaaccggtgtcccctgtgtcatgagaacttcagccctggagaagaggcatggaaagctcacctgatgggcccagccggctgcacgatgaacctgcgcaagacacacattctgcagaaggccccggcactgcagccagggaaaagctcagctgtggccgcatcaggccccttggggtcaaaggccggaagcaagatccccaccccgaagggcggactgagcaagagctccagcaggacgtacgccaagcgctgacgcggcgctcgggctccttggtctctgtgagggatggagcgggtctcctgattctacaccatctctccagaactctctggccttggtggccccatgctctggctgctgtccccagctccccgccgtgcacgcctcttacgcgtctgtgccgtcagctctcgtgcaaacgatatggatgcagctaaccaaagatcctgcgtgcagtgccaggacctggccgcactgtacattaagccttcagggctgtctcaggccttccttagaatcagagaaggaagcgtcctgtttggagagagccagagagcaccgccagggaggcgctcgcgcaaggccacggtcagcacaggcacggtcccgctttccttagtgcttggagcaatttccataaaacattcaccagaaaccttttgcacatcggtctctgccacacgcagtagaatttccgcagggctgtggctcggccagcagcggttccaggagagtggcggtgcgcacgggcctccagccgtgccttccccctgcaggccccgtctgctgggcctgctgcccagtgcactcagccccaggtagcagaactcacgttcccactatagcaagaaataaaggcaaaagagaacatcttttttttaatcgtagtttttttgagaattggtcccacctcagccgcaccttgctggatgcttctccagtagtgctgcccctgtgacaggcatcagctccctgctggaactgaggtagacacaggtgtgggcccttcccgtgcctttgctcagaggcgcttcactttctccacactttcgaattcctaaagacatgtggaggaagtcactgttaaatgaatttccacctgatcaccctgtgttcacagcaggcagaagcccactggtatgggcctcccgccccttccacatccatgttgtgattggatccataagtttactttcttcaaagagttgataggatgtttaaaacatcaacacattgcttaaaatgatgaaaccaaccctcaaaaaacagtctcctaaccagccatcccctcctgtgggagtgagctgggggttttgtccatagctttggttgggcctgtgtcacatccaggcagccatgtggagggagtcagggtctgtctggaagcatccaccctctcgctgccccagcctgtgctcccaggggcctaggctaccatggactgaagggcagtcccctcccacctggtgcccagggcttctgcttgcctcgctgatgttgcatgggcagacttcaaaaaggatagttagaaaggtttgggttgatggagtttgcattaatgcaattagtgtataaatatgttttaattgccaaccgtgtgaaacaacaaaatatctaaaaactaatcccgatttgaacaatgtactccctggcctggatacattaataaccataaatttgcatgaattaatctccacgtttggtaaactaatacctctggttgactgagaatactgagtaagatataagacctaccaggaacctttaagaatatgctctgctcggtgttgtttgtctgcttgtttgcgacagagcgagactccgtctcgaaaaaaaaaaaaaagtataaggagagaaataactttaaagtttattagacaaaacagagtatagatgccaagatgtctgtaaaatgattttttctggttttaaagagatgttggccattattttctaatccatttttaaaatacagacaaaacacttctttaaacagaacaagaatgagaaaagttaaccaaggaattattcttttctcaccaatcaacacttttaagaaatatatatatatatacacacacatatacacatgccttctatatattgtaacttaaagaaaatacttataaaaagacttcatttttagtgattgacaagcaaacgggttcatttaaaacaggttcctcttttgttagttacagggggtttttttgttgtttttttgtttttgtttttgttttgcgggggtggtggggtttgagacggagtcttgctctgttgcctaggctggagtgcagtggcgcgatcttggccccctgcaacctccgcctcccgggttcgagcaattctcctgcctcagcctcccgagtagctgggattacaggcgtgtgtcaccacgcctggctaatttttttgtatttttagtagagacggggtttcaccatattggccaggctggtctcaaactcctgaccttgtgatccacccacctccgcctcccaaagtgctggaattacaggcatgagccaccgcgcccggcccaatcatgtgtttttgttgaaatgatcctaccagtgattagtggctattgagagttttacagggttatacattgttaagggaccaagaatcaagtacaaaaaattaaaaaggaactgtaaaatcccttggtcattcataaataaatatctaaattaggaatactaattaattgaattttcactcatgagtatgttctgaatatttaatatttatttctattattttcatatgttaagatattccattaaatctaacttaaaagaattgtatgtataaattggcattaggatacaaatgtaaatgtttttaatgaaattttgcaactttttaatattttaacatagttttctatttgtctttatttcaagtaccagaattacaaaatatctaagtaatatatttttgttgtcgttttagggcttaagggttaattcacccagagtatattaatataataaaaagatcactaaatgt

SEQ ID NO: 58539 - DNA, 5676 bp, Homo sapiens
ggcacgagggttgtcatgagagtggaggctgcggccggggctatgggcagaggcggccgggtctgcttcttccctgtcactgccgcagcagcttggggtgcaaggcggcctggggcggcggaaggggcgccccccgagttccgtctgaggaagcggcggctgccgaggaagtccacgagagccgggtcccgcacgcccctggggtccgggtgctgaggcgccgcctggccgcctccccgggccgcggcaccgctccgacctagccgccctctccaccggggccgcggcagcgccagtcggggcccttccctctaagcagcccaaacgtgcagaatgccccacaagattggatttgtagtcgtcagctcatctggacacgaagacggcttcagtgcccgggagctcatgatccacgcgccaactgtcagtgggtggcggtcacctagattttgccagtttccacaagaaattgtccttcaaatggtggagagatgtcgaataaggaaactgcagttacttgctcaccagtatatgatttcaagtaaaattgagttctacattagtgaaagcttgcctgaatattttgcaccctatcaagcagagcggtttcgaagacttggctacgtgtctctctgtgataatgaaaagacaggttgcaaagcccgggaactaaaatcagtttatgtggatgcagtaggacaatttcttaaactgatttttcaccaaaaccatgtcaacaaatacaacatatataatcaggttgctttggttgccataaatatcattggagaccctgcagatttcagtgatgaaagcaatactgcctctcgagagaagttgattgaccactaccttgggcacaacagcgaggaccctgctctagaaggaacatacgccaggaaatctgactatatctctccgctagatgacttagcttttgatatgtaccaagatccagaagttgcacagatcatacgaaaattagatgaaagaaaacgggaagctgtccaaaaggaacgctatgattatgccaagaaactaaaacaagccattgctgatttgcaaaaggttggtgagcgccttgggaggtatgaggtagagaaacgctgtgccgtggagaaggaagactacgatctcgccaaggagaagaagcagcagatggagcagtatcgtgccgaggtgtacgagcagctggagctgcacagcctcctggatgccgagctgatgcgaagaccttttgatttgcccctccagcccctcgctcgttctggcagtccttgccaccaaaagccaatgccctcactaccacaactggaagaaagaggaacagaaaaccagtttgcagaacctttccttcaggaaaagccttcatcatattctctaactatttctcctcagcattctgcagtagacccgttactccctgccacagatcctcatccaaagatcaatgttgctgaggcctattgtaagacgtggtcctaccgagaggatgcactgcttgccttgtctaagaagttaatggaaatgcctgttggaaccccaaaagaagatttaaagaacacactgagagcatccgtctttctcgttagaagagccataaaggacattgtgacctccgtttttcaggcttctttgaaattgttgaaaatgatcattacacaatatattcctaaacataaactgagtaaacttgaaacagctcactgtgtggagaggaccattcccgttttgctcaccagaactggagattcttctgcccgcctccgcgtcacagctgcaaattttattcaggaaatggccttgtttaaagaagttaagtctctccaaattattccatcctacctggtgcagccattgaaagcaaactcttcagttcacctggcaatgagtcagatgggcctcctggcccggctgctgaaagacctgggcactggcagctcgggcttcaccattgacaacgtgatgaagttttcagtgagtgccctggagcatagagtgtatgaggtccgcgagacggcggttcgaattattttggacatgtacagacagcaccaggcttccatcctggagtaccttcctccagacgacagcaacacacgcaggaacattctctacaaaacaatttttgagggatttgctaaaatagatggcagagctacagatgctgagatgagggcacggagaaaagcggctacagaagaagcagaaaaacaaaagaaagaagaaataaaagctttacaagggcagctggcagcactgaaagaaattcaggctgaagttcaggaaaaagaaagtgatgctgtgaagccaaagaatcaggacattcaaggagggaaagcagcccctgctgaagctctgggaatcccggatgagcactatctagataatttgtgtattttttgtggggaaaggagtgaatccttcacagaggaaggtctggatctccactactggaagcactgtctcatgctgacaagatgtgaccactgcaaacaggtggtcgagatatccagtctgacggagcacttgctgacggaatgtgacaaaaaagacgggtttggaaagtgttaccgttgcagtgaggctgttttcaaggaagagctgcccagacacataaaacacaaggattgcaaccctgccaaaccggagaagctggcaaaccggtgtcccctgtgtcatgagaacttcagccctggagaagaggcatggaaagctcacctgatgggcccagccggctgcacgatgaacctgcgcaagacacacattctgcagaaggccccggcactgcagccagggaaaagctcagctgtggccgcatcaggccccttggggtcaaaggccggaagcaagatccccaccccgaagggcggactgagcaagagctccagcaggacgtacgccaagcgctgacgcggcgctcgggctccttggtctctgtgagggatggagcgggtctcctgattctacaccatctctccagaactctctggccttggtggccccatgctctggctgctgtccccagctccccgccgtgcacgcctcttacgcgtctgtgccgtcagctctcgtgcaaacgatatggatgcagctaaccaaagatcctgcgtgcagtgccaggacctggccgcactgtacattaagccttcagggctgtctcaggccttccttagaatcagagaaggaagcgtcctgtttggagagagccagagagcaccgccagggaggcgctcgcgcaaggccacggtcagcacaggcacggtcccgctttccttagtgcttggagcaatttccataaaacattcaccagaaaccttttgcacatcggtctctgccacacgcagtagaatttccgcagggctgtggctcggccagcagcggttccaggagagtggcggtgcgcacgggcctccagccgtgccttccccctgcaggccccgtctgctgggcctgctgcccagtgcactcagccccaggtagcagaactcacgttcccactatagcaagaaataaaggcaaaagagaacatcttttttttaatcgtagtttttttgagaattggtcccacctcagccgcaccttgctggatgcttctccagtagtgctgcccctgtgacaggcatcagctccctgctggaactgaggtagacacaggtgtgggcccttcccgtgcctttgctcagaggcgcttcactttctccacactttcgaattcctaaagacatgtggaggaagtcactgttaaatgaatttccacctgatcaccctgtgttcacagcaggcagaagcccactggtatgggcctcccgccccttccacatccatgttgtgattggatccataagtttactttcttcaaagagttgataggatgtttaaaacatcaacacattgcttaaaatgatgaaaccaaccctcaaaaaacagtctcctaaccagccatcccctcctgtgggagtgagctgggggttttgtccatagctttggttgggcctgtgtcacatccaggcagccatgtggagggagtcagggtctgtctggaagcatccaccctctcgctgccccagcctgtgctcccaggggcctaggctaccatggactgaagggcagtcccctcccacctggtgcccagggcttctgcttgcctcgctgatgttgcatgggcagacttcaaaaaggatagttagaaaggtttgggttgatggagtttgcattaatgcaattagtgtataaatatgttttaattgccaaccgtgtgaaacaacaaaatatctaaaaactaatcccgatttgaacaatgtactccctggcctggatacattaataaccataaatttgcatgaattaatctccacgtttggtaaactaatacctctggttgactgagaatactgagtaagatataagacctaccaggaacctttaagaatatgctctgctcggtgttgtttgtctgcttgtttgcgacagagcgagactccgtctcgaaaaaaaaaaaaaagtataaggagagaaataactttaaagtttattagacaaaacagagtatagatgccaagatgtctgtaaaatgattttttctggttttaaagagatgttggccattattttctaatccatttttaaaatacagacaaaacacttctttaaacagaacaagaatgagaaaagttaaccaaggaattattcttttctcaccaatcaacacttttaagaaatatatatatatatacacacacatatacacatgccttctatatattgtaacttaaagaaaatacttataaaaagacttcatttttagtgattgacaagcaaacgggttcatttaaaacaggttcctcttttgttagttacagggggtttttttgttgtttttttgtttttgtttttgttttgcgggggtggtggggtttgagacggagtcttgctctgttgcctaggctggagtgcagtggcgcgatcttggccccctgcaacctccgcctcccgggttcgagcaattctcctgcctcagcctcccgagtagctgggattacaggcgtgtgtcaccacgcctggctaatttttttgtatttttagtagagacggggtttcaccatattggccaggctggtctcaaactcctgaccttgtgatccacccacctccgcctcccaaagtgctggaattacaggcatgagccaccgcgcccggcccaatcatgtgtttttgttgaaatgatcctaccagtgattagtggctattgagagttttacagggttatacattgttaagggaccaagaatcaagtacaaaaaattaaaaaggaactgtaaaatcccttggtcattcataaataaatatctaaattaggaatactaattaattgaattttcactcatgagtatgttctgaatatttaatatttatttctattattttcatatgttaagatattccattaaatctaacttaaaagaattgtatgtataaattggcattaggatacaaatgtaaatgtttttaatgaaattttgcaactttttaatattttaacatagttttctatttgtctttatttcaagtaccagaattacaaaatatctaagtaatatatttttgttgtcgttttagggcttaagggttaattcacccagagtatattaatataataaaaagatcactaaatgt

SEQ ID NO: 58540 - DNA, 5372 bp, Homo sapiens
tctagctttaaaaaataaaacaataaacataaatgagcctattgagttcaatcagagtagggagcagttttattgaacagcacattttcaaattcttcagttgtgttttgtttttcagctacgtgtctctctgtgataatgaaaagacaggttgcaaagcccgggaactaaaatcagtttatgtggatgcagtaggacaatttcttaaactgatttttcaccaaaaccatgtcaacaaatacaacatatataatcaggttgctttggttgccataaatatcattggagaccctgcagatttcagtgatgaaagcaatactgcctctcgagagaagttgattgaccactaccttgggcacaacagcgaggaccctgctctagaaggaacatacgccaggaaatctgactatatctctccgctagatgacttagcttttgatatgtaccaagatccagaagttgcacagatcatacgaaaattagatgaaagaaaacgggaagctgtccaaaaggaacgctatgattatgccaagaaactaaaacaagccattgctgatttgcaaaaggttggtgagcgccttgggaggtatgaggtagagaaacgctgtgccgtggagaaggaagactacgatctcgccaaggagaagaagcagcagatggagcagtatcgtgccgaggtgtacgagcagctggagctgcacagcctcctggatgccgagctgatgcgaagaccttttgatttgcccctccagcccctcgctcgttctggcagtccttgccaccaaaagccaatgccctcactaccacaactggaagaaagaggaacagaaaaccagtttgcagaacctttccttcaggaaaagccttcatcatattctctaactatttctcctcagcattctgcagtagacccgttactccctgccacagatcctcatccaaagatcaatgcagagtccctgccctacgatgagcggcctcttccagctattcgtaagcattatggggaggcagtggtggagccggaaatgagtaatgcagacatcagcgatgctcggaggggaggcatgttaggggagccagagcccttaaccgagaaggccttgagagaagccagctctgccatcgatgtgttgggagaaaccttggttgctgaggcctattgtaagacgtggtcctaccgagaggatgcactgcttgccttgtctaagaagttaatggaaatgcctgttggaaccccaaaagaagatttaaagaacacactgagagcatccgtctttctcgttagaagagccataaaggacattgtgacctccgtttttcaggcttctttgaaattgttgaaaatgatcattacacaatatattcctaaacataaactgagtaaacttgaaacagctcactgtgtggagaggaccattcccgttttgctcaccagaactggagattcttctgcccgcctccgcgtcacagctgcaaattttattcaggaaatggccttgtttaaagaagttaagtctctccaaattattccatcctacctggtgcagccattgaaagcaaactcttcagttcacctggcaatgagtcagatgggcctcctggcccggctgctgaaagacctgggcactggcagctcgggcttcaccattgacaacgtgatgaagttttcagtgagtgccctggagcatagagtgtatgaggtccgcgagacggcggttcgaattattttggacatgtacagacagcaccaggcttccatcctggagtaccttcctccagacgacagcaacacacgcaggaacattctctacaaaacaatttttgagggatttgctaaaatagatggcagagctacagatgctgagatgagggcacggagaaaagcggctacagaagaagcagaaaaacaaaagaaagaagaaataaaagctttacaagggcagctggcagcactgaaagaaattcaggctgaagttcaggaaaaagaaagtgatgctgtgaagccaaagaatcaggacattcaaggagggaaagcagcccctgctgaagctctgggaatcccggatgagcactatctagataatttgtgtattttttgtggggaaaggagtgaatccttcacagaggaaggtctggatctccactactggaagcactgtctcatgctgacaagatgtgaccactgcaaacaggtggtcgagatatccagtctgacggagcacttgctgacggaatgtgacaaaaaagacgggtttggaaagtgttaccgttgcagtgaggctgttttcaaggaagagctgcccagacacataaaacacaaggattgcaaccctgccaaaccggagaagctggcaaaccggtgtcccctgtgtcatgagaacttcagccctggagaagaggcatggaaagctcacctgatgggcccagccggctgcacgatgaacctgcgcaagacacacattctgcagaaggccccggcactgcagccagggaaaagctcagctgtggccgcatcaggccccttggggtcaaaggccggaagcaagatccccaccccgaagggcggactgagcaagagctccagcaggacgtacgccaagcgctgacgcggcgctcgggctccttggtctctgtgagggatggagcgggtctcctgattctacaccatctctccagaactctctggccttggtggccccatgctctggctgctgtccccagctccccgccgtgcacgcctcttacgcgtctgtgccgtcagctctcgtgcaaacgatatggatgcagctaaccaaagatcctgcgtgcagtgccaggacctggccgcactgtacattaagccttcagggctgtctcaggccttccttagaatcagagaaggaagcgtcctgtttggagagagccagagagcaccgccagggaggcgctcgcgcaaggccacggtcagcacaggcacggtcccgctttccttagtgcttggagcaatttccataaaacattcaccagaaaccttttgcacatcggtctctgccacacgcagtagaatttccgcagggctgtggctcggccagcagcggttccaggagagtggcggtgcgcacgggcctccagccgtgccttccccctgcaggccccgtctgctgggcctgctgcccagtgcactcagccccaggtagcagaactcacgttcccactatagcaagaaataaaggcaaaagagaacatcttttttttaatcgtagtttttttgagaattggtcccacctcagccgcaccttgctggatgcttctccagtagtgctgcccctgtgacaggcatcagctccctgctggaactgaggtagacacaggtgtgggcccttcccgtgcctttgctcagaggcgcttcactttctccacactttcgaattcctaaagacatgtggaggaagtcactgttaaatgaatttccacctgatcaccctgtgttcacagcaggcagaagcccactggtatgggcctcccgccccttccacatccatgttgtgattggatccataagtttactttcttcaaagagttgataggatgtttaaaacatcaacacattgcttaaaatgatgaaaccaaccctcaaaaaacagtctcctaaccagccatcccctcctgtgggagtgagctgggggttttgtccatagctttggttgggcctgtgtcacatccaggcagccatgtggagggagtcagggtctgtctggaagcatccaccctctcgctgccccagcctgtgctcccaggggcctaggctaccatggactgaagggcagtcccctcccacctggtgcccagggcttctgcttgcctcgctgatgttgcatgggcagacttcaaaaaggatagttagaaaggtttgggttgatggagtttgcattaatgcaattagtgtataaatatgttttaattgccaaccgtgtgaaacaacaaaatatctaaaaactaatcccgatttgaacaatgtactccctggcctggatacattaataaccataaatttgcatgaattaatctccacgtttggtaaactaatacctctggttgactgagaatactgagtaagatataagacctaccaggaacctttaagaatatgctctgctcggtgttgtttgtctgcttgtttgcgacagagcgagactccgtctcgaaaaaaaaaaaaaagtataaggagagaaataactttaaagtttattagacaaaacagagtatagatgccaagatgtctgtaaaatgattttttctggttttaaagagatgttggccattattttctaatccatttttaaaatacagacaaaacacttctttaaacagaacaagaatgagaaaagttaaccaaggaattattcttttctcaccaatcaacacttttaagaaatatatatatatatacacacacatatacacatgccttctatatattgtaacttaaagaaaatacttataaaaagacttcatttttagtgattgacaagcaaacgggttcatttaaaacaggttcctcttttgttagttacagggggtttttttgttgtttttttgtttttgtttttgttttgcgggggtggtggggtttgagacggagtcttgctctgttgcctaggctggagtgcagtggcgcgatcttggccccctgcaacctccgcctcccgggttcgagcaattctcctgcctcagcctcccgagtagctgggattacaggcgtgtgtcaccacgcctggctaatttttttgtatttttagtagagacggggtttcaccatattggccaggctggtctcaaactcctgaccttgtgatccacccacctccgcctcccaaagtgctggaattacaggcatgagccaccgcgcccggcccaatcatgtgtttttgttgaaatgatcctaccagtgattagtggctattgagagttttacagggttatacattgttaagggaccaagaatcaagtacaaaaaattaaaaaggaactgtaaaatcccttggtcattcataaataaatatctaaattaggaatactaattaattgaattttcactcatgagtatgttctgaatatttaatatttatttctattattttcatatgttaagatattccattaaatctaacttaaaagaattgtatgtataaattggcattaggatacaaatgtaaatgtttttaatgaaattttgcaactttttaatattttaacatagttttctatttgtctttatttcaagtaccagaattacaaaatatctaagtaatatatttttgttgtcgttttagggcttaagggttaattcacccagagtatattaatataataaaaagatcactaaatgt

SEQ ID NO: 58541 - DNA, 4866 bp, Homo sapiens
gcatagccacataaggaataggcctaatgacaccttgtgagcatgtttattaaaatcaggcttgatgcttatttctaagcaataaactaagaaaatatcagagatcttgtcagaaaaaaagatgtaatagcctttactttagtagtctccatgtcagttgaactgaaattgctaccagtaaacagtcattgaggtggaatctaccttgcttttttttattaggtctgtaatgagtttagaaagtaatagaaagcctcatctaatcttttcaattacatcctatttgttgtataaattattctaatctgatgatactgatatttagcaaaataacatctttcagatcaggtaagtaagcgcagtaagcctgccagtgagagttgcactggagaatgtgacctatggagctccccagcactttcctctctccttcactcactgcaggcagagtccctgccctacgatgagcggcctcttccagctattcgtaagcattatggggaggcagtggtggagccggaaatgagtaatgcagacatcagcgatgctcggaggggaggcatgttaggggagccagagcccttaaccgagaaggccttgagagaagccagctctgccatcgatgtgttgggagaaaccttggttgctgaggcctattgtaagacgtggtcctaccgagaggatgcactgcttgccttgtctaagaagttaatggaaatgcctgttggaaccccaaaagaagatttaaagaacacactgagagcatccgtctttctcgttagaagagccataaaggacattgtgacctccgtttttcaggcttctttgaaattgttgaaaatgatcattacacaatatattcctaaacataaactgagtaaacttgaaacagctcactgtgtggagaggaccattcccgttttgctcaccagaactggagattcttctgcccgcctccgcgtcacagctgcaaattttattcaggaaatggccttgtttaaagaagttaagtctctccaaattattccatcctacctggtgcagccattgaaagcaaactcttcagttcacctggcaatgagtcagatgggcctcctggcccggctgctgaaagacctgggcactggcagctcgggcttcaccattgacaacgtgatgaagttttcagtgagtgccctggagcatagagtgtatgaggtccgcgagacggcggttcgaattattttggacatgtacagacagcaccaggcttccatcctggagtaccttcctccagacgacagcaacacacgcaggaacattctctacaaaacaatttttgagggatttgctaaaatagatggcagagctacagatgctgagatgagggcacggagaaaagcggctacagaagaagcagaaaaacaaaagaaagaagaaataaaagctttacaagggcagctggcagcactgaaagaaattcaggctgaagttcaggaaaaagaaagtgatgctgtgaagccaaagaatcaggacattcaaggagggaaagcagcccctgctgaagctctgggaatcccggatgagcactatctagataatttgtgtattttttgtggggaaaggagtgaatccttcacagaggaaggtctggatctccactactggaagcactgtctcatgctgacaagatgtgaccactgcaaacaggtggtcgagatatccagtctgacggagcacttgctgacggaatgtgacaaaaaagacgggtttggaaagtgttaccgttgcagtgaggctgttttcaaggaagagctgcccagacacataaaacacaaggattgcaaccctgccaaaccggagaagctggcaaaccggtgtcccctgtgtcatgagaacttcagccctggagaagaggcatggaaagctcacctgatgggcccagccggctgcacgatgaacctgcgcaagacacacattctgcagaaggccccggcactgcagccagggaaaagctcagctgtggccgcatcaggccccttggggtcaaaggccggaagcaagatccccaccccgaagggcggactgagcaagagctccagcaggacgtacgccaagcgctgacgcggcgctcgggctccttggtctctgtgagggatggagcgggtctcctgattctacaccatctctccagaactctctggccttggtggccccatgctctggctgctgtccccagctccccgccgtgcacgcctcttacgcgtctgtgccgtcagctctcgtgcaaacgatatggatgcagctaaccaaagatcctgcgtgcagtgccaggacctggccgcactgtacattaagccttcagggctgtctcaggccttccttagaatcagagaaggaagcgtcctgtttggagagagccagagagcaccgccagggaggcgctcgcgcaaggccacggtcagcacaggcacggtcccgctttccttagtgcttggagcaatttccataaaacattcaccagaaaccttttgcacatcggtctctgccacacgcagtagaatttccgcagggctgtggctcggccagcagcggttccaggagagtggcggtgcgcacgggcctccagccgtgccttccccctgcaggccccgtctgctgggcctgctgcccagtgcactcagccccaggtagcagaactcacgttcccactatagcaagaaataaaggcaaaagagaacatcttttttttaatcgtagtttttttgagaattggtcccacctcagccgcaccttgctggatgcttctccagtagtgctgcccctgtgacaggcatcagctccctgctggaactgaggtagacacaggtgtgggcccttcccgtgcctttgctcagaggcgcttcactttctccacactttcgaattcctaaagacatgtggaggaagtcactgttaaatgaatttccacctgatcaccctgtgttcacagcaggcagaagcccactggtatgggcctcccgccccttccacatccatgttgtgattggatccataagtttactttcttcaaagagttgataggatgtttaaaacatcaacacattgcttaaaatgatgaaaccaaccctcaaaaaacagtctcctaaccagccatcccctcctgtgggagtgagctgggggttttgtccatagctttggttgggcctgtgtcacatccaggcagccatgtggagggagtcagggtctgtctggaagcatccaccctctcgctgccccagcctgtgctcccaggggcctaggctaccatggactgaagggcagtcccctcccacctggtgcccagggcttctgcttgcctcgctgatgttgcatgggcagacttcaaaaaggatagttagaaaggtttgggttgatggagtttgcattaatgcaattagtgtataaatatgttttaattgccaaccgtgtgaaacaacaaaatatctaaaaactaatcccgatttgaacaatgtactccctggcctggatacattaataaccataaatttgcatgaattaatctccacgtttggtaaactaatacctctggttgactgagaatactgagtaagatataagacctaccaggaacctttaagaatatgctctgctcggtgttgtttgtctgcttgtttgcgacagagcgagactccgtctcgaaaaaaaaaaaaaagtataaggagagaaataactttaaagtttattagacaaaacagagtatagatgccaagatgtctgtaaaatgattttttctggttttaaagagatgttggccattattttctaatccatttttaaaatacagacaaaacacttctttaaacagaacaagaatgagaaaagttaaccaaggaattattcttttctcaccaatcaacacttttaagaaatatatatatatatacacacacatatacacatgccttctatatattgtaacttaaagaaaatacttataaaaagacttcatttttagtgattgacaagcaaacgggttcatttaaaacaggttcctcttttgttagttacagggggtttttttgttgtttttttgtttttgtttttgttttgcgggggtggtggggtttgagacggagtcttgctctgttgcctaggctggagtgcagtggcgcgatcttggccccctgcaacctccgcctcccgggttcgagcaattctcctgcctcagcctcccgagtagctgggattacaggcgtgtgtcaccacgcctggctaatttttttgtatttttagtagagacggggtttcaccatattggccaggctggtctcaaactcctgaccttgtgatccacccacctccgcctcccaaagtgctggaattacaggcatgagccaccgcgcccggcccaatcatgtgtttttgttgaaatgatcctaccagtgattagtggctattgagagttttacagggttatacattgttaagggaccaagaatcaagtacaaaaaattaaaaaggaactgtaaaatcccttggtcattcataaataaatatctaaattaggaatactaattaattgaattttcactcatgagtatgttctgaatatttaatatttatttctattattttcatatgttaagatattccattaaatctaacttaaaagaattgtatgtataaattggcattaggatacaaatgtaaatgtttttaatgaaattttgcaactttttaatattttaacatagttttctatttgtctttatttcaagtaccagaattacaaaatatctaagtaatatatttttgttgtcgttttagggcttaagggttaattcacccagagtatattaatataataaaaagatcactaaatgt

SEQ ID NO: 58542 - DNA, 4446 bp, Homo sapiens
gcatagccacataaggaataggcctaatgacaccttgtgagcatgtttattaaaatcaggcttgatgcttatttctaagcaataaactaagaaaatatcagagatcttgtcagaaaaaaagatgtaatagcctttactttagtagtctccatgtcagttgaactgaaattgctaccagtaaacagtcattgaggtggaatctaccttgcttttttttattaggttgctgaggcctattgtaagacgtggtcctaccgagaggatgcactgcttgccttgtctaagaagttaatggaaatgcctgttggaaccccaaaagaagatttaaagaacacactgagagcatccgtctttctcgttagaagagccataaaggacattgtgacctccgtttttcaggcttctttgaaattgttgaaaatgatcattacacaatatattcctaaacataaactgagtaaacttgaaacagctcactgtgtggagaggaccattcccgttttgctcaccagaactggagattcttctgcccgcctccgcgtcacagctgcaaattttattcaggaaatggccttgtttaaagaagttaagtctctccaaattattccatcctacctggtgcagccattgaaagcaaactcttcagttcacctggcaatgagtcagatgggcctcctggcccggctgctgaaagacctgggcactggcagctcgggcttcaccattgacaacgtgatgaagttttcagtgagtgccctggagcatagagtgtatgaggtccgcgagacggcggttcgaattattttggacatgtacagacagcaccaggcttccatcctggagtaccttcctccagacgacagcaacacacgcaggaacattctctacaaaacaatttttgagggatttgctaaaatagatggcagagctacagatgctgagatgagggcacggagaaaagcggctacagaagaagcagaaaaacaaaagaaagaagaaataaaagctttacaagggcagctggcagcactgaaagaaattcaggctgaagttcaggaaaaagaaagtgatgctgtgaagccaaagaatcaggacattcaaggagggaaagcagcccctgctgaagctctgggaatcccggatgagcactatctagataatttgtgtattttttgtggggaaaggagtgaatccttcacagaggaaggtctggatctccactactggaagcactgtctcatgctgacaagatgtgaccactgcaaacaggtggtcgagatatccagtctgacggagcacttgctgacggaatgtgacaaaaaagacgggtttggaaagtgttaccgttgcagtgaggctgttttcaaggaagagctgcccagacacataaaacacaaggattgcaaccctgccaaaccggagaagctggcaaaccggtgtcccctgtgtcatgagaacttcagccctggagaagaggcatggaaagctcacctgatgggcccagccggctgcacgatgaacctgcgcaagacacacattctgcagaaggccccggcactgcagccagggaaaagctcagctgtggccgcatcaggccccttggggtcaaaggccggaagcaagatccccaccccgaagggcggactgagcaagagctccagcaggacgtacgccaagcgctgacgcggcgctcgggctccttggtctctgtgagggatggagcgggtctcctgattctacaccatctctccagaactctctggccttggtggccccatgctctggctgctgtccccagctccccgccgtgcacgcctcttacgcgtctgtgccgtcagctctcgtgcaaacgatatggatgcagctaaccaaagatcctgcgtgcagtgccaggacctggccgcactgtacattaagccttcagggctgtctcaggccttccttagaatcagagaaggaagcgtcctgtttggagagagccagagagcaccgccagggaggcgctcgcgcaaggccacggtcagcacaggcacggtcccgctttccttagtgcttggagcaatttccataaaacattcaccagaaaccttttgcacatcggtctctgccacacgcagtagaatttccgcagggctgtggctcggccagcagcggttccaggagagtggcggtgcgcacgggcctccagccgtgccttccccctgcaggccccgtctgctgggcctgctgcccagtgcactcagccccaggtagcagaactcacgttcccactatagcaagaaataaaggcaaaagagaacatcttttttttaatcgtagtttttttgagaattggtcccacctcagccgcaccttgctggatgcttctccagtagtgctgcccctgtgacaggcatcagctccctgctggaactgaggtagacacaggtgtgggcccttcccgtgcctttgctcagaggcgcttcactttctccacactttcgaattcctaaagacatgtggaggaagtcactgttaaatgaatttccacctgatcaccctgtgttcacagcaggcagaagcccactggtatgggcctcccgccccttccacatccatgttgtgattggatccataagtttactttcttcaaagagttgataggatgtttaaaacatcaacacattgcttaaaatgatgaaaccaaccctcaaaaaacagtctcctaaccagccatcccctcctgtgggagtgagctgggggttttgtccatagctttggttgggcctgtgtcacatccaggcagccatgtggagggagtcagggtctgtctggaagcatccaccctctcgctgccccagcctgtgctcccaggggcctaggctaccatggactgaagggcagtcccctcccacctggtgcccagggcttctgcttgcctcgctgatgttgcatgggcagacttcaaaaaggatagttagaaaggtttgggttgatggagtttgcattaatgcaattagtgtataaatatgttttaattgccaaccgtgtgaaacaacaaaatatctaaaaactaatcccgatttgaacaatgtactccctggcctggatacattaataaccataaatttgcatgaattaatctccacgtttggtaaactaatacctctggttgactgagaatactgagtaagatataagacctaccaggaacctttaagaatatgctctgctcggtgttgtttgtctgcttgtttgcgacagagcgagactccgtctcgaaaaaaaaaaaaaagtataaggagagaaataactttaaagtttattagacaaaacagagtatagatgccaagatgtctgtaaaatgattttttctggttttaaagagatgttggccattattttctaatccatttttaaaatacagacaaaacacttctttaaacagaacaagaatgagaaaagttaaccaaggaattattcttttctcaccaatcaacacttttaagaaatatatatatatatacacacacatatacacatgccttctatatattgtaacttaaagaaaatacttataaaaagacttcatttttagtgattgacaagcaaacgggttcatttaaaacaggttcctcttttgttagttacagggggtttttttgttgtttttttgtttttgtttttgttttgcgggggtggtggggtttgagacggagtcttgctctgttgcctaggctggagtgcagtggcgcgatcttggccccctgcaacctccgcctcccgggttcgagcaattctcctgcctcagcctcccgagtagctgggattacaggcgtgtgtcaccacgcctggctaatttttttgtatttttagtagagacggggtttcaccatattggccaggctggtctcaaactcctgaccttgtgatccacccacctccgcctcccaaagtgctggaattacaggcatgagccaccgcgcccggcccaatcatgtgtttttgttgaaatgatcctaccagtgattagtggctattgagagttttacagggttatacattgttaagggaccaagaatcaagtacaaaaaattaaaaaggaactgtaaaatcccttggtcattcataaataaatatctaaattaggaatactaattaattgaattttcactcatgagtatgttctgaatatttaatatttatttctattattttcatatgttaagatattccattaaatctaacttaaaagaattgtatgtataaattggcattaggatacaaatgtaaatgtttttaatgaaattttgcaactttttaatattttaacatagttttctatttgtctttatttcaagtaccagaattacaaaatatctaagtaatatatttttgttgtcgttttagggcttaagggttaattcacccagagtatattaatataataaaaagatcactaaatgt

SEQ ID NO: 58543 - DNA, 4337 bp, Homo sapiens
  misc_feature (16)..(16): n is a, c, g, or t
  misc_feature (91)..(91): n is a, c, g, or t
  misc_feature (108)..(108): n is a, c, g, or t
tagttaaactgtcttncgcatagtgcaagtttttgaacaactggaaatattttggcttacgcaaggttaatagcaggtcattttgtggaangcgtgggacaatcctancccttgttgctgaggcctattgtaagacgtggtcctaccgagaggatgcactgcttgccttgtctaagaagttaatggaaatgcctgttggaaccccaaaagaagatttaaagaacacactgagagcatccgtctttctcgttagaagagccataaaggacattgtgacctccgtttttcaggcttctttgaaattgttgaaaatgatcattacacaatatattcctaaacataaactgagtaaacttgaaacagctcactgtgtggagaggaccattcccgttttgctcaccagaactggagattcttctgcccgcctccgcgtcacagctgcaaattttattcaggaaatggccttgtttaaagaagttaagtctctccaaattattccatcctacctggtgcagccattgaaagcaaactcttcagttcacctggcaatgagtcagatgggcctcctggcccggctgctgaaagacctgggcactggcagctcgggcttcaccattgacaacgtgatgaagttttcagtgagtgccctggagcatagagtgtatgaggtccgcgagacggcggttcgaattattttggacatgtacagacagcaccaggcttccatcctggagtaccttcctccagacgacagcaacacacgcaggaacattctctacaaaacaatttttgagggatttgctaaaatagatggcagagctacagatgctgagatgagggcacggagaaaagcggctacagaagaagcagaaaaacaaaagaaagaagaaataaaagctttacaagggcagctggcagcactgaaagaaattcaggctgaagttcaggaaaaagaaagtgatgctgtgaagccaaagaatcaggacattcaaggagggaaagcagcccctgctgaagctctgggaatcccggatgagcactatctagataatttgtgtattttttgtggggaaaggagtgaatccttcacagaggaaggtctggatctccactactggaagcactgtctcatgctgacaagatgtgaccactgcaaacaggtggtcgagatatccagtctgacggagcacttgctgacggaatgtgacaaaaaagacgggtttggaaagtgttaccgttgcagtgaggctgttttcaaggaagagctgcccagacacataaaacacaaggattgcaaccctgccaaaccggagaagctggcaaaccggtgtcccctgtgtcatgagaacttcagccctggagaagaggcatggaaagctcacctgatgggcccagccggctgcacgatgaacctgcgcaagacacacattctgcagaaggccccggcactgcagccagggaaaagctcagctgtggccgcatcaggccccttggggtcaaaggccggaagcaagatccccaccccgaagggcggactgagcaagagctccagcaggacgtacgccaagcgctgacgcggcgctcgggctccttggtctctgtgagggatggagcgggtctcctgattctacaccatctctccagaactctctggccttggtggccccatgctctggctgctgtccccagctccccgccgtgcacgcctcttacgcgtctgtgccgtcagctctcgtgcaaacgatatggatgcagctaaccaaagatcctgcgtgcagtgccaggacctggccgcactgtacattaagccttcagggctgtctcaggccttccttagaatcagagaaggaagcgtcctgtttggagagagccagagagcaccgccagggaggcgctcgcgcaaggccacggtcagcacaggcacggtcccgctttccttagtgcttggagcaatttccataaaacattcaccagaaaccttttgcacatcggtctctgccacacgcagtagaatttccgcagggctgtggctcggccagcagcggttccaggagagtggcggtgcgcacgggcctccagccgtgccttccccctgcaggccccgtctgctgggcctgctgcccagtgcactcagccccaggtagcagaactcacgttcccactatagcaagaaataaaggcaaaagagaacatcttttttttaatcgtagtttttttgagaattggtcccacctcagccgcaccttgctggatgcttctccagtagtgctgcccctgtgacaggcatcagctccctgctggaactgaggtagacacaggtgtgggcccttcccgtgcctttgctcagaggcgcttcactttctccacactttcgaattcctaaagacatgtggaggaagtcactgttaaatgaatttccacctgatcaccctgtgttcacagcaggcagaagcccactggtatgggcctcccgccccttccacatccatgttgtgattggatccataagtttactttcttcaaagagttgataggatgtttaaaacatcaacacattgcttaaaatgatgaaaccaaccctcaaaaaacagtctcctaaccagccatcccctcctgtgggagtgagctgggggttttgtccatagctttggttgggcctgtgtcacatccaggcagccatgtggagggagtcagggtctgtctggaagcatccaccctctcgctgccccagcctgtgctcccaggggcctaggctaccatggactgaagggcagtcccctcccacctggtgcccagggcttctgcttgcctcgctgatgttgcatgggcagacttcaaaaaggatagttagaaaggtttgggttgatggagtttgcattaatgcaattagtgtataaatatgttttaattgccaaccgtgtgaaacaacaaaatatctaaaaactaatcccgatttgaacaatgtactccctggcctggatacattaataaccataaatttgcatgaattaatctccacgtttggtaaactaatacctctggttgactgagaatactgagtaagatataagacctaccaggaacctttaagaatatgctctgctcggtgttgtttgtctgcttgtttgcgacagagcgagactccgtctcgaaaaaaaaaaaaaagtataaggagagaaataactttaaagtttattagacaaaacagagtatagatgccaagatgtctgtaaaatgattttttctggttttaaagagatgttggccattattttctaatccatttttaaaatacagacaaaacacttctttaaacagaacaagaatgagaaaagttaaccaaggaattattcttttctcaccaatcaacacttttaagaaatatatatatatatacacacacatatacacatgccttctatatattgtaacttaaagaaaatacttataaaaagacttcatttttagtgattgacaagcaaacgggttcatttaaaacaggttcctcttttgttagttacagggggtttttttgttgtttttttgtttttgtttttgttttgcgggggtggtggggtttgagacggagtcttgctctgttgcctaggctggagtgcagtggcgcgatcttggccccctgcaacctccgcctcccgggttcgagcaattctcctgcctcagcctcccgagtagctgggattacaggcgtgtgtcaccacgcctggctaatttttttgtatttttagtagagacggggtttcaccatattggccaggctggtctcaaactcctgaccttgtgatccacccacctccgcctcccaaagtgctggaattacaggcatgagccaccgcgcccggcccaatcatgtgtttttgttgaaatgatcctaccagtgattagtggctattgagagttttacagggttatacattgttaagggaccaagaatcaagtacaaaaaattaaaaaggaactgtaaaatcccttggtcattcataaataaatatctaaattaggaatactaattaattgaattttcactcatgagtatgttctgaatatttaatatttatttctattattttcatatgttaagatattccattaaatctaacttaaaagaattgtatgtataaattggcattaggatacaaatgtaaatgtttttaatgaaattttgcaactttttaatattttaacatagttttctatttgtctttatttcaagtaccagaattacaaaatatctaagtaatatatttttgttgtcgttttagggcttaagggttaattcacccagagtatattaatataataaaaagatcactaaatgt

SEQ ID NO: 58544 - DNA, 3994 bp, Homo sapiens
cagagctcggtacccgttcgctcactgtgtggagaggaccattcccgttttgctcaccagaactggagattcttctgcccgcctccgcgtcacagctgcaaattttattcaggaaatggccttgtttaaagaagttaagtctctccaaattattccatcctacctggtgcagccattgaaagcaaactcttcagttcacctggcaatgagtcagatgggcctcctggcccggctgctgaaagacctgggcactggcagctcgggcttcaccattgacaacgtgatgaagttttcagtgagtgccctggagcatagagtgtatgaggtccgcgagacggcggttcgaattattttggacatgtacagacagcaccaggcttccatcctggagtaccttcctccagacgacagcaacacacgcaggaacattctctacaaaacaatttttgagggatttgctaaaatagatggcagagctacagatgctgagatgagggcacggagaaaagcggctacagaagaagcagaaaaacaaaagaaagaagaaataaaagctttacaagggcagctggcagcactgaaagaaattcaggctgaagttcaggaaaaagaaagtgatgctgtgaagccaaagaatcaggacattcaaggagggaaagcagcccctgctgaagctctgggaatcccggatgagcactatctagataatttgtgtattttttgtggggaaaggagtgaatccttcacagaggaaggtctggatctccactactggaagcactgtctcatgctgacaagatgtgaccactgcaaacaggtggtcgagatatccagtctgacggagcacttgctgacggaatgtgacaaaaaagacgggtttggaaagtgttaccgttgcagtgaggctgttttcaaggaagagctgcccagacacataaaacacaaggattgcaaccctgccaaaccggagaagctggcaaaccggtgtcccctgtgtcatgagaacttcagccctggagaagaggcatggaaagctcacctgatgggcccagccggctgcacgatgaacctgcgcaagacacacattctgcagaaggccccggcactgcagccagggaaaagctcagctgtggccgcatcaggccccttggggtcaaaggccggaagcaagatccccaccccgaagggcggactgagcaagagctccagcaggacgtacgccaagcgctgacgcggcgctcgggctccttggtctctgtgagggatggagcgggtctcctgattctacaccatctctccagaactctctggccttggtggccccatgctctggctgctgtccccagctccccgccgtgcacgcctcttacgcgtctgtgccgtcagctctcgtgcaaacgatatggatgcagctaaccaaagatcctgcgtgcagtgccaggacctggccgcactgtacattaagccttcagggctgtctcaggccttccttagaatcagagaaggaagcgtcctgtttggagagagccagagagcaccgccagggaggcgctcgcgcaaggccacggtcagcacaggcacggtcccgctttccttagtgcttggagcaatttccataaaacattcaccagaaaccttttgcacatcggtctctgccacacgcagtagaatttccgcagggctgtggctcggccagcagcggttccaggagagtggcggtgcgcacgggcctccagccgtgccttccccctgcaggccccgtctgctgggcctgctgcccagtgcactcagccccaggtagcagaactcacgttcccactatagcaagaaataaaggcaaaagagaacatcttttttttaatcgtagtttttttgagaattggtcccacctcagccgcaccttgctggatgcttctccagtagtgctgcccctgtgacaggcatcagctccctgctggaactgaggtagacacaggtgtgggcccttcccgtgcctttgctcagaggcgcttcactttctccacactttcgaattcctaaagacatgtggaggaagtcactgttaaatgaatttccacctgatcaccctgtgttcacagcaggcagaagcccactggtatgggcctcccgccccttccacatccatgttgtgattggatccataagtttactttcttcaaagagttgataggatgtttaaaacatcaacacattgcttaaaatgatgaaaccaaccctcaaaaaacagtctcctaaccagccatcccctcctgtgggagtgagctgggggttttgtccatagctttggttgggcctgtgtcacatccaggcagccatgtggagggagtcagggtctgtctggaagcatccaccctctcgctgccccagcctgtgctcccaggggcctaggctaccatggactgaagggcagtcccctcccacctggtgcccagggcttctgcttgcctcgctgatgttgcatgggcagacttcaaaaaggatagttagaaaggtttgggttgatggagtttgcattaatgcaattagtgtataaatatgttttaattgccaaccgtgtgaaacaacaaaatatctaaaaactaatcccgatttgaacaatgtactccctggcctggatacattaataaccataaatttgcatgaattaatctccacgtttggtaaactaatacctctggttgactgagaatactgagtaagatataagacctaccaggaacctttaagaatatgctctgctcggtgttgtttgtctgcttgtttgcgacagagcgagactccgtctcgaaaaaaaaaaaaaagtataaggagagaaataactttaaagtttattagacaaaacagagtatagatgccaagatgtctgtaaaatgattttttctggttttaaagagatgttggccattattttctaatccatttttaaaatacagacaaaacacttctttaaacagaacaagaatgagaaaagttaaccaaggaattattcttttctcaccaatcaacacttttaagaaatatatatatatatacacacacatatacacatgccttctatatattgtaacttaaagaaaatacttataaaaagacttcatttttagtgattgacaagcaaacgggttcatttaaaacaggttcctcttttgttagttacagggggtttttttgttgtttttttgtttttgtttttgttttgcgggggtggtggggtttgagacggagtcttgctctgttgcctaggctggagtgcagtggcgcgatcttggccccctgcaacctccgcctcccgggttcgagcaattctcctgcctcagcctcccgagtagctgggattacaggcgtgtgtcaccacgcctggctaatttttttgtatttttagtagagacggggtttcaccatattggccaggctggtctcaaactcctgaccttgtgatccacccacctccgcctcccaaagtgctggaattacaggcatgagccaccgcgcccggcccaatcatgtgtttttgttgaaatgatcctaccagtgattagtggctattgagagttttacagggttatacattgttaagggaccaagaatcaagtacaaaaaattaaaaaggaactgtaaaatcccttggtcattcataaataaatatctaaattaggaatactaattaattgaattttcactcatgagtatgttctgaatatttaatatttatttctattattttcatatgttaagatattccattaaatctaacttaaaagaattgtatgtataaattggcattaggatacaaatgtaaatgtttttaatgaaattttgcaactttttaatattttaacatagttttctatttgtctttatttcaagtaccagaattacaaaatatctaagtaatatatttttgttgtcgttttagggcttaagggttaattcacccagagtatattaatataataaaaagatcactaaatgt

SEQ ID NO: 58545 - DNA, 3923 bp, Homo sapiens
cagactgagatctctgcgctcgcgtcacactcaatttatcagaaatggccttgtttaaagaagttaagtctctccaaattattccatcctacctggtgcagccattgaaagcaaactcttcagttcacctggcaatgagtcagatgggcctcctggcccggctgctgaaagacctgggcactggcagctcgggcttcaccattgacaacgtgatgaagttttcagtgagtgccctggagcatagagtgtatgaggtccgcgagacggcggttcgaattattttggacatgtacagacagcaccaggcttccatcctggagtaccttcctccagacgacagcaacacacgcaggaacattctctacaaaacaatttttgagggatttgctaaaatagatggcagagctacagatgctgagatgagggcacggagaaaagcggctacagaagaagcagaaaaacaaaagaaagaagaaataaaagctttacaagggcagctggcagcactgaaagaaattcaggctgaagttcaggaaaaagaaagtgatgctgtgaagccaaagaatcaggacattcaaggagggaaagcagcccctgctgaagctctgggaatcccggatgagcactatctagataatttgtgtattttttgtggggaaaggagtgaatccttcacagaggaaggtctggatctccactactggaagcactgtctcatgctgacaagatgtgaccactgcaaacaggtggtcgagatatccagtctgacggagcacttgctgacggaatgtgacaaaaaagacgggtttggaaagtgttaccgttgcagtgaggctgttttcaaggaagagctgcccagacacataaaacacaaggattgcaaccctgccaaaccggagaagctggcaaaccggtgtcccctgtgtcatgagaacttcagccctggagaagaggcatggaaagctcacctgatgggcccagccggctgcacgatgaacctgcgcaagacacacattctgcagaaggccccggcactgcagccagggaaaagctcagctgtggccgcatcaggccccttggggtcaaaggccggaagcaagatccccaccccgaagggcggactgagcaagagctccagcaggacgtacgccaagcgctgacgcggcgctcgggctccttggtctctgtgagggatggagcgggtctcctgattctacaccatctctccagaactctctggccttggtggccccatgctctggctgctgtccccagctccccgccgtgcacgcctcttacgcgtctgtgccgtcagctctcgtgcaaacgatatggatgcagctaaccaaagatcctgcgtgcagtgccaggacctggccgcactgtacattaagccttcagggctgtctcaggccttccttagaatcagagaaggaagcgtcctgtttggagagagccagagagcaccgccagggaggcgctcgcgcaaggccacggtcagcacaggcacggtcccgctttccttagtgcttggagcaatttccataaaacattcaccagaaaccttttgcacatcggtctctgccacacgcagtagaatttccgcagggctgtggctcggccagcagcggttccaggagagtggcggtgcgcacgggcctccagccgtgccttccccctgcaggccccgtctgctgggcctgctgcccagtgcactcagccccaggtagcagaactcacgttcccactatagcaagaaataaaggcaaaagagaacatcttttttttaatcgtagtttttttgagaattggtcccacctcagccgcaccttgctggatgcttctccagtagtgctgcccctgtgacaggcatcagctccctgctggaactgaggtagacacaggtgtgggcccttcccgtgcctttgctcagaggcgcttcactttctccacactttcgaattcctaaagacatgtggaggaagtcactgttaaatgaatttccacctgatcaccctgtgttcacagcaggcagaagcccactggtatgggcctcccgccccttccacatccatgttgtgattggatccataagtttactttcttcaaagagttgataggatgtttaaaacatcaacacattgcttaaaatgatgaaaccaaccctcaaaaaacagtctcctaaccagccatcccctcctgtgggagtgagctgggggttttgtccatagctttggttgggcctgtgtcacatccaggcagccatgtggagggagtcagggtctgtctggaagcatccaccctctcgctgccccagcctgtgctcccaggggcctaggctaccatggactgaagggcagtcccctcccacctggtgcccagggcttctgcttgcctcgctgatgttgcatgggcagacttcaaaaaggatagttagaaaggtttgggttgatggagtttgcattaatgcaattagtgtataaatatgttttaattgccaaccgtgtgaaacaacaaaatatctaaaaactaatcccgatttgaacaatgtactccctggcctggatacattaataaccataaatttgcatgaattaatctccacgtttggtaaactaatacctctggttgactgagaatactgagtaagatataagacctaccaggaacctttaagaatatgctctgctcggtgttgtttgtctgcttgtttgcgacagagcgagactccgtctcgaaaaaaaaaaaaaagtataaggagagaaataactttaaagtttattagacaaaacagagtatagatgccaagatgtctgtaaaatgattttttctggttttaaagagatgttggccattattttctaatccatttttaaaatacagacaaaacacttctttaaacagaacaagaatgagaaaagttaaccaaggaattattcttttctcaccaatcaacacttttaagaaatatatatatatatacacacacatatacacatgccttctatatattgtaacttaaagaaaatacttataaaaagacttcatttttagtgattgacaagcaaacgggttcatttaaaacaggttcctcttttgttagttacagggggtttttttgttgtttttttgtttttgtttttgttttgcgggggtggtggggtttgagacggagtcttgctctgttgcctaggctggagtgcagtggcgcgatcttggccccctgcaacctccgcctcccgggttcgagcaattctcctgcctcagcctcccgagtagctgggattacaggcgtgtgtcaccacgcctggctaatttttttgtatttttagtagagacggggtttcaccatattggccaggctggtctcaaactcctgaccttgtgatccacccacctccgcctcccaaagtgctggaattacaggcatgagccaccgcgcccggcccaatcatgtgtttttgttgaaatgatcctaccagtgattagtggctattgagagttttacagggttatacattgttaagggaccaagaatcaagtacaaaaaattaaaaaggaactgtaaaatcccttggtcattcataaataaatatctaaattaggaatactaattaattgaattttcactcatgagtatgttctgaatatttaatatttatttctattattttcatatgttaagatattccattaaatctaacttaaaagaattgtatgtataaattggcattaggatacaaatgtaaatgtttttaatgaaattttgcaactttttaatattttaacatagttttctatttgtctttatttcaagtaccagaattacaaaatatctaagtaatatatttttgttgtcgttttagggcttaagggttaattcacccagagtatattaatataataaaaagatcactaaatgt

SEQ ID NO: 58546 - DNA, 3873 bp, Homo sapiens
agaagttactcagttactcggtacgtaaataagtaaatatgtcatttgaaggagccacgtgtatgggaagccccggcgtcctggctaagaaagaacacaggttcccgcattcagatcccggctgctccactttctgccagtgagacccttaggttcccaggctgcaaacggaataacgatagccgtgaggacacagcgggtttatctatcaatagacaccaatgaaatcaatggaaaagacttattctaacttgttattagtcttagtgaatattataatttataagaaatatagttgatatgccataatttgtctcccagtttctaagattaccctaacaagctgttctaatggaaaaataattttcttaccaggcacggagaaaagcggctacagaagaagcagaaaaacaaaagaaagaagaaataaaagctttacaagggcagctggcagcactgaaagaaattcaggctgaagttcaggaaaaagaaagtgatgctgtgaagccaaagaatcaggacattcaaggagggaaagcagcccctgctgaagctctgggaatcccggatgagcactatctagataatttgtgtattttttgtggggaaaggagtgaatccttcacagaggaaggtctggatctccactactggaagcactgtctcatgctgacaagatgtgaccactgcaaacaggtggtcgagatatccagtctgacggagcacttgctgacggaatgtgacaaaaaagacgggtttggaaagtgttaccgttgcagtgaggctgttttcaaggaagagctgcccagacacataaaacacaaggattgcaaccctgccaaaccggagaagctggcaaaccggtgtcccctgtgtcatgagaacttcagccctggagaagaggcatggaaagctcacctgatgggcccagccggctgcacgatgaacctgcgcaagacacacattctgcagaaggccccggcactgcagccagggaaaagctcagctgtggccgcatcaggccccttggggtcaaaggccggaagcaagatccccaccccgaagggcggactgagcaagagctccagcaggacgtacgccaagcgctgacgcggcgctcgggctccttggtctctgtgagggatggagcgggtctcctgattctacaccatctctccagaactctctggccttggtggccccatgctctggctgctgtccccagctccccgccgtgcacgcctcttacgcgtctgtgccgtcagctctcgtgcaaacgatatggatgcagctaaccaaagatcctgcgtgcagtgccaggacctggccgcactgtacattaagccttcagggctgtctcaggccttccttagaatcagagaaggaagcgtcctgtttggagagagccagagagcaccgccagggaggcgctcgcgcaaggccacggtcagcacaggcacggtcccgctttccttagtgcttggagcaatttccataaaacattcaccagaaaccttttgcacatcggtctctgccacacgcagtagaatttccgcagggctgtggctcggccagcagcggttccaggagagtggcggtgcgcacgggcctccagccgtgccttccccctgcaggccccgtctgctgggcctgctgcccagtgcactcagccccaggtagcagaactcacgttcccactatagcaagaaataaaggcaaaagagaacatcttttttttaatcgtagtttttttgagaattggtcccacctcagccgcaccttgctggatgcttctccagtagtgctgcccctgtgacaggcatcagctccctgctggaactgaggtagacacaggtgtgggcccttcccgtgcctttgctcagaggcgcttcactttctccacactttcgaattcctaaagacatgtggaggaagtcactgttaaatgaatttccacctgatcaccctgtgttcacagcaggcagaagcccactggtatgggcctcccgccccttccacatccatgttgtgattggatccataagtttactttcttcaaagagttgataggatgtttaaaacatcaacacattgcttaaaatgatgaaaccaaccctcaaaaaacagtctcctaaccagccatcccctcctgtgggagtgagctgggggttttgtccatagctttggttgggcctgtgtcacatccaggcagccatgtggagggagtcagggtctgtctggaagcatccaccctctcgctgccccagcctgtgctcccaggggcctaggctaccatggactgaagggcagtcccctcccacctggtgcccagggcttctgcttgcctcgctgatgttgcatgggcagacttcaaaaaggatagttagaaaggtttgggttgatggagtttgcattaatgcaattagtgtataaatatgttttaattgccaaccgtgtgaaacaacaaaatatctaaaaactaatcccgatttgaacaatgtactccctggcctggatacattaataaccataaatttgcatgaattaatctccacgtttggtaaactaatacctctggttgactgagaatactgagtaagatataagacctaccaggaacctttaagaatatgctctgctcggtgttgtttgtctgcttgtttgcgacagagcgagactccgtctcgaaaaaaaaaaaaaagtataaggagagaaataactttaaagtttattagacaaaacagagtatagatgccaagatgtctgtaaaatgattttttctggttttaaagagatgttggccattattttctaatccatttttaaaatacagacaaaacacttctttaaacagaacaagaatgagaaaagttaaccaaggaattattcttttctcaccaatcaacacttttaagaaatatatatatatatacacacacatatacacatgccttctatatattgtaacttaaagaaaatacttataaaaagacttcatttttagtgattgacaagcaaacgggttcatttaaaacaggttcctcttttgttagttacagggggtttttttgttgtttttttgtttttgtttttgttttgcgggggtggtggggtttgagacggagtcttgctctgttgcctaggctggagtgcagtggcgcgatcttggccccctgcaacctccgcctcccgggttcgagcaattctcctgcctcagcctcccgagtagctgggattacaggcgtgtgtcaccacgcctggctaatttttttgtatttttagtagagacggggtttcaccatattggccaggctggtctcaaactcctgaccttgtgatccacccacctccgcctcccaaagtgctggaattacaggcatgagccaccgcgcccggcccaatcatgtgtttttgttgaaatgatcctaccagtgattagtggctattgagagttttacagggttatacattgttaagggaccaagaatcaagtacaaaaaattaaaaaggaactgtaaaatcccttggtcattcataaataaatatctaaattaggaatactaattaattgaattttcactcatgagtatgttctgaatatttaatatttatttctattattttcatatgttaagatattccattaaatctaacttaaaagaattgtatgtataaattggcattaggatacaaatgtaaatgtttttaatgaaattttgcaactttttaatattttaacatagttttctatttgtctttatttcaagtaccagaattacaaaatatctaagtaatatatttttgttgtcgttttagggcttaagggttaattcacccagagtatattaatataataaaaagatcactaaatgt

SEQ ID NO: 58547 - DNA, 3842 bp, Homo sapiens
caccactcaccttggcctcccaaagtgctgggattacgggcatgagccaccttgccagccagtagaaattctaaaacaaaacccagaaatgtgctttcgtgatgaaaacatatcttcaacaggctctcactcactcacactgcagccctttgcccctgacctcactgtttctgtgtcttaggaaaaagaaagtgatgctgtgaagccaaagaatcagggtatgtaaagaattggggtgcacaaagaactggggtgtgtaaagaatcggggtgtgtaaatgcatgtcatggaagctccatgtgggaacggcttctgtccattcagcaagtatcactgcacgcctgctgcacctcagccatctcccagctgaatggaaaacatgctacctttttacttgtataatcgttttagagctcacatcaaactgcttactaaaattttgaaaataatttctataaaaagttatttaaattgttttaatctcttcagacattcaaggagggaaagcagcccctgctgaagctctgggaatcccggatgagcactatctagataatttgtgtattttttgtggggaaaggagtgaatccttcacagaggaaggtctggatctccactactggaagcactgtctcatgctgacaagatgtgaccactgcaaacaggtggtcgagatatccagtctgacggagcacttgctgacggaatgtgacaaaaaagacgggtttggaaagtgttaccgttgcagtgaggctgttttcaaggaagagctgcccagacacataaaacacaaggattgcaaccctgccaaaccggagaagctggcaaaccggtgtcccctgtgtcatgagaacttcagccctggagaagaggcatggaaagctcacctgatgggcccagccggctgcacgatgaacctgcgcaagacacacattctgcagaaggccccggcactgcagccagggaaaagctcagctgtggccgcatcaggccccttggggtcaaaggccggaagcaagatccccaccccgaagggcggactgagcaagagctccagcaggacgtacgccaagcgctgacgcggcgctcgggctccttggtctctgtgagggatggagcgggtctcctgattctacaccatctctccagaactctctggccttggtggccccatgctctggctgctgtccccagctccccgccgtgcacgcctcttacgcgtctgtgccgtcagctctcgtgcaaacgatatggatgcagctaaccaaagatcctgcgtgcagtgccaggacctggccgcactgtacattaagccttcagggctgtctcaggccttccttagaatcagagaaggaagcgtcctgtttggagagagccagagagcaccgccagggaggcgctcgcgcaaggccacggtcagcacaggcacggtcccgctttccttagtgcttggagcaatttccataaaacattcaccagaaaccttttgcacatcggtctctgccacacgcagtagaatttccgcagggctgtggctcggccagcagcggttccaggagagtggcggtgcgcacgggcctccagccgtgccttccccctgcaggccccgtctgctgggcctgctgcccagtgcactcagccccaggtagcagaactcacgttcccactatagcaagaaataaaggcaaaagagaacatcttttttttaatcgtagtttttttgagaattggtcccacctcagccgcaccttgctggatgcttctccagtagtgctgcccctgtgacaggcatcagctccctgctggaactgaggtagacacaggtgtgggcccttcccgtgcctttgctcagaggcgcttcactttctccacactttcgaattcctaaagacatgtggaggaagtcactgttaaatgaatttccacctgatcaccctgtgttcacagcaggcagaagcccactggtatgggcctcccgccccttccacatccatgttgtgattggatccataagtttactttcttcaaagagttgataggatgtttaaaacatcaacacattgcttaaaatgatgaaaccaaccctcaaaaaacagtctcctaaccagccatcccctcctgtgggagtgagctgggggttttgtccatagctttggttgggcctgtgtcacatccaggcagccatgtggagggagtcagggtctgtctggaagcatccaccctctcgctgccccagcctgtgctcccaggggcctaggctaccatggactgaagggcagtcccctcccacctggtgcccagggcttctgcttgcctcgctgatgttgcatgggcagacttcaaaaaggatagttagaaaggtttgggttgatggagtttgcattaatgcaattagtgtataaatatgttttaattgccaaccgtgtgaaacaacaaaatatctaaaaactaatcccgatttgaacaatgtactccctggcctggatacattaataaccataaatttgcatgaattaatctccacgtttggtaaactaatacctctggttgactgagaatactgagtaagatataagacctaccaggaacctttaagaatatgctctgctcggtgttgtttgtctgcttgtttgcgacagagcgagactccgtctcgaaaaaaaaaaaaaagtataaggagagaaataactttaaagtttattagacaaaacagagtatagatgccaagatgtctgtaaaatgattttttctggttttaaagagatgttggccattattttctaatccatttttaaaatacagacaaaacacttctttaaacagaacaagaatgagaaaagttaaccaaggaattattcttttctcaccaatcaacacttttaagaaatatatatatatatacacacacatatacacatgccttctatatattgtaacttaaagaaaatacttataaaaagacttcatttttagtgattgacaagcaaacgggttcatttaaaacaggttcctcttttgttagttacagggggtttttttgttgtttttttgtttttgtttttgttttgcgggggtggtggggtttgagacggagtcttgctctgttgcctaggctggagtgcagtggcgcgatcttggccccctgcaacctccgcctcccgggttcgagcaattctcctgcctcagcctcccgagtagctgggattacaggcgtgtgtcaccacgcctggctaatttttttgtatttttagtagagacggggtttcaccatattggccaggctggtctcaaactcctgaccttgtgatccacccacctccgcctcccaaagtgctggaattacaggcatgagccaccgcgcccggcccaatcatgtgtttttgttgaaatgatcctaccagtgattagtggctattgagagttttacagggttatacattgttaagggaccaagaatcaagtacaaaaaattaaaaaggaactgtaaaatcccttggtcattcataaataaatatctaaattaggaatactaattaattgaattttcactcatgagtatgttctgaatatttaatatttatttctattattttcatatgttaagatattccattaaatctaacttaaaagaattgtatgtataaattggcattaggatacaaatgtaaatgtttttaatgaaattttgcaactttttaatattttaacatagttttctatttgtctttatttcaagtaccagaattacaaaatatctaagtaatatatttttgttgtcgttttagggcttaagggttaattcacccagagtatattaatataataaaaagatcactaaatgt

SEQ ID NO: 58548 - DNA, 3058 bp, Homo sapiens
agcttacacagcgagtccttttgggtctcaggtagcgtgccaggtccgtctcgcctgattaacactctgtgtgcctcctctgctgcaggcatggaaagctcacctgatgggcccagccggctgcacgatgaacctgcgcaagacacacattctgcagaaggccccggcactgcagccagggaaaagctcagctgtggccgcatcaggccccttggggtcaaaggccggaagcaagatccccaccccgaagggcggactgagcaagagctccagcaggacgtacgccaagcgctgacgcggcgctcgggctccttggtctctgtgagggatggagcgggtctcctgattctacaccatctctccagaactctctggccttggtggccccatgctctggctgctgtccccagctccccgccgtgcacgcctcttacgcgtctgtgccgtcagctctcgtgcaaacgatatggatgcagctaaccaaagatcctgcgtgcagtgccaggacctggccgcactgtacattaagccttcagggctgtctcaggccttccttagaatcagagaaggaagcgtcctgtttggagagagccagagagcaccgccagggaggcgctcgcgcaaggccacggtcagcacaggcacggtcccgctttccttagtgcttggagcaatttccataaaacattcaccagaaaccttttgcacatcggtctctgccacacgcagtagaatttccgcagggctgtggctcggccagcagcggttccaggagagtggcggtgcgcacgggcctccagccgtgccttccccctgcaggccccgtctgctgggcctgctgcccagtgcactcagccccaggtagcagaactcacgttcccactatagcaagaaataaaggcaaaagagaacatcttttttttaatcgtagtttttttgagaattggtcccacctcagccgcaccttgctggatgcttctccagtagtgctgcccctgtgacaggcatcagctccctgctggaactgaggtagacacaggtgtgggcccttcccgtgcctttgctcagaggcgcttcactttctccacactttcgaattcctaaagacatgtggaggaagtcactgttaaatgaatttccacctgatcaccctgtgttcacagcaggcagaagcccactggtatgggcctcccgccccttccacatccatgttgtgattggatccataagtttactttcttcaaagagttgataggatgtttaaaacatcaacacattgcttaaaatgatgaaaccaaccctcaaaaaacagtctcctaaccagccatcccctcctgtgggagtgagctgggggttttgtccatagctttggttgggcctgtgtcacatccaggcagccatgtggagggagtcagggtctgtctggaagcatccaccctctcgctgccccagcctgtgctcccaggggcctaggctaccatggactgaagggcagtcccctcccacctggtgcccagggcttctgcttgcctcgctgatgttgcatgggcagacttcaaaaaggatagttagaaaggtttgggttgatggagtttgcattaatgcaattagtgtataaatatgttttaattgccaaccgtgtgaaacaacaaaatatctaaaaactaatcccgatttgaacaatgtactccctggcctggatacattaataaccataaatttgcatgaattaatctccacgtttggtaaactaatacctctggttgactgagaatactgagtaagatataagacctaccaggaacctttaagaatatgctctgctcggtgttgtttgtctgcttgtttgcgacagagcgagactccgtctcgaaaaaaaaaaaaaagtataaggagagaaataactttaaagtttattagacaaaacagagtatagatgccaagatgtctgtaaaatgattttttctggttttaaagagatgttggccattattttctaatccatttttaaaatacagacaaaacacttctttaaacagaacaagaatgagaaaagttaaccaaggaattattcttttctcaccaatcaacacttttaagaaatatatatatatatacacacacatatacacatgccttctatatattgtaacttaaagaaaatacttataaaaagacttcatttttagtgattgacaagcaaacgggttcatttaaaacaggttcctcttttgttagttacagggggtttttttgttgtttttttgtttttgtttttgttttgcgggggtggtggggtttgagacggagtcttgctctgttgcctaggctggagtgcagtggcgcgatcttggccccctgcaacctccgcctcccgggttcgagcaattctcctgcctcagcctcccgagtagctgggattacaggcgtgtgtcaccacgcctggctaatttttttgtatttttagtagagacggggtttcaccatattggccaggctggtctcaaactcctgaccttgtgatccacccacctccgcctcccaaagtgctggaattacaggcatgagccaccgcgcccggcccaatcatgtgtttttgttgaaatgatcctaccagtgattagtggctattgagagttttacagggttatacattgttaagggaccaagaatcaagtacaaaaaattaaaaaggaactgtaaaatcccttggtcattcataaataaatatctaaattaggaatactaattaattgaattttcactcatgagtatgttctgaatatttaatatttatttctattattttcatatgttaagatattccattaaatctaacttaaaagaattgtatgtataaattggcattaggatacaaatgtaaatgtttttaatgaaattttgcaactttttaatattttaacatagttttctatttgtctttatttcaagtaccagaattacaaaatatctaagtaatatatttttgttgtcgttttagggcttaagggttaattcacccagagtatattaatataataaaaagatcactaaatgt

SEQ ID NO: 58549 - DNA, 2409 bp, Homo sapiens
ggcacgagggttgtcatgagagtggaggctgcggccggggctatgggcagaggcggccgggtctgcttcttccctgtcactgccgcagcagcttggggtgcaaggcggcctggggcggcggaaggggcgccccccgagttccgtctgaggaagcggcggctgccgaggaagtccacgagagccgggtcccgcacgcccctggggtccgggtgctgaggcgccgcctggccgcctccccgggccgcggcaccgctccgacctagccgccctctccaccggggccgcggcagcgccagtcggggcccttccctctaagcagcccaaacgtgcagaatgccccacaagattggatttgtagtcgtcagctcatctggacacgaagacggcttcagtgcccgggagctcatgatccacgcgccaactgtcagtgggtggcggtcacctagattttgccagtttccacaagaaattgtccttcaaatggtggagagatgtcgaataaggaaactgcagttacttgctcaccagtatatgatttcaagtaaaattgagttctacattagtgaaagcttgcctgaatattttgcaccctatcaagcagagcggtttcgaagacttggctacgtgtctctctgtgataatgaaaagacaggttgcaaagcccgggaactaaaatcagtttatgtggatgcagtaggacaatttcttaaactgatttttcaccaaaaccatgtcaacaaatacaacatatataatcaggttgctttggttgccataaatatcattggagaccctgcagatttcagtgatgaaagcaatactgcctctcgagagaagttgattgaccactaccttgggcacaacagcgaggaccctgctctagaaggaacatacgccaggaaatctgactatatctctccgctagatgacttagcttttgatatgtaccaagatccagaagttgcacagatcatacgaaaattagatgaaagaaaacgggaagctgtccaaaaggaacgctatgattatgccaagaaactaaaacaagccattgctgatttgcaaaaggttggtgagcgccttgggaggtatgaggtagagaaacgctgtgccgtggagaaggaagactacgatctcgccaaggagaagaagcagcagatggagcagtatcgtgccgaggtgtacgagcagctggagctgcacagcctcctggatgccgagctgatgcgaagaccttttgatttgcccctccagcccctcgctcgttctggcagtccttgccaccaaaagccaatgccctcactaccacaactggaagaaagaggaacagaaaaccagtttgcagaacctttccttcaggaaaagccttcatcatattctctaactatttctcctcagcattctgcagtagacccgttactccctgccacagatcctcatccaaagatcaatgcagagtccctgccctacgatgagcggcctcttccagctattcgtaagcattatggggaggcagtggtggagccggaaatgagtaatgcagacatcagcgatgctcggaggggaggcatgttaggggagccagagcccttaaccgagaaggccttgagagaagccagctctgccatcgatgtgttgggagaaaccttggttgctgaggcctattgtaagacgtggtcctaccgagaggatgcactgcttgccttgtctaagaagttaatggaaatgcctgttggaaccccaaaagaagatttaaagaacacactgagagcatccgtctttctcgttagaagagccataaaggacattgtgacctccgtttttcaggcttctttgaaattgttgaaaatgatcattacacaatatattcctaaacataaactgagtaaacttgaaacagctcactgtgtggagaggaccattcccgttttgctcaccagaactggagattcttctgcccgcctccgcgtcacagctgcaaattttattcaggaaatggccttgtttaaagaagttaagtctctccaaattattccatcctacctggtgcagccattgaaagcaaactcttcagttcacctggcaatgagtcagatgggcctcctggcccggctgctgaaagacctgggcactggcagctcgggcttcaccattgacaacgtgatgaagttttcagtgagtgccctggagcatagagtgtatgaggtccgcgagacggcggttcgaattattttggacatgtacagacagcaccaggcttccatcctggagtaccttcctccagacgacagcaacacacgcaggaacattctctacaaaacaatttttgagggatttgctaaaatagatggcagagctacagatgctgagatgagggtgagttaactttggtgaagttgtgatgtcatc

SEQ ID NO: 58550 - DNA, 1435 bp, Homo sapiens
ggcacgagggttgtcatgagagtggaggctgcggccggggctatgggcagaggcggccgggtctgcttcttccctgtcactgccgcagcagcttggggtgcaaggcggcctggggcggcggaaggggcgccccccgagttccgtctgaggaagcggcggctgccgaggaagtccacgagagccgggtcccgcacgcccctggggtccgggtgctgaggcgccgcctggccgcctccccgggccgcggcaccgctccgacctagccgccctctccaccggggccgcggcagcgccagtcggggcccttccctctaagcagcccaaacgtgcagaatgccccacaagattggatttgtagtcgtcagctcatctggacacgaagacggcttcagtgcccgggagctcatgatccacgcgccaactgtcagtgggtggcggtcacctagattttgccagtttccacaagaaattgtccttcaaatggtggagagatgtcgaataaggaaactgcagttacttgctcaccagtatatgatttcaagtaaaattgagttctacattagtgaaagcttgcctgaatattttgcaccctatcaagcagagcggtttcgaagacttggctacgtgtctctctgtgataatgaaaagacaggttgcaaagcccgggaactaaaatcagtttatgtggatgcagtaggacaatttcttaaactgatttttcaccaaaaccatgtcaacaaatacaacatatataatcaggttgctttggttgccataaatatcattggagaccctgcagatttcagtgatgaaagcaatactgcctctcgagagaagttgattgaccactaccttgggcacaacagcgaggaccctgctctagaaggaacatacgccaggaaatctgactatatctctccgctagatgacttagcttttgatatgtaccaagatccagaagttgcacagatcatacgaaaattagatgaaagaaaacgggaagctgtccaaaaggaacgctatgattatgccaagaaactaaaacaagccattgctgatttgcaaaaggttggtgagcgccttgggaggtatgaggtagagaaacgctgtgccgtggagaaggaagactacgatctcgccaaggagaagaagcagcagatggagcagtatcgtgccgaggtgtacgagcagctggagctgcacagcctcctggatgccgagctgcattctgcagtagacccgttactccctgccacagatcctcatccaaagatcaatgccccggcactgcagccaggtgagggacagcgccgctgagcaggtgtagtctgcatccctccattttgacttattcaaaagagcatccccgtccagggcaacatggcaagaccccatccctttaaaagcaaaataaagcatccaagcctgacttcat

SEQ ID NO: 58551 - DNA, 357 bp, Homo sapiens
gctgacggaatgtgacaaaaaagacgggtttggaaagtgttaccgttgcagtgaggctgttttcaaggaagagctgcccagacacataaaacacaaggattgcaaccgtgagtgccccttcccaggctcccgtgccctcgggtcaccaggggtcctcttggaggaagtgccactgctcttgagcctgtgcaagggcttggtgaattaaagggcacctgcgggcaggccagcagcatgtcttgtcgcctgtcattcagggagcgactgagtctttttaaaatcatttcagctgccaaaccggagaagctggcaaaccggtgtcccctgtgtcatgagaacttcagccctggagaagag

SEQ ID NO: 58552 - DNA, 2525 bp, Homo sapiens
cgcgtcagggagttggattctatcctgcaagggcacggggacccacaacgacggctgtccctaaagaaccgttgcgactggtaactgaagtggaagagagtccagatttcttgtgtgtggtcaaggagacggacaaactttttgtcttcagacgagggagcgttttgtaggctctccaggggttgagatgattcctgcttctgcgaaggctccccataaacagcctcataagcagagcatcagcataggcagaggaaccaggaagagagatgaagattcagggactgaagtgggagaaggcacagatgaatgggcccaatccaaagccacagttagaccccctgaccagctggagttgaccgatgcggagttaaaggaggagttcactcggattttgacagccaacaacccacacgcaccccagaacattgtcaggtacagcttcaaagaaggcacatataagcctattggctttgtgaaccaactggcagttcactacacccaggttgggaacctgatccccaaagactcagatgaaggacggcggcagcattaccgcgatgaattagtggcaggttctcaggagtctgtcaaggtgatttcagaaacaggaaacctcgaagaagacgaagagcccaaggagttagaaactgagcctgggagtcaaacagatgtgcctgcagctggggcagctgaaaaagtgactgaagaagaattgatgactcctaagcagcccaaggagagaaagctcactaaccagttcaacttcagtgagagggcctcacagacctacaacaaccctgtccgggatcgagaatgccagacggagcctcctcccaggacaaacttttcagccacagccaatcagtgggagatctatgatgcctatgtagaggaacttgagaagcaggaaaagaccaaagagaaggagaaggcaaagaccccagtggctaaaaaatcagggaagatggccatgaggaagctgacatctatggagtctcagactgatgatctcatcaaattgtcccaagctgctaagatcatggagcggatggtcaaccagaatacatatgatgacattgctcaagattttaagtactatgacgatgctgctgatgaataccgggaccaggtgggtaccctgctgccgctctggaagttccaaaatgacaaagccaagcgcctgtccgtcactgccctctgctggaatccaaagtacagggatctgtttgcagtgggatatggctcttatgacttcatgaagcagagccggggcatgctgctgctctacagcctgaagaaccccagcttccctgagtacatgttcagcagcaacagcggcgtcatgtgtctcgacatccacgtggaccacccctacctggtggcagtaggccactatgacggcaacgtggccatttacaacctcaagaagccccactcccagccctccttctgcagctcagccaagtctggcaagcactcagaccctgtgtggcaggtcaagtggcagaaggatgacatggaccaaaaccttaacttcttctctgtgtcatctgacggcaggattgtgtcttggactctcgtgaagagaaagctggttcacatagatgtcatcaagctgaaggtggaaggcagcaccacggaagttcctgaggggttgcagctgcacccagtgggttgtggcactgcctttgacttccacaaagagattgactacatgttcctagtgggcacagaggagggaaaaatctacaagtgctctaaatcctactccagccaattcctcgacacctatgacgcccacaacatgtcagtggacactgtgtcctggaacccataccacaccaaggtcttcatgtcctgcagctccgactggacagtgaagatctgggaccacaccatcaagaccccgatgttcatctatgacctgaactcagccgtgggtgatgtggcctgggcgccatactcttctactgtgttcgcagcagtcaccacagatgggaaggcccacatatttgacttagccatcaacaagtatgaggccatctgcaaccagcctgtggcggccaaaaagaacaggctcacccacgtgcagttcaatctcatccaccccatcatcattgtgggcgatgaccgtgggcacatcatcagcctcaagctctcacccaatttgcgcaagatgccaaaggaaaagaaggggcaggaggtgcagaagggtccagctgtggagattgcgaaactggacaaactgctgaacctggtgagggaagtgaaaatcaagacctgaggggctggcctcagtctctgtcccatcgcttgaatacagtactcctagggcttgaccctggtacccagcccagccttagcacccagcatgtgaccccactcctgatcaggtcccagcatcttcccttcttgttctgttccttaaggtcccagcaccttaccccaggacttggtcttcaaccaccattacccctctaactttgcacaaataaacctgtgtagaaacccaaaaaaaacct

SEQ ID NO: 58553 - DNA, 4958 bp, Homo sapiens
  misc_feature (459)..(459): n is a, c, g, or t
  misc_feature (933)..(933): n is a, c, g, or t
  misc_feature (4158)..(4158): n is a, c, g, or t
tttgatctggatctggagtgagtaggagtttgccaggaagaacagggcatcttagacatggaaaacgatgtagaaacacccaaaacaggagacaactggactcattggcatgatttgatatggaggggacacggacagctgactagaaataacgtggatctcctcttggtttaatctcctctgcaaggagagccattgagggggtttcagtggagtgaggaaaggggtgtcgtgaggtgccttgtttgtactcacactggttgttctgtgaaacaagggttggagaaggagttactggaggtaggagaccagttagagggatgttgtcataatacaggtgatggatgttggggcctgaacctgggcaggggctatgggtttggagagaagcgaatgaattaaaaagatagaagaaaaatatgagaaattatggaaacagatcagtcaaggattactcanttctggtttagacaagtgggaggatggggcatctatctaacttaaagaaagtggaaggcagagacaattttgtgggcaggagatgaagttgggttcagagaacccatgggggatctaggcagcttcattatagggagacttggctgtggatatgaaaatgggctgcattttagggatttaggaggcagaattaatggaactattaatcagcccttggcagctgaacccttgaaatttggctcctccaaacagagcctcctgaaatgctagggaaacacatgggaacaagggctgcgaacctgggattttatccatgtagacatggccggtgtattgtaatgtacctccaacaacaacgacagtaacaatggctaacacatagagcttactatgtgccaggcatttttctaagctctttgcatatattaactcaattcatatatcctcacaacagaactctgagataggtagtantattattcccactctaaaacagaggctcattgttttgcccaaggaggtacagacagtaagtggtggacctgggtttgccataaagcggcagtcccagggctgactctgcctgtgtgtgtttaagattttaagtactatgacgatgctgctgatgaataccgggaccaggtgggtaccctgctgccgctctggaagttccaaaatgacaaagccaagcgcctgtccgtcactgccctctgctggtaagtataggcattgcagcaaatgcagagcccctgagtgccctctacatcccaaacccccagtacccccttctgcacttaaccaccttgagtatgacatgtgacagtatagaaaaatatggaacttggattcttatgggatcacaagaccacccccaggactcccaagtggtgagggcctaagctggagaacagatgtctgtagtatatttaggcaccagtgccaatgggaaggcccttgtccacaggagggccatgttcatttcctatgccaatggattcatatttttttttgcaggaatccaaagtacagggatctgtttgcagtgggatatggctcttgtaagtgatctgactattcatttatttgctcatgtaaacagcaaacactaagtacctactctgtgcagaactctttgccagttgtaagaaatacaaagatgactgcccgcagggggctcacagtctaatggggaagacccacaatcctactggcaattagtgctgggtgaaggaatattctaagctgaatgtgtcaatggaaccttgaaggagttattctggtgaagaaagaggggaaaacacttctggcagagggacctgcatatgcaaaggcttggaggcatgaggaatatggcagaatatgaagctgctgggggggccagggtcagccctcaaagggcctggtaagccattccaaaaagcttggatcttctcctgaggggaaaccactgaaggaattcaaggacagggacatgaccagtgcagggaggaattgcaggcattgcaggcctgagactggaggcaaggaaaccagttaggagactgatgcgggcatcccaaggagagatggcaggaccttaaccacactgtggagtagggatggagacccccccttcctgcctcctcctcaggccttcctgaccgggtgggtgggggcatgggggatgggatcccctgaaccttcggagcccactgctatccagagtgtgcccgcccctgccagttacccacccaaggcaggaaggcagcacaatggaaactgtgtccaggcgatttgctttcccttcatgttacttggtcccagaagaagcccctagcgctgtgctggcctggacattcccccttcccaacgggagagggccctacacttcacagtagtctcgctccccagtgctaacagcttgttctctggctgggaggatcagcttctgcaaacacaaaaacctttccattctccaagctgctgctggctggcaggcatacaagctcccagtcactgcccctcagactgcctgtccacccattctttgaccagggtggggaggggcagtgggtgtttgtcattcctctcagggaggagaccttggagctactcccagtcttgtggtctgggccgcctttgaggatgccctaaatgcctgctttgtgtccccactcctgagggtgggctgctgccaagtgggaagtgccctccccctctggcagggaactagcacattcctccccctctgctgcagctactgggcctggaacagggcctgggggttgggttgggcaggccctcccaggagtgggtgtggacccccctgtgaggctactctcaacccaggctctctgcccaggtctgaagcaggggtgtaggggttgctcctcagaaggtgggaggggaaactgcttcagttttagcgctattctccccgcacccaggttcggaagcaggctcagctggtcggggtcatgtggaggctgtcgtgggggctggagggctgggcagccttgggcaggagcagtagagtaggtcacctcccaccagcagaagaccttgagcctgacaagcccagcaatgtcctttgggcaggcacttacctgagaacggtctctttgtccttccttgatgctgttagctacatccacgtgcctgagtggtacccgtcgtcagctacagtcctgggggtgggggtgtcactttccagtgacacctggggccagaagcctctctgagccttggtttcttcgttggtgacatggaaaggctgacaacctgccaggcctccattccagggctattgtgaggtacgcttgagagagaagaagtaaacatgctgcaagcggaggaaccacctacacataacggacaatcattgctgatttgtctgtcattctttctcgtagctttcctgcagtaccctcagggagcccgagcagagaaggggggtgtggagacagaggtagtctcctagggagcagggcccagtggcagcagcagtggtatttgcttttgttgtcactggctctggggttgttggccggctttcagatgagcatctattctccagagccttgcatatctcagaaccacctgcagaggcctgaatagaaccaggctggctgagactcaggaaggcccctgcatccatcctgagcttgcctctgggagtcccatgctcttgagtgcctccatgggagaaagagggcgaagctggggcagacagaaggcaccctagctgctggatggggtcactatgaggagcagctggtctcaccagcatccatcacactgtctttggaagctcccagataccaccctcccataatcagcttttgcctcatgaggacaaacactggagtgagaatttgggtttgtagttggatttgactctggtgagctgagtctagacctcataaacctcctttttatggtattcccagatatttattctgtgactcagccaaataaaactttggcaggggtaggtatgtaccctaggaaggactgtagccattccctcatttctgggacaggccaggttggttggagccagccaggaacaagcaggtagagaaaaggaaatctgggcaattgcctgcaacagcacagaaacatccctacctgcttcccttctatagctgctgggtaccagctagtgagcacaataggctgcttaaagggcaaagattgggatccccctagggccaggcnacatgttcccagcagagtagagaaagaggctgtcagtaggtataaagcaggtggaggaaggttagaagaaaaggaactagcccaagaagagatggccttgggactgctgggatgcaatgatgtcagccggctgtactgaaggggtcctttccagcccattagccaattcatagcagggaaacagggacttctcatggtcttccaggcatggatggtggaacagatcaggatgctctgtgtggtcctgaggctatcacacaggagatggggcaagaagcttcccagagcgccatgtattggaagagcaggggagccagctgttccccagcccagcctctgtctggggacagcaccctcaaaaggggccaatgtcaggctctgagtcccagctctaaatcccttcccactctgtcccaccacatcctggcctgtccctgggcctgcccaggccagagatacacttttagggatttaaatctttcctgatcatttgtttgtcagcttcactaattaagcagtgttaatttcatttactggaaatggaaattcatccacctcatttcttctcattcatcctccacacacaaaatccatcactcctcggctgcgggctgcgtaaaatttacaagactaattatgttgtcaggtctctttgtaaatacagtccttaaaggccactgtgcttgctgggttgtaatgcaagggcattcctgttgttagtttaattactggttagttatttaggttctcaaatgtttgcctcattttccctaaatcaaattaaatgtcccgcttgatgt

SEQ ID NO: 58554 - DNA, 1293 bp, Homo sapiens
ggaagctacaaagcacatctgtcagccagggggttataggcccaagggtagacctgtttctggccaccctgcctaacacagaagcagaacttcagaacttggagaactcagctctgctccagccagcacagctcagagaaatggggcatccacactttcggatttgtagcccaccttgcctccttccaattccagctcaggctccagggggataaagcgaacacagcctagacattccctctcttcccccctcactatacgagctggctaggcctccacgtctcccacccggttgcctgacagacaagcgaggtcagggagccccctgggcggtggccagcaagcatggtctcccttaggcctagcctcggtgcacccgagttgccctcccccttccattccctccgcgccagcagcgatgacatcattcctccctgactccgggaccgcggacaggcggcaggatccgcgcccagcaaggacttcagagcatcagcataggcagaggaaccaggaagagagatgaagattcagggactgaagtgggagaaggcacagatgaatgggcccaatccaaagccacagttagaccccctgaccagctggagttgaccgatgcggagttaaaggaggagttcactcggattttgacagccaacaacccacacgcaccccagaacattgtcaggtacagcttcaaaaagcaatggagtctgggtttcattcctaaactgaagaggaagatcccagtcaactactggggacaagatgaaggtgaaatctcaaatgaaactgtaagggtaatttattccttgggaatcttcatcatgaaaatagttactattttattgaacattaatattgagcatttattatgtgtcagacactgtgttaataggttgtttttattatttttaatacttataattatcatgcaaattagatagtattagccttcttttatagatgaagaacttagggcttagagtggttaagcccaaagtcatgaagataagaagcagcagaataaagattcaaacccaactctgcctgcctccaaagaccatgctcttaaccactgcactgacttgtcttcccatacatctgagttactgaaagaagaagggctctgtggtgacttttaaatacagagcttcccaacctgtgtgatggcgatccttccagccctccaggggcagggagatctgtgcaactggaccccatgaactggtttcctctactgtgagtttaccgtagtgtgccatacaaacatagtttctatatggcttgaaa

SEQ ID NO: 58555 - DNA, 544 bp, Homo sapiens
ggaagctacaaagcacatctgtcagccagggggttataggcccaagggtagacctgtttctggccaccctgcctaacacagaagcagaacttcagaacttggagaactcagctctgctccagccagcacagctcagagaaatggggcatccacactttcggatttgtagcccaccttgcctccttccaattccagctcaggctccagggggataaagcgaacacagcctagacattccctctcttcccccctcactatacgagctggctaggcctccacgtctcccacccggttgcctgacagacaagcgaggtcagggagccccctgggcggtggccagcaagcatggtctcccttaggcctagcctcggtgcacccgagttgccctcccccttccattccctccgcgccagcagcgatgacatcattcctccctgactccgggaccgcggacaggcggcaggatccgcgcccagcaaggacttcaggcacgtaggcctaagatgatgggggctcttcccaaccagtgcgcacaggcagctcc

SEQ ID NO: 58556 - DNA, 2622 bp, Homo sapiens
cgcgtcagggagttggattctatcctgcaagggcacggggacccacaacgacggctgtccctaaagaaccgttgcgactggtaactgaagtggaagagagtccagatttcttgtgtgtggtcaaggagacggacaaactttttgtcttcagacgagggagcgttttgtaggctctccaggggttgagatgattcctgcttctgcgaaggctccccataaacagcctcataagcagagcatcagcataggcagaggaaccaggaagagagatgaagattcagggactgaagtgggagaaggcacagatgaatgggcccaatccaaagccacagttagaccccctgaccagctggagttgaccgatgcggagttaaaggaggagttcactcggattttgacagccaacaacccacacgcaccccagaacattgtcaggtacagcttcaaagaaggcacatataagcctattggctttgtgaaccaactggcagttcactacacccaggttgggaacctgatccccaaagactcagatgaaggacggcggcagcattaccgcgatgaattagtggcaggttctcaggagtctgtcaaggtgatttcagaaacaggaaacctcgaagaagacgaagagcccaaggagttagaaactgagcctgggagtcaaacagatgtgcctgcagctggggcagctgaaaaagtgactgaagaagaattgatgactcctaagcagcccaaggagagaaagctcactaaccagttcaacttcagtgagagggcctcacagacctacaacaaccctgtccgggatcgagaatgccagacggagcctcctcccaggacaaacttttcagccacagccaatcagtgggagatctatgatgcctatgtagaggaacttgagaagcaggaaaagaccaaagagaaggagaaggcaaagaccccagtggctaaaaaatcagggaagatggccatgaggaagctgacatctatggagtctcagactgatgatctcatcaaattgtcccaagctgctaagatcatggagcggatggtcaaccagaatacatatgatgacattgctcaagattttaagtactatgacgatgctgctgatgaataccgggaccaggtgggtaccctgctgccgctctggaagttccaaaatgacaaagccaagcgcctgtccgtcactgccctctgctggaatccaaagtacagggatctgtttgcagtgggatatggctcttatgacttcatgaagcagagccggggcatgctgctgctctacagcctgaagaaccccagcttccctgagtacatgttcagcagcaacagcggcgtcatgtgtctcgacatccacgtggaccacccctacctggtggcagtaggccactatgacggcaacgtggccatttacaacctcaagaagccccactcccagccctccttctgcagctcagccaagtctggcaagcactcagaccctgtgtggcaggtcaagtggcagaaggatgacatggaccaaaaccttaacttcttctctgtgtcatctgacggcaggattgtgtcttggactctcgtgaagagaaagctggttcacatagatgtcatcaagctgaaggtggaaggcagcaccacggaagttcctgaggggttgcagctgcacccagtgggttgtggcactgcctttgacttccacaaagagattgactacatgttcctagtgggcacagaggagggaaaaatctacaagtgctctaaatcctactccagccaattcctcgacacctatgacgcccacaacatgtcagtggacactgtgtcctggaacccataccacaccaaggtcttcatgtcctgcagctccgactggacagtgaagatctgggaccacaccatcaagtgaggggcctgttcctggctctgcctggggccctcccctgggctatggcactgtgagccctctgtgccatgggctttccaccctccacctctgcaggaccccgatgttcatctatgacctgaactcagccgtgggtgatgtggcctgggcgccatactcttctactgtgttcgcagcagtcaccacagatgggaaggcccacatatttgacttagccatcaacaagtatgaggccatctgcaaccagcctgtggcggccaaaaagaacaggctcacccacgtgcagttcaatctcatccaccccatcatcattgtgggcgatgaccgtgggcacatcatcagcctcaagctctcacccaatttgcgcaagatgccaaaggaaaagaaggggcaggaggtgcagaagggtccagctgtggagattgcgaaactggacaaactgctgaacctggtgagggaagtgaaaatcaagacctgaggggctggcctcagtctctgtcccatcgcttgaatacagtactcctagggcttgaccctggtacccagcccagccttagcacccagcatgtgaccccactcctgatcaggtcccagcatcttcccttcttgttctgttccttaaggtcccagcaccttaccccaggacttggtcttcaaccaccattacccctctaactttgcacaaataaacctgtgtagaaacccaaaaaaaacct

SEQ ID NO: 58557 - DNA, 2376 bp, Homo sapiens
cgcgtcagggagttggattctatcctgcaagggcacggggacccacaacgacggctgtccctaaagaaccgttgcgactggtaactgaagtggaagagagtccagatttcttgtgtgtggtcaaggagacggacaaactttttgtcttcagacgagggagcgttttgtaggctctccaggggttgagatgattcctgcttctgcgaaggctccccataaacagcctcataagcagagcatcagcataggcagaggaaccaggaagagagatgaagattcagggactgaagtgggagaaggcacagatgaatgggcccaatccaaagccacagttagaccccctgaccagctggagttgaccgatgcggagttaaaggaggagttcactcggattttgacagccaacaacccacacgcaccccagaacattgtcaggtacagcttcaaagaaggcacatataagcctattggctttgtgaaccaactggcagttcactacacccaggttgggaacctgatccccaaagactcagatgaaggacggcggcagcattaccgcgatgaattagtggcaggttctcaggagtctgtcaaggtgatttcagaaacaggaaacctcgaagaagacgaagagcccaaggagttagaaactgagcctgggagtcaaacagatgtgcctgcagctggggcagctgaaaaagtgactgaagaagaattgatgactcctaagcagcccaaggagagaaagctcactaaccagttcaacttcagtgagagggcctcacagacctacaacaaccctgtccgggatcgagaatgccagacggagcctcctcccaggacaaacttttcagccacagccaatcagtgggagatctatgatgcctatgtagaggaacttgagaagcaggaaaagaccaaagagaaggagaaggcaaagaccccagtggctaaaaaatcagggaagatggccatgaggaagctgacatctatggagtctcagactgatgatctcatcaaattgtcccaagctgctaagatcatggagcggatggtcaaccagaatacatatgatgacattgctcaagattttaagtactatgacgatgctgctgatgaataccgggaccaggtgggtaccctgctgccgctctggaagttccaaaatgacaaagccaagcgcctgtccgtcactgccctctgctggaatccaaagtacagggatctgtttgcagtgggatatggctcttatgacttcatgaagcagagccggggcatgctgctgctctacagcctgaagaaccccagcttccctgagtacatgttcagcagcaacagcggcgtcatgtgtctcgacatccacgtggaccacccctacctggtggcagtaggccactatgacggcaacgtggccatttacaacctcaagaagccccactcccagccctccttctgcagctcagccaagtctggcaagcactcagaccctgtgtggcaggtcaagtggcagaaggatgacatggaccaaaaccttaacttcttctctgtgtcatctgacggcaggattgtgtcttggactctcgtgaagagaaagctggttcacatagatgtcatcaagctgaaggtggaaggcagcaccacggaagttcctgaggggttgcagctgcacccagtgggttgtggcactgcctttgacttccacaaagagattgactacatgttcctagtgggcacagaggagggaaaaatctacaaggaccccgatgttcatctatgacctgaactcagccgtgggtgatgtggcctgggcgccatactcttctactgtgttcgcagcagtcaccacagatgggaaggcccacatatttgacttagccatcaacaagtatgaggccatctgcaaccagcctgtggcggccaaaaagaacaggctcacccacgtgcagttcaatctcatccaccccatcatcattgtgggcgatgaccgtgggcacatcatcagcctcaagctctcacccaatttgcgcaagatgccaaaggaaaagaaggggcaggaggtgcagaagggtccagctgtggagattgcgaaactggacaaactgctgaacctggtgagggaagtgaaaatcaagacctgaggggctggcctcagtctctgtcccatcgcttgaatacagtactcctagggcttgaccctggtacccagcccagccttagcacccagcatgtgaccccactcctgatcaggtcccagcatcttcccttcttgttctgttccttaaggtcccagcaccttaccccaggacttggtcttcaaccaccattacccctctaactttgcacaaataaacctgtgtagaaacccaaaaaaaacct

SEQ ID NO: 58558 - DNA, 2342 bp, Homo sapiens
cgcgtcagggagttggattctatcctgcaagggcacggggacccacaacgacggctgtccctaaagaaccgttgcgactggtaactgaagtggaagagagtccagatttcttgtgtgtggtcaaggagacggacaaactttttgtcttcagacgagggagcgttttgtaggctctccaggggttgagatgattcctgcttctgcgaaggctccccataaacagcctcataagcagagcatcagcataggcagaggaaccaggaagagagatgaagattcagggactgaagtgggagaaggcacagatgaatgggcccaatccaaagccacagttagaccccctgaccagctggagttgaccgatgcggagttaaaggaggagttcactcggattttgacagccaacaacccacacgcaccccagaacattgtcaggtacagcttcaaagaaggcacatataagcctattggctttgtgaaccaactggcagttcactacacccaggttgggaacctgatccccaaagactcagatgaaggacggcggcagcattaccgcgatgaattagtggcaggttctcaggagtctgtcaaggtgatttcagaaacaggaaacctcgaagaagacgaagagcccaaggagttagaaactgagcctgggagtcaaacagatgtgcctgcagctggggcagctgaaaaagtgactgaagaagaattgatgactcctaagcagcccaaggagagaaagctcactaaccagttcaacttcagtgagagggcctcacagacctacaacaaccctgtccgggatcgagaatgccagacggagcctcctcccaggacaaacttttcagccacagccaatcagtgggagatctatgatgcctatgtagaggaacttgagaagcaggaaaagaccaaagagaaggagaaggcaaagaccccagtggctaaaaaatcagggaagatggccatgaggaagctgacatctatggagtctcagactgatgatctcatcaaattgtcccaagctgctaagatcatggagcggatggtcaaccagaatacatatgatgacattgctcaagattttaagtactatgacgatgctgctgatgaataccgggaccaggtgggtaccctgctgccgctctggaagttccaaaatgacaaagccaagcgcctgtccgtcactgccctctgctggaatccaaagtacagggatctgtttgcagtgggatatggctcttatgacttcatgaagcagagccggggcatgctgctgctctacagcctgaagaaccccagcttccctgagtacatgttcagcagcaacagcggcgtcatgtgtctcgacatccacgtggaccacccctacctggtggcagtaggccactatgacggcaacgtggccatttacaacctcaagaagccccactcccagccctccttctgcagctcagccaagtctggcaagcactcagaccctgtgtggcaggtcaagtggcagaaggatgacatggaccaaaaccttaacttcttctctgtgtcatctgacggcaggattgtgtcttggactctcgtgaagagaaagctggttcacatagatgtcatcaagctgaaggtggaaggcagcaccacggaagttcctgaggggttgcagctgcacccagtgggttgtggcactgcctttgacttccacaaagagattgactacatgttcctagtgggcacagaggagggaaaaatctacaagtgctctaaatcctactccagccaattcctcgacacctatgacgcccacaacatgtcagtggacactgtgtcctggaacccataccacaccaaggtcttcatgtcctgcagctccgactggacagtgaagatctgggaccacaccatcaagaccccgatgttcatctatgacctgaactcagccgtgggtgatgtggcctgggcgccatactcttctactgtgttcgcagcagtcaccacagatgggaaggaaaagaaggggcaggaggtgcagaagggtccagctgtggagattgcgaaactggacaaactgctgaacctggtgagggaagtgaaaatcaagacctgaggggctggcctcagtctctgtcccatcgcttgaatacagtactcctagggcttgaccctggtacccagcccagccttagcacccagcatgtgaccccactcctgatcaggtcccagcatcttcccttcttgttctgttccttaaggtcccagcaccttaccccaggacttggtcttcaaccaccattacccctctaactttgcacaaataaacctgtgtagaaacccaaaaaaaacct

SEQ ID NO: 58559 - DNA, 2551 bp, Homo sapiens
cttggcttctgggagtgtttgtgaatgaaggggctttctgtatgcttgtccaagcagaaaagacactcccaagcctcatgtgaggtttttgtctaggatgaagattcagggactgaagtgggagaaggcacagatgaatgggcccaatccaaagccacagttagaccccctgaccagctggagttgaccgatgcggagttaaaggaggagttcactcggattttgacagccaacaacccacacgcaccccagaacattgtcaggtacagcttcaaaaagcaatggagtctgggtttcattcctaaactgaagaggaagatcccagtcaactactggggacaagatgaagtgaaaacttcagattaactgaggatttggaaggcacatataagcctattggctttgtgaaccaactggcagttcactacacccaggttgggaacctgatccccaaagactcagatgaaggacggcggcagcattaccgcgatgaattagtggcaggttctcaggagtctgtcaaggtgatttcagaaacaggaaacctcgaagaagacgaagagcccaaggagttagaaactgagcctgggagtcaaacagatgtgcctgcagctggggcagctgaaaaagtgactgaagaagaattgatgactcctaagcagcccaaggagagaaagctcactaaccagttcaacttcagtgagagggcctcacagacctacaacaaccctgtccgggatcgagaatgccagacggagcctcctcccaggacaaacttttcagccacagccaatcagtgggagatctatgatgcctatgtagaggaacttgagaagcaggaaaagaccaaagagaaggagaaggcaaagaccccagtggctaaaaaatcagggaagatggccatgaggaagctgacatctatggagtctcagactgatgatctcatcaaattgtcccaagctgctaagatcatggagcggatggtcaaccagaatacatatgatgacattgctcaagattttaagtactatgacgatgctgctgatgaataccgggaccaggtgggtaccctgctgccgctctggaagttccaaaatgacaaagccaagcgcctgtccgtcactgccctctgctggaatccaaagtacagggatctgtttgcagtgggatatggctcttatgacttcatgaagcagagccggggcatgctgctgctctacagcctgaagaaccccagcttccctgagtacatgttcagcagcaacagcggcgtcatgtgtctcgacatccacgtggaccacccctacctggtggcagtaggccactatgacggcaacgtggccatttacaacctcaagaagccccactcccagccctccttctgcagctcagccaagtctggcaagcactcagaccctgtgtggcaggtcaagtggcagaaggatgacatggaccaaaaccttaacttcttctctgtgtcatctgacggcaggattgtgtcttggactctcgtgaagagaaagctggttcacatagatgtcatcaagctgaaggtggaaggcagcaccacggaagttcctgaggggttgcagctgcacccagtgggttgtggcactgcctttgacttccacaaagagattgactacatgttcctagtgggcacagaggagggaaaaatctacaagtgctctaaatcctactccagccaattcctcgacacctatgacgcccacaacatgtcagtggacactgtgtcctggaacccataccacaccaaggtcttcatgtcctgcagctccgactggacagtgaagatctgggaccacaccatcaagtgaggggcctgttcctggctctgcctggggccctcccctgggctatggcactgtgagccctctgtgccatgggctttccaccctccacctctgcaggaccccgatgttcatctatgacctgaactcagccgtgggtgatgtggcctgggcgccatactcttctactgtgttcgcagcagtcaccacagatgggaaggcccacatatttgacttagccatcaacaagtatgaggccatctgcaaccagcctgtggcggccaaaaagaacaggctcacccacgtgcagttcaatctcatccaccccatcatcattgtgggcgatgaccgtgggcacatcatcagcctcaagctctcacccaatttgcgcaagatgccaaaggaaaagaaggggcaggaggtgcagaagggtccagctgtggagattgcgaaactggacaaactgctgaacctggtgagggaagtgaaaatcaagacctgaggggctggcctcagtctctgtcccatcgcttgaatacagtactcctagggcttgaccctggtacccagcccagccttagcacccagcatgtgaccccactcctgatcaggtcccagcatcttcccttcttgttctgttccttaaggtcccagcaccttaccccaggacttggtcttcaaccaccattacccctctaactttgcacaaataaacctgtgtagaaacccaaaaaaaacct

SEQ ID NO: 58560 - DNA, 2875 bp, Homo sapiens
ggaagctacaaagcacatctgtcagccagggggttataggcccaagggtagacctgtttctggccaccctgcctaacacagaagcagaacttcagaacttggagaactcagctctgctccagccagcacagctcagagaaatggggcatccacactttcggatttgtagcccaccttgcctccttccaattccagctcaggctccagggggataaagcgaacacagcctagacattccctctcttcccccctcactatacgagctggctaggcctccacgtctcccacccggttgcctgacagacaagcgaggtcagggagccccctgggcggtggccagcaagcatggtctcccttaggcctagcctcggtgcacccgagttgccctcccccttccattccctccgcgccagcagcgatgacatcattcctccctgactccgggaccgcggacaggcggcaggatccgcgcccagcaaggacttcagagcatcagcataggcagaggaaccaggaagagagatgaagattcagggactgaagtgggagaaggcacagatgaatgggcccaatccaaagccacagttagaccccctgaccagctggagttgaccgatgcggagttaaaggaggagttcactcggattttgacagccaacaacccacacgcaccccagaacattgtcaggtacagcttcaaagaaggcacatataagcctattggctttgtgaaccaactggcagttcactacacccaggttgggaacctgatccccaaagactcagatgaaggacggcggcagcattaccgcgatgaattagtggcaggttctcaggagtctgtcaaggtgatttcagaaacaggaaacctcgaagaagacgaagagcccaaggagttagaaactgagcctgggagtcaaacagatgtgcctgcagctggggcagctgaaaaagtgactgaagaagaattgatgactcctaagcagcccaaggagagaaagctcactaaccagttcaacttcagtgagagggcctcacagacctacaacaaccctgtccgggatcgagaatgccagacggagcctcctcccaggacaaacttttcagccacagccaatcagtgggagatctatgatgcctatgtagaggaacttgagaagcaggaaaagaccaaagagaaggagaaggcaaagaccccagtggctaaaaaatcagggaagatggccatgaggaagctgacatctatggagtctcagactgatgatctcatcaaattgtcccaagctgctaagatcatggagcggatggtcaaccagaatacatatgatgacattgctcaagattttaagtactatgacgatgctgctgatgaataccgggaccaggtgggtaccctgctgccgctctggaagttccaaaatgacaaagccaagcgcctgtccgtcactgccctctgctggaatccaaagtacagggatctgtttgcagtgggatatggctcttatgacttcatgaagcagagccggggcatgctgctgctctacagcctgaagaaccccagcttccctgagtacatgttcagcagcaacagcggcgtcatgtgtctcgacatccacgtggaccacccctacctggtggcagtaggccactatgacggcaacgtggccatttacaacctcaagaagccccactcccagccctccttctgcagctcagccaagtctggcaagcactcagaccctgtgtggcaggtcaagtggcagaaggatgacatggaccaaaaccttaacttcttctctgtgtcatctgacggcaggattgtgtcttggactctcgtgaagagaaagctggttcacatagatgtcatcaagctgaaggtggaaggcagcaccacggaagttcctgaggggttgcagctgcacccagtgggttgtggcactgcctttgacttccacaaagagattgactacatgttcctagtgggcacagaggagggaaaaatctacaagtgctctaaatcctactccagccaattcctcgacacctatgacgcccacaacatgtcagtggacactgtgtcctggaacccataccacaccaaggtcttcatgtcctgcagctccgactggacagtgaagatctgggaccacaccatcaagtgaggggcctgttcctggctctgcctggggccctcccctgggctatggcactgtgagccctctgtgccatgggctttccaccctccacctctgcaggaccccgatgttcatctatgacctgaactcagccgtgggtgatgtggcctgggcgccatactcttctactgtgttcgcagcagtcaccacagatgggaaggcccacatatttgacttagccatcaacaagtatgaggccatctgcaaccagcctgtggcggccaaaaagaacaggctcacccacgtgcagttcaatctcatccaccccatcatcattgtgggcgatgaccgtgggcacatcatcagcctcaagctctcacccaatttgcgcaagatgccaaaggaaaagaaggggcaggaggtgcagaagggtccagctgtggagattgcgaaactggacaaactgctgaacctggtgagggaagtgaaaatcaagacctgaggggctggcctcagtctctgtcccatcgcttgaatacagtactcctagggcttgaccctggtacccagcccagccttagcacccagcatgtgaccccactcctgatcaggtcccagcatcttcccttcttgttctgttccttaaggtcccagcaccttaccccaggacttggtcttcaaccaccattacccctctaactttgcacaaataaacctgtgtagaaacccaaaaaaaacct

SEQ ID NO: 58561 - DNA, 2264 bp, Homo sapiens
gttattcacccaagcccctctttacttccccagctctgtgtcccaaacctccatcagccccagccaaaatgcttctctcaaagatatactgttggattaagtgagaaggagttgagggctttttgtgggtctcctgttgtcttgttctttaggatcgagaatgccagacggagcctcctcccaggacaaacttttcagccacagccaatcagtgggagatctatgatgcctatgtagaggaacttgagaagcaggaaaagaccaaagagaaggagaaggcaaagaccccagtggctaaaaaatcagggaagatggccatgaggaagctgacatctatggagtctcagactgatgatctcatcaaattgtcccaagctgctaagatcatggagcggatggtcaaccagaatacatatgatgacattgctcaagattttaagtactatgacgatgctgctgatgaataccgggaccaggtgggtaccctgctgccgctctggaagttccaaaatgacaaagccaagcgcctgtccgtcactgccctctgctggtaagtataggcattgcagcaaatgcagagcccctgagtgccctctacatcccaaacccccagtacccccttctgcacttaaccaccttgagtatgacatgtgacagtatagaaaaatatggaacttggattcttatgggatcacaagaccacccccaggactcccaagtggtgagggcctaagctggagaacagatgtctgtagtatatttaggcaccagtgccaatgggaaggcccttgtccacaggagggccatgttcatttcctatgccaatggattcatatttttttttgcaggaatccaaagtacagggatctgtttgcagtgggatatggctcttatgacttcatgaagcagagccggggcatgctgctgctctacagcctgaagaaccccagcttccctgagtacatgttcagcagcaacagcggcgtcatgtgtctcgacatccacgtggaccacccctacctggtggcagtaggccactatgacggcaacgtggccatttacaacctcaagaagccccactcccagccctccttctgcagctcagccaagtctggcaagcactcagaccctgtgtggcaggtcaagtggcagaaggatgacatggaccaaaaccttaacttcttctctgtgtcatctgacggcaggattgtgtcttggactctcgtgaagagaaagctggttcacatagatgtcatcaagctgaaggtggaaggcagcaccacggaagttcctgaggggttgcagctgcacccagtgggttgtggcactgcctttgacttccacaaagagattgactacatgttcctagtgggcacagaggagggaaaaatctacaagtgctctaaatcctactccagccaattcctcgacacctatgacgcccacaacatgtcagtggacactgtgtcctggaacccataccacaccaaggtcttcatgtcctgcagctccgactggacagtgaagatctgggaccacaccatcaagtgaggggcctgttcctggctctgcctggggccctcccctgggctatggcactgtgagccctctgtgccatgggctttccaccctccacctctgcaggaccccgatgttcatctatgacctgaactcagccgtgggtgatgtggcctgggcgccatactcttctactgtgttcgcagcagtcaccacagatgggaaggcccacatatttgacttagccatcaacaagtatgaggccatctgcaaccagcctgtggcggccaaaaagaacaggctcacccacgtgcagttcaatctcatccaccccatcatcattgtgggcgatgaccgtgggcacatcatcagcctcaagctctcacccaatttgcgcaagatgccaaaggaaaagaaggggcaggaggtgcagaagggtccagctgtggagattgcgaaactggacaaactgctgaacctggtgagggaagtgaaaatcaagacctgaggggctggcctcagtctctgtcccatcgcttgaatacagtactcctagggcttgaccctggtacccagcccagccttagcacccagcatgtgaccccactcctgatcaggtcccagcatcttcccttcttgttctgttccttaaggtcccagcaccttaccccaggacttggtcttcaaccaccattacccctctaactttgcacaaataaacctgtgtagaaacccaaaaaaaacct

SEQ ID NO: 58562 - DNA, 310 bp, Homo sapiens
gatagagtgagaccctgtcttaaaaaattaaaaaacagccacagtggggtgaccaccctgagcttacagcaagccaggcattggggtcagcaccaaacacatatccagtcactgaatgctcacaacagcccaatctgcagttgaggaaaccgaggcacaaagaagctacatggcttgtccaaggccacacagctggcttgaacttcagcaccaccctgcccccatggaggcagtccacccaggggcaggggcctatggaggaggggctccccacgcattcttttagcggtctccccttagactggaaccc

SEQ ID NO: 58563 - DNA, 296 bp, Homo sapiens
ggaccacatattttctcctataaatagaaatttctgtaaaataagaaatacttgttagctctaagactcaacagaattgttttaatttgctttggaggaagaattaaaacctattttttaggcctatgttcattctttatttttatttattgattttttaaccagatcctctgaagacactaaagtgtagttgtctctgaggacaaaaacaaacgaacaaacaacaacaaaaaaacttcaccttaccttgctgacctagctatgaagttgctcttttatggccttcctaggcatga

SEQ ID NO: 58564 - DNA, 324 bp, Homo sapiens
  misc_feature (265)..(265): n is a, c, g, or t
  misc_feature (272)..(272): n is a, c, g, or t
  misc_feature (319)..(319): n is a, c, g, or t
  misc_feature (321)..(321): n is a, c, g, or t
agctatgaggaagggctgatggaagggaatgctcttcccatttttgagatgaagaaattgagattctaaaatgcgatagcgatatgacttgcttcatgtcaccctgacaagcaatggctacttggaactcattctaggtctctcaatccttgatcctcagacatagccatttctatcaaaccatgtacctgagaatgtcagattccccatgattaaaaaaattgataaatagaggggactgaaactgaaccccaatagtcccatngactgtnttgcttttgataactaggaaatggccacttcacagtcttaaacgttnanact

SEQ ID NO: 58565 - DNA, 408 bp, Homo sapiens
gggtcttgctatgctgcctaggctggtcttgaactcttcaactgcagtcttgacctcccaggctcaagtgatcttcttacataggcctcccaatgtgccaggattataggcatgaccaccatgccaagctccagatggtattcttaattcagctcacaatgtgccctcatcagattgctagtggccaggagtgaacaactgagtgactttaagaatcaggacaccaggaatatgttcctagaaagtgaaggtatgagtggaaaacctgggttggattatgaacaaggcccacatgtgtgccagagtggccagggcagggagcagcagcaggtgctggtgaaaggaaggtggattactggggcaatgccctgtctttgtgttatggtttctttgagggaagtagataag

SEQ ID NO: 58566 - DNA, 199 bp, Homo sapiens
aggagaggtagtgcctaaacttgaaaatcaaaaagtagtaatatctatttagacataaggagataaataacgaaataattgcttctatgtgatgaaactctgggagtacacaaggggactgctgttttactaaacaaattttcaagtatatatgactttgataaagtatccaaataaaataattcctttcccatataag

SEQ ID NO: 58567 - DNA, 216 bp, Homo sapiens
ctgatgggactcagcttctcccagctgttggctgaaggcctccgtttctcaccctatgtatctcttcatagtctgtctaagtagttttttgacatgacaactagagcaatagagagattccgggtgatgtcatactacttttatgacctagtttctattttacgcatgtgatttctgtttaattctattgactgaagttagtcaccaagtccagct

SEQ ID NO: 58568 - DNA, 184 bp, Homo sapiens
gtcaagttagttgatactgttgttcaaatcttctgggtctttactcattttctgtctacttgctctatcaattattaagaaagggatattaaaatttccaaccattattgtatatttgtctgtttttttatacttctatcagacataaagatgtaggactgtatattacccttgaagaatggag

SEQ ID NO: 58569 - DNA, 442 bp, Homo sapiens
tatttattaagccaatctttaaattattgaaaagagtggagaaaacgatgtgtttttatcgaggtaaaagttgcgtaacataactgtcacatagtcacatcagatttcaagtgcaattgagtggcattgggtacattccgtgttgtgcagccatcacctatgttgaagaagagagaaagtggttatttttaaaaagtgatgccggtctggactacagctggctggaattcagcacctattcaggaatgtgtcgataatggagtgcccacaacagctcacagccagcgataattgtctatccctttgtcttcatttccaagcgtctgaactgaaaaaagggaattagctttagctacgtttgtactgtatttccacttaaaaagttatggaacttgaacactgtataatgttcacccaaataaataagaacaatttacttgaa

SEQ ID NO: 58570 - DNA, 218 bp, Homo sapiens
agctttatcacattatacacaaacatagaaaacagtgtttcagaagagaagcaaaggccattggccttcaaatatttatgcaacaatgaaaatgttctcagcccttaaatgagcacttgtgacttgtccaaagtgagataactagtcaatggaagagttcaaactagagcatgtatcttagtctgttctcatattgctataaaggactgcctaagact

SEQ ID NO: 58571 - DNA, 2224 bp, Homo sapiens
  misc_feature (129)..(129): n is a, c, g, or t
  misc_feature (183)..(183): n is a, c, g, or t
  misc_feature (243)..(243): n is a, c, g, or t
  misc_feature (1630)..(1630): n is a, c, g, or t
gaaaattcacaatccagttttttgattccacactgcacatcccaccccctcaagaccagagaacacagggtctaggctaacacatcaaaagcagctctggagacttaattccattgtggtaatacagcnttcttactctggcagaagctccataccgttcagcaacccactgaacgtaggganggaatgggaagctcctgtgttccaaaagagttctgaactggctcttcatctgtcccttancccctgcattctagttttattgttcttctccccccagattgactatccatgttctggtcattcctcattgttaaatgtggttaacactttacataggcctctctgtggaggctgtgtagaaaattggcctgagcactaggagactggactgctgttgccccatgaaatgacagatctaaaaagcttccattcccagagatgttttcctactctcaataaaggcctagatttctttaggcctttttagaagaccacttgttttagactcaaagacttttctgggtttagcaatcttctattacagagaagagagccccaggacttttggctaaagaattctagctaagggccacaatgtacttctcgctagcattctcatagaacacatgtgaatgtagagtagagattaaaaagaatgactcagtgagttacactacccacaaggtcaatgggccggaatgaaaattcaaccactggcctatctgtgcttagtgaacaacccagaccttttttcccgtttgcaccttttttggataccaaatgaaatctgagcagctgccccttacccacccacataagtgatgtgagacaggtgacattatgtaaccgctgggtcttcctgacttcctctccagtttaagaacaggaagagcagtgcacaaaaatgttctgtcgagctgaggatatcggaacttaaccggcttccacttggacagaatacatttgttccagaacactgtgtacattctgggttttccaaatatgagaaacagatggagtcattaattcaagataaataaaaaaaacaaaacaaacagcaagccattatttgctacctgttcagatatttcacaggaagggaaaaggaacaaacaagcttttgatataccctcggtctccagtaaccaccagtgaccaaatccaaagttctcttcatgtgacctttctagcattttagttgacaagcccctcttggaaacttcataccctggattttgtaacatggcattcttacaccttccttttttctcttagattatttctcagtcctgaatatacattatcaagtcctgacctttctcatgacatccagaaccagacctgaataccacattaacagttcacctcactacgttaaaaaatcattatcatctgcctccaaatctctttctccaccccttttccccgacactgtcattgtcacagtcacacaagatggaaatcttgaagtcattttgtcctcatcctcatccttctttatgttatttggcctacattacttttctgttcccacagttgctgtcttgagtaccttgtgtctttttctgactataaccgagcctcttaaattgtctcccggtatctagtcattatcccccataatacntcacttattgtagggtagtgtcagaattattttaagatatgcgctgatcatgttgcttcttcattaaaattcattaatagctaataacaaagaggaaggcaaagttaatacatgttccttctagaagatacaggtaagcaaaatgaagaaaatatattcataaatcccaacacccaggtcatcaaatgtcatcagtttagcctgtacatattttgaaccttgggaattatgtaatacatattttgtaagctgcttatttttcttttatacatcatgagcatattcctatgcagttaactacattctacaatatatatgattttacacctatgtagtaatatcaatgtatgaattgccacaactattttaagttttatgccatccagctttttatggtgtatctttcagtacaccctgtggtttaatacaagactaagtaactgctgtctgtgttagtttatcctacaaactaagaatggcttctacagttctaaatcattggggggtgggacgtcaacaaagaatattttgtgacatgaaaattatgaaattcagatatcagtgcctatgaataaagtttcattgaaacgcagc

SEQ ID NO: 58572 - DNA, 2251 bp, Homo sapiens
ctggtcacacaggacccagtctgcggtgggggttttcccgccaccgccccgccctccctggggcccccacctcaccctctcctggcacccttcaccgtcaacctgtcgggccgggtctgagcaggtctggaggtgggcggggagccctggcctccccacctcctcccgtccccaccctgttcccagcactcaagccttgccaccgccgagccgggcttcctgggtgtttcaggcaaggaagtctaggtccctggggggtgacccccaaggaaaaggcagcctccctgcgcacccggttgcccggagccctctccagggccggctgggctgggggttgccctggccagcaggggcccgggggcgatgccacccggtgccgactgaggccaccgcaccatggcccgctcgctgacctggcgctgctgcccctggtgcctgacggaggatgagaaggccgccgcccgggtggaccaggagatcaacaggatcctcttggagcagaagaagcaggaccgcggggagctgaagctgctgcttttgggcccaggcgagagcgggaagagcaccttcatcaagcagatgcggatcatccacggcgccggctactcggaggaggagcgcaagggcttccggcccctggtctaccagaacatcttcgtgtccatgcgggccatgatcgaggccatggagcggctgcagattccattcagcaggcccgagagcaagcaccacgctagcctggtcatgagccaggacccctataaagtgaccacgtttgagaagcgctacgctgcggccatgcagtggctgtggagggatgccggcatccgggcctgctatgagcgtcggcgggaattccacctgctcgattcagccgtgtactacctgtcccacctggagcgcatcaccgaggagggctacgtccccacagctcaggacgtgctccgcagccgcatgcccaccactggcatcaacgagtactgcttctccgtgcagaaaaccaacctgcggatcgtggacgtcgggggccagaagtcagagcgtaagaaatggatccattgtttcgagaacgtgatcgccctcatctacctggcctcactgagtgaatacgaccagtgcctggaggagaacaaccaggagaaccgcatgaaggagagcctcgcattgtttgggactatcctggaactaccctggttcaaaagcacatccgtcatcctctttctcaacaaaaccgacatcctggaggagaaaatccccacctcccacctggctacctatttccccagtttccagggccctaagcaggatgctgaggcagccaagaggttcatcctggacatgtacacgaggatgtacaccgggtgcgtggacggccccgagggcagcaagaagggcgcacgatcccgacgcctcttcagccactacacatgtgccacagacacacagaacatccgcaaggtcttcaaggacgtgcgggactcggtgctcgcccgctacctggacgagatcaacctgctgtgacccaggccccacctggggcaggcggcaccggcgggcgggtgggaggtgggagtggctgcagggacccctagtgtccctggtctatctctccagcctcggcccacacgcaagggagtcgggggacggacggcccgctgctggccgctctcttctctgcctctcaccaggacagccgccccccagggtactcctgcccttgcttgactcagtttccctcctttgaaagggaaggagcaaaacggccatttgggatgccagggtggatgaaaaggtgaagaaatcaggggattgaggacttgggtgggtgggcatctctcaggagccccatctccgggcgtgtcacctcctgggcagggttctgggaccctctgtgggtgacgcacaccctgggatggggctagtagagccttcaggcgccttcgggcgtggactctggcgcactctagtggacaggagaaggaacgccttccaggaacctgtggactaggggtgcagggacttccctttgcaaggggtaacagaccgctggaaaacactgtcactttcagagctcggtggctcacagcgtgtcctgccccggtttgcggacgagagaaatcgcggcccacaagcatccccccatcccttgcaggctgggggctgggcatgctgcatcttaaccttttgtatttattccctcaccttctgcagggctccgtgcgggctgaaattaaagatttcttagaggctg

SEQ ID NO: 58573 - DNA, 2284 bp, Homo sapiens
ctggtcacacaggacccagtctgcggtgggggttttcccgccaccgccccgccctccctggggcccccacctcaccctctcctggcacccttcaccgtcaacctgtcgggccgggtctgagcaggtctggaggtgggcggggagccctggcctccccacctcctcccgtccccaccctgttcccagcactcaagccttgccaccgccgagccgggcttcctgggtgtttcaggcaaggaagtctaggtccctggggggtgacccccaaggaaaaggcagcctccctgcgcacccggttgcccggagccctctccagggccggctgggctgggggttgccctggccagcaggggcccgggggcgatgccacccggtgccgactgaggccaccgcaccatggcccgctcgctgacctggcgctgctgcccctggtgcctgacggaggatgagaaggccgccgcccgggtggaccaggagatcaacaggatcctcttggagcagaagaagcaggaccgcggggagctgaagctgctgcttttgggcccaggcgagagcgggaagagcaccttcatcaagcagatgcggatcatccacggcgccggctactcggaggaggagcgcaagggcttccggcccctggtctaccagaacatcttcgtgtccatgcgggccatgatcgaggccatggagcggctgcagattccattcagcaggcccgagagcaagcaccacgctagcctggtcatgagccaggacccctataaagtgaccacgtttgagaagcgctacgctgcggccatgcagtggctgtggagggatgccggcatccgggcctgctatgagcgtcggcgggaattccacctgctcgattcagccgtgtactacctgtcccacctggagcgcatcaccgaggagggctacgtccccacagctcaggacgtgctccgcagccgcatgcccaccactggcatcaacgagtactgcttctccgtgcagaaaaccaacctgcggatcgtggacgtcgggggccagaagtcagagcgtaagaaatggatccattgtttcgagaacgtgatcgccctcatctacctggcctcactgagtgaatacgaccagtgcctggaggagaacaaccaggagaaccgcatgaaggagagcctcgcattgtttgggactatcctggaactaccctggttcaaaagcacatccgtcatcctctttctcaacaaaaccgacatcctggaggagaaaatccccacctcccacctggctacctatttccccagtttccagggccctaagcaggatgctgaggcagccaagaggttcatcctggacatgtacacgaggatgtacaccgggtgcgtggacggccccgagggcagcaagaagggcgcacgatcccgacgcctcttcagccactacacatgtgccacagacacacagaacatccgcaaggtcttcaaggacgtgcgggactcggtgctcgcccgctacctggacgagatcaacctgctgtgacccaggccccacctggggcaggcggcaccggcgggcgggtgggaggtgggagtggctgcagggacccctagtgtccctggtctatctctccagcctcggcccacacgcaagggagtcgggggacggacggcccgctgctggccgctctcttctctgcctctcaccaggacagccgccccccagggtactcctgcccttgcttgactcagtttccctcctttgaaagggaaggagcaaaacggccatttgggatgccagggtggatgaaaaggtgaagaaatcaggggattgaggacttgggtgggtgggcatctctcaggagccccatctccgggcgtgtcacctcctgggcagggttctgggaccctctgtgggtgacgcacaccctgggatggggctagtagagccttcaggcgccttcgggcgtggactctggcgcactctagtggacaggagaaggaacgccttccaggaacctgtggactaggggtgcagggacttccctttgcaaggggtaacagaccgctggaaaacactgtcactttcagagctcggtggctcacagcgtgtcctgccccggtttgcggacgagagaaatcgcggcccacaagcatccccccatcccttgcaggctgggggctgggcatgctgcatcttaaccttttgtatttattccctcaccttctgcagggctccgtgcgggctgaaattaaagatttcttagaggctgcgtcgccagcgtcctgtttatcccctctgcatt

SEQ ID NO: 58574 - DNA, 1032 bp, Homo sapiens
ctggtcacacaggacccagtctgcggtgggggttttcccgccaccgccccgccctccctggggcccccacctcaccctctcctggcacccttcaccgtcaacctgtcgggccgggtctgagcaggtctggaggtgggcggggagccctggcctccccacctcctcccgtccccaccctgttcccagcactcaagccttgccaccgccgagccgggcttcctgggtgtttcaggcaaggaagtctaggtccctggggggtgacccccaaggaaaaggcagcctccctgcgcacccggttgcccggagccctctccagggccggctgggctgggggttgccctggccagcaggggcccgggggcgatgccacccggtgccgactgaggccaccgcaccatggcccgctcgctgacctggcgctgctgcccctggtgcctgacggaggatgagaaggccgccgcccgggtggaccaggagatcaacaggatcctcttggagcagaagaagcaggaccgcggggagctgaagctgctgcttttgggcccaggcgagagcgggaagagcaccttcatcaagcagatgcggatcatccacggcgccggctactcggaggaggagcgcaagggcttccggcccctggtctaccagaacatcttcgtgtccatgcgggccatgatcgaggccatggagcggctgcagattccattcagcaggcccgagagcaagcaccacgctagcctggtcatgagccaggacccctataaagtgaccacgtttgagaagcgctacgctgcggccatgcagtggctgtggagggatgccggcatccgggcctgctatgagcgtcggcgggaattccacctgctcgattcagccgtgtactacctgtcccacctggagcgcatcaccgaggagggctacgtccccacagctcaggacgtgctccgcagccgcatgcccaccactggcatcaacgagtactgcttctccgtgcagaaaaccaacctgcggtgagcgctccacctaggccca

SEQ ID NO: 58575 - DNA, 315 bp, Homo sapiens
aggaatagttttcatgattcaacttattgaaataaacaaacagaaagctagtcgacaaaaacttcccattctgaaggtacagagagcatttctccactgctgtttgagcaattttgcatcctgccatccatctcatgatgacttcgaagtcaccattgctgattctggtatcaaaaaaaaaaaaaaaaaaaaaaggaaaaacctaaatgtgaagaaaatctatagctattgaatttgcacttatatcatgttaatggaacatattattcagcaagcctgtgtcctctgcataaacatagttctttttagttcacg

SEQ ID NO: 58576 - DNA, 303 bp, Homo sapiens
atttttttcttttttagctgtatacagttaattcagtatctaaatattctatcagtgatttataatcaaacatgtgttctaaactttataccaaagtggcctcaactaaaatcaaagacttgtggaaagttaacatggacaacaatgaaccaccttgggtcatgctgccttttttcatttgcaaaaaatgctcatgttgcagcagttcttgcattactagctttgcccactctacttgaacagcataaacacagtttctggcaactaacattttaatattggacaccttctatcattatcatt

SEQ ID NO: 58577 - DNA, 168 bp, Homo sapiens
ccatttctcttttacaattatttattcattcatgttgtctacctttttctctagattaaaaacttaattatagttattttaagtccctatctgataattttaacatctgcatcacatctgtttctggtaatgttgactactttatcttttgaccaagagtcttcattt

SEQ ID NO: 58578 - DNA, 355 bp, Homo sapiens
ataccttctttcatttaagccacccagtctatggtacttcgttatggcagccttagcaaactaatacggattcctcatcaggttcagattttgctaaataaaatgtgtttgtgagggtggtacaagcaacagtgatatatttctttaagtattttcccccagccaaattccaacaagacaataatgtctaatgcactgtctggtgaatcggaaaatctcctgaatgaaataagagcctctaatacccaaaagggaatgaagtgagtcatcaccacagcctgtgaatgaaaataactgctctgagaaaacacatgtaaaaaatgacaccatgtggattaaatagggaaacacaagt

SEQ ID NO: 58579 - DNA, 291 bp, Homo sapiens
ttaattcaccaaaaggataaagggtgagagtacaagtgtagccaagcagttgtgcttattaatagatttgttctaggattatcaaatatatcaaagaagccttccttaggtcccacatccgtggcatgcaggggattcggcagaatgggatggagtttattggggtggggtaggttactatttagacttacacttactcatgcttttcctttcacatcaggctctccatgaggaccctctgtcacccaactcttaattcatttatggtgctcttgttccctctcatggact

SEQ ID NO: 58580 - DNA, 1136 bp, Homo sapiens
ggcctactcaaagtcctatctgggaaaatgctatctggtggtaatgtgtaattttcaatttttaaaaaaaattggttctgtaatagtcttttaggcccttcccctttgtataaagatgtatttataagtaaatgaattatgaaattggttcatttccatctttttaaaaggtagtcaaaaataattgtcagatgcaatgagatattggatgagctgcataggtaagatataagcagtgtacaaagtgggataaaaatgccactttacatacttttttttttttttgagaaagagttttattcttattgcccaggatgaagtgcagtggcgcgatctcagctcactgcaacttccaccttccagtttcaagcaattcttctgccctagcctcttgagtagctgggattacaggcatgtgccaccatgcctggctaattttttttgtatttttattggagacggggtttcaccatgttggccaggctgtctggagctcctgacttcaggtgatctgccgacttcgacctcccaaaatactgggattataggcgtgagccaccacacccagtccacttttcatactttctaaaacaatatttagggatttttgtgttagccactctcctatctcatttctccaattgaagtaatgcataaatcttccattctcttttttctctcattcatggatagaatgaatgtctataatgaaaagagcttcttatcaatagccctctcagatttgttctgaattttgccaaatatttgtataactctgcaaaagactttctttccctgccttctcctttagagggaaaaacaaactgtaggtgtgacagcttacctcctagcattgttgtgaggtttggctggcacaagataaagtgctgtgtaattactctgaaatgtttgtaattaataaagaaatgaattgtaggcactttgtcagtagaaaccactgtgatttggaaacgcaatgtttcaataataaagactataaaatttaaaaaagaaaaaaattaattctctccaaattataaattaaatggtatacctaatgactttccttagaacttgaaaagcttaacccaaaatttatatgaaaaggcaagagcctggaatggttaagacaacgt

SEQ ID NO: 58581 - DNA, 919 bp, Homo sapiens
acctgagacactgctgatgcatttctggcctcgtagtttctgctgtgataaataaagccattctaatttggggtcctttgaggtaacctctagttacttttgggagcttttagtataatctcttaatcctcaggttacccaaaattcatcatcaagcctcttggtctgaggttaataatctatcagtcccttttttttttttttcctgagatggagcctcgctctgtcagccaggctggagtgcagtggcacaatctcgactcactgcaagctctgcccctgggttcacgccattctgctgcctcagcctcccaagtagccgggactacaggcacccaacaccacacccagtccacttttcatactttctaaaacaatatttagggatttttgtgttagccactctcctatctcatttctccaattgaagtaatgcataaatcttccattctcttttttctctcattcatggatagaatgaatgtctataatgaaaagagcttcttatcaatagccctctcagatttgttctgaattttgccaaatatttgtataactctgcaaaagactttctttccctgccttctcctttagagggaaaaacaaactgtaggtgtgacagcttacctcctagcattgttgtgaggtttggctggcacaagataaagtgctgtgtaattactctgaaatgtttgtaattaataaagaaatgaattgtaggcactttgtcagtagaaaccactgtgatttggaaacgcaatgtttcaataataaagactataaaatttaaaaaagaaaaaaattaattctctccaaattataaattaaatggtatacctaatgactttccttagaacttgaaaagcttaacccaaaatttatatgaaaaggcaagagcctggaatggttaagacaacgt

SEQ ID NO: 58582 - DNA, 210 bp, Homo sapiens
ctccccaaagttgaccagatagatgtatcatctttccggatgtgaattatttcggctgtgtgctatgagaactgggtatggtgggaagtaattgtttttctggctctcatcaggtcctggttcctggttgcttttctttacccgagagggccacaaaagataccactctcctgagacttccaagttccccttcagcaagaccctcattcc

SEQ ID NO: 58583 - DNA, 261 bp, Homo sapiens
aaaaatttagtgaagacgtgaatagatatttctgcaaagaaaacatacaagtggtcaataggtatataaaaggtattcaatatcactaatcatcagggaaatgcaaatcaaaaccacaatgagttatcttctcataccttttatgatggctaatattaaacaagagataacaagtgtttatgggggtgtggagaaaagagaatgttcgaacactcttggttgaaatataagttggtagaaccattatgcaaaacagtatga

SEQ ID NO: 58584 - DNA, 267 bp, Homo sapiens
gctcatgatgtattggtaatattttctgggttttcccttttgggatgctgagcacgaaagactccttagtaattattttgtagtagattgttctttttgtaattgctagtctgaaaatcacatgtaaattacatatagtatactaagctaaacaagaatattaatattgttgcttccctgtgagaagcagaagcatctaaaaaaaactctagattttataataatgctaactgttataccaccaaataaagaaacaaatcatagcct

SEQ ID NO: 58585 - DNA, 941 bp, Homo sapiens
atcccaatggccctgtccttttctttactgatggccgtgctggtgctcagctacaaatccatctgttctctgggctgtgatctgcctcagactcacagcctgggtaataggagggccttgatactcctggcacaaatgggaagaatctctcatttctcctgcctgaaggacagatatgatttcggattcccccaggaggtgtttgatggcaaccagttccagaaggctcaagccatctctgccttccatgagatgatccagcagaccttcaatctcttcagcacaaaggattcatctgctgcttgggatgagaccctcctagacaaattctacattgaacttttccagcaactgaatgacctagaagcctgtgtgacacaggaggttggggtggaagagattgccctgatgaatgaggactccatcctggctgtgaggaaatactttcaaagaatcactctttatctgatggggaagaaatacagcccttgtgcctgggaggttgtcagagcagaaatcatgagatccttctctttttcaacaaacttgcaaaaaggattaagaaggaaggattgaaaactcattcaacatggaaatgatcctcattgattaatacatcatctcacactttcatgagttcttccatttcaaagactcacttctataaccaccacaagttgaatcaaaatttcaaaatgttttcaggagtgtaaagaagcatcgtgtttacctgtgcaggcactagtcctttacagatgaccatgctgatgtctctattcatctatttatttaaatatttatttatttaactatttttaaggtttaaatcatgttttatgtaatatcatgtgtacctttacattttgcttaatgtaacaatatatgttcttcatatttagttaatatattaacttccttttcattaaatttttactatacgc

SEQ ID NO: 58586 - DNA, 599 bp, Homo sapiens
  misc_feature (484)..(484): n is a, c, g, or t
actaactacaaaggggaacaaggaaacctcttgggagataatgaaaatattctgcatcagccaggcatggtagtttatgcctataatcccatcactgtgggaggcaggaagatcacttgaggccaggagttccaaaatattctgtatcttgattgtggtggtagttacacaactgtataaatttgtcaaaattcaaagaactatacacctaaagggaagacttctactgtacgaagtatacctcataaataaccaaccaaaaaacctctgttctcattttagttttcctaccacttatattaaaaaagagaggctttggctgggcccagtggctcacacctataatcccagcactctgggaggccgaggtgggtggatcacccgaggtcaggagttcaagaccagcctggccaacatggtggaaccctgtctctactaaaaatacaaaaattagctgggtgcagtggcacgcgtctgtaatccnagctacttgagaggctgaggcaggagaatcgcttgaactcaggaggcggaaggtgcagtgggcccagattgcaccactgcactctagcctgggggacagagcaagactccatctc

SEQ ID NO: 58587 - DNA, 356 bp, Homo sapiens
gcacctggccgtttatttttaataaaatataatgccaaatgttcagaatatttggagactggtaaagttcatataagttgtaaatatttttactacctctttcaatcatttctcaagaattaaattccaagagtgatgagtttacactgtatgtgaatagcacagacgtgtctgaactctccacgctgacgaccttccagcactaataaggccttctcccctccagtgcctttggtaatgggcatctccctttccaattcagccacttacatcgtatttaagattatgaataagctttcattaccacacactctgccctttgtcacagccagggacatgaagtcgaacaaacaagt

SEQ ID NO: 58588 - DNA, 568 bp, Homo sapiens
gaaatgcaccatttaagttccagagatgatactccattgccaataaggccatgaaaaacagaatcatgtttaaaatccttctgagaaagcctgtattgtttctaagtgatacttgccagcaacgcaggaaaacaagctagtctcaggatgcctggggttgacatggggaaggaaaacaaaggcattggggcagctccctggacccaagcctcagaccttgtcgtcacttagaggaagtgcccagggacgcatgcttctggttggtatttgtgtgagctgataggctttgatgatgggcttgggtgtgtgtgtgcacgtatgcgtttaatagcaagttcaagttcagtgtaactgcctttggaacaatagtttccattctctgcagccagtacctgggtcactcccttgataatgggctcactgtacagctgtgaactgtgaattcagggacatgtatttctgcccagccttgaggttgcaagcacccagcacatccacacacctcgatgaaaggggcttctggaatgccatttgcacatctaaataaatccaccctcaaccgtaaaat

SEQ ID NO: 58589 - DNA, 336 bp, Homo sapiens
caatataatgggtcatccactttatttatagttgagttgggaacatttagggagatttaccaacataatgcaagcattaatttttggtttggaaagaacaaactgaatgaaataagagtaaaaggtcctataaaaggtatttagtttactcataaagccagattttatatgcgtatataccatatattattttatttaacaaatatttaataatttccattaagcctatgaataaatactaatcactgtggaagaagaaactcggaattagggagacaaaattgtactagcatcattttcacaattgttgctttgaatcatggtcatgtttgtaac

SEQ ID NO: 58590 - DNA, 200 bp, Homo sapiens
ataaaaacatgctctgttgatctgattttaacaactctaaaataaaatcctatgctacacatattcctaagtccctgttcacaaccggtcattctccaatcttgccttggtacttattctgctgtaactgtacttatattccagaacaagaaatagctttgctaaacaaagattagactaacatatgctattacctatag

SEQ ID NO: 58591 - DNA, 836 bp, Homo sapiens
ttttattgtttttggcatgtggatatccaattatcccactacgatttgttgaaagattctccttttgaggatttttttctgaacgattattatctaaagtgtgttgttgctttagggtcacagtatgcttgtgtgcatctgttaccatgtcactgtggtccttcgctgagtgcccttaggggactagaatctttccaataaaccacgtttgagatcgtatgagtcagcgtgcagtgtagcccacacttgagagtgtggatttatgtgcacagtcactttgctctgggtggaagtaggttatagttgacttactttctcggtgcttgttcctacagcccctcttttcatgtgttgctcaatctccctatcccttcttggtgcttgcacatctcagaccctttagccagaccctttagccaaacccttgccaataacagtatttttgttctcagttctgttccctctggttgcggagactttgaataaaaatgcacacacctattcagtgggatttagctggaaaaggtgaccttccaacctcacgtcaacttctggctcctcaaacagtaggttggcagtaaggcaggaaagttgttttcccatttctcactgagcagattgtgaatatttccatatggattttctgttgttaatgttgctccgattctttgttttaaaataaaaattctgaatgtgaaaaaaagagactctcctttcttccattgaattgtttggacacctatgttgaaaatcattggctataattgtaagagtttatttgtgaactctcgattctcttccattgatatatatacctatccttgcatcaataccac

SEQ ID NO: 58592 - DNA, 338 bp, Homo sapiens
tgtctgtatttattaaattgcctttactacttttagatgtccatacgttttcaaaagcaaagacctagtaagccatttgtgttcatttgctaagctatcttaggtacaggtccagattataaatgttacctgctaatcagagagcaaatttttaaattaatcacttgtaaatccacattaaaagaaaaagaaacttagaaaaacacataaatttcttttgtgatcccactattcaggaaaatccattgaaaaagcagatgacttatccgtgttaaatttttaaagcccctattaaactgtcatgtaagttcttatttatctaatttttaaacacatat

SEQ ID NO: 58593 - DNA, 367 bp, Homo sapiens
tgaattctttaaaaaaaaaaaaatgagggcagccctcaagtggggcctggcaagcttgtcatttgcaaataaatcaaaagaccatcattgcaggaaggagaaccaatgaatagagttgctttgtcattctttgatgggccccacactcaagcccgctattaaaaatgaatgcattcaagagcctctgcattaagaacataaacaattaagggcacttgagttgctctgctgagagctgctgcgaagataggagagctttctccggagatgcaggcccctgcaatctgcctcacgaggagctagagaatgggagcaattagtgttgctatctgtgcccaagcagccttcagcacggttttttttttcc

SEQ ID NO: 58594 - DNA, 466 bp, Homo sapiens
aattttaactgttttgtgattcagcatagctctgtaaaaagggtgcttttttcctcttaaactttaagctttatgcactgctttttttttttttcacattttatggcgtgtctgcctgtgtctggtcagattcagtaggatgggccagtggagaagggaagatgtgtgccccaaggtgaggcaggaaagggaggaagtccatctgccatgggacaggctctctggagggcccgacagtggccctacaaaagtggtcaggaagccttggtgtggagcctccactgtgaggttatgagcaatcctcataagcagcaggaacaggtgatgcgtagacgttcacatggactggccaggcatggtggctcacacctgtcatcttagcattttgggaggccgaggcaggacaattgcttgagctcaagagttcaagaccagcctgagcaatatagtgataccttatctcaaa

SEQ ID NO: 58595 - DNA, 325 bp, Homo sapiens
ccagttaattttgtaaagtttatagagatggtttcagttagacctgtgctgtcaatacactagcaattcacatgcacatttaaatttaaatctaagtttaaatttaaattaagttaatattaaataagatttgaaatgcaattctcagtcctacaagccatgcttcaagtgcttcatatccatgtgaggttagtggctgctatactggatagtgcaaaaagagaacattattgtaatcatagaaattctattggtaagtttatgggtagtacatggactagaatgtagtgagtagtgagctgtggatgcagagaaagacactgga

SEQ ID NO: 58596 - DNA, 448 bp, Homo sapiens
gccttcctggttctgacttgccatgaattgagccacagatctgggcagggaaggtgacaggcctcgagtgaggcagagcttctgagaaaggctgtggggttggctgtacctgtcccacgatgggctggtttgccatgtcaggttctggccaagggctgatgtgtttatctcatccattgggcccagaactgtggaaattgttcgctcactgatttgttgctcactcccccatcaggggtccattgccctgtctggcatctatgaggacctgtgggtgccaggagtgaagaggcagagatgagcttgtcctggtccttgggatgattattttttgaaaggtaaaatggaccatggggagcccctgccattttctgaggcctcatgaggattctttctcacacaggctcagctggaagctcagaaagccacgcaggacttccagagggcc

SEQ ID NO: 58597 - DNA, 95 bp, Homo sapiens
ggtgaggcacaaaaattaggttcagaaagctacacaaggttaagcagaaagaggtgctactcagtacaatttggtagtgacacagcctatccaag

SEQ ID NO: 58598 - DNA, 191 bp, Homo sapiens
  misc_feature (149)..(149): n is a, c, g, or t
  misc_feature (191)..(191): n is a, c, g, or t
tgtggagagtgagaggcagaactcggactcagtccagaggtagcttattgccaaagcccaagcctacaacaaccctatctgcccaccccaccttgctggagcagagagctcaaggaagcgggcagagggaactggcgccagacgctaancctgggcttaatgtgtggccaggattatctaaggaccaggcn

SEQ ID NO: 58599 - DNA, 172 bp, Homo sapiens
gcaaccctcctgtcagtggcctgtgcttgaggagccaagaatcagggactgcagaacactcagaaatgccttccaaggagtgtctcagactcctgcctctgccacctttcctgagtctagggtcctagcctggcccagctcccttgggtgtcctggtttgctctgcctgtgg

SEQ ID NO: 58600 - DNA, 783 bp, Homo sapiens
aaagaacacctaccatgcatacttctagggtagttattgagctcaaatgaaatatttgaaagttcttagcaaaaggtaactgaatattattacgatttttgttatagctgtagtaaattcctgccattctttggggttacatacagcagaatagtcttctgaatccctttagtagagcatagcactggttagaatgctggtgctgaagagaccttgctaggtcagcacattacctacattgactcattcttccacatgggccatgtggtgctgagttcaaatttgtgctagttggctattaatataatccttacaacaacactatttaagtccacccattccaagtcagtacatggccgggacctttactttgactgcagttgccaaagttgattgtataaaacaggagtcagcaaattacaacctgcctctcatctttgtaaatacagttcttttggaacacagccaagcccatttgtttgcatattgccaatggctgctttcatactataatggcagggtttacttgtgatagggttcatatatccctcaaagtgtattactgtttggccctttacataaaaagtttgccaactcattataaactaaacagcaagagataattttttggagcatgcagtctgaatatgaaaggaaagagaaggaagatgtaagaagagttccatttgtaatattgtgttaatttcttcataagtaagaggttattgaaaatattgaaatgacttcataggtcctagcactctgttgagagttttattgtga

SEQ ID NO: 58601 - DNA, 300 bp, Homo sapiens
cacaactaattggtaagccccttgagcgcaggaactggttttttaaagaatgatgtattcttcacagtgctttccctttctgttacccagggagcacatggcaatataagggctcctgggattgaatcttaagtacagagaaaacctaagaatgcttttagatagacagataagagaccagtagagaagagcagattgaaggtatgtgtgagaaacgttatgtaatgaaaagataattgatgacacacacttccagagggtgctggcgagattgattcaaaagcacacggctagggcact

SEQ ID NO: 58602 - DNA, 410 bp, Homo sapiens
agcaacagaagaaagggccacatatatgcaaatgcctggtcactatatctggccctgaagaaggaaggagtttgcagggctcaggagactggaaatttttgccaggagctaggaacgaggggttgggagacgttggtcaaagggtacaaagtcccagttatgcaggatgaataagttctgaagacctaacatacagcccagtgaccatagtgaataacactgaatgaacagtatactcgaaatttgctaacagaagagatcttaagtgttctcataacacacaaaacatagcaactgtatgaggtgatgggtatattaattagcctgactgtggttatacatttatcaaaatgtcacactgtggctgagtgcagaggctcatacctataatcccaacattttgggaagct

SEQ ID NO: 58603 - DNA, 489 bp, Homo sapiens
ttgctctacctgccactaccctgaacctttttttttttcaacccccttaacctctttaaagagcttctggcatgctcatgggtttttctttctagaactttccctgccctgaatttgttcagtatgcattgtcacttgtgaggacttcttttcacaataaatacccaagtgctttagaatgtctggatggtggccaggcacagtggctcaagcttgtaatcccagcaatttgggaagctgaggcagacggaacccttgaaatcaggaattcgtgacctgcctggccaacatggtgaaaccctgtctgtactaaaaatacaaaaattagccaggtgagtgtaatattttttaagtgagaaagacttgaagtggccgggcgcggtggctcacgcctgtaatcccagcactttgggaggccgaggtgggcggatcacgaggtcaggagatcaagaccatcctggctaacatggtgaaaccccgtctctacta

SEQ ID NO: 58604 - DNA, 301 bp, Homo sapiens
ggctctgtgtccccagccaaatctcctctccaattgcaatccctgtatgtggagggagggacctggtgggaggtgattggatcatgagggcgaatttctcccttgctattctcatgataataagttctcataagatgtgatcgtttgataactgtccggagcttccctcttctctctctctctccctctttctcctgctaccatgtaagacatggcttgcttccccttcaccttccaccatgattgtaagtttcctgaggcctcccagccatgcagaactgtgagtcaattaaacttcttt

SEQ ID NO: 58605 - DNA, 602 bp, Homo sapiens
ggggcgtcttcggtcatctccggcgcttctagggctggttcccgtcatcttcgggagccgtggagctctcggatacagccgacaccatgggtttcggagacctgaaaagccctgccggcctccaggtgctcaacgattacctggcggacaagagctacatcgaggggtatgtgccatcacaagcgtcatgccctacgttggtataatcacatcaagtcttacgaaaaggaaaaggccagcctgccaggagtgaagaaagctttgggcaaatatggtcctgccgatgtggaagacactacaggaagtggagctacagatagtaaagatgatgatgacattgacctctttggatctgatgatgaggaggaaagtgaagaagcaaagaggctaagggaagaacgtcttgcacaatatgaatcaaagaaagccaaaaaacctgcacttgttgccaagtcttccatcttactagatgtgaaaccttgggatgatgagacagatatggcgaaattagaggagcgcgtcagaagcattcaagcagacggcttagtctggggctcatctaaactagttccagtgggatacggaattaagaaacttcaaat

SEQ ID NO: 58606 - DNA, 834 bp, Homo sapiens
  misc_feature (77)..(77): n is a, c, g, or t
  misc_feature (92)..(94): n is a, c, g, or t
ggggcgtcttcggtcatctccggcgcttctagggctggttcccgtcatcttcgggagccgtggaggtacgaacttangacatgcctattttnnnaatttacttccaaacgcaacgaaaggtccatggacaatttgtgggccatttaattcagggcccccaattcgtacgtggagaagtgggaatgcgtactttgacctttaaccttcggtccggcgcggtggagggcgcctccgtctctatataaggaattttccggtctcttcgggtcctttttcctctcttcagcgtggggcgcccacaatttgcgcgctctctttctgctgctccccagctctcggatacagccgacaccatgggtttcggagacctgaaaagccctgccggcctccaggtgctcaacgattacctggcggacaagagctacatcgaggggtatgtgccatcacaagcagatgtggcagtatttgaagccgtgtccagcccaccgcctgccgacttgtgtcatgccctacgttggtataatcacatcaagtcttacgaaaaggaaaaggccagcctgccaggagtgaagaaagctttgggcaaatatggtcctgccgatgtggaagacactacaggaagtggagctacagatagtaaagatgatgatgacattgacctctttggatctgatgatgaggaggaaagtgaagaagcaaagaggctaagggaagaacgtcttgcgggggctgccggcagcccccgcaagacggaagaagccacagagagaaccaccagcattgccaccaccaccaccaccaccacagagtctgtggaagaggtggttcgagagg

SEQ ID NO: 58607 - DNA, 780 bp, Homo sapiens
  misc_feature (77)..(77): n is a, c, g, or t
  misc_feature (92)..(94): n is a, c, g, or t
ggggcgtcttcggtcatctccggcgcttctagggctggttcccgtcatcttcgggagccgtggaggtacgaacttangacatgcctattttnnnaatttacttccaaacgcaacgaaaggtccatggacaatttgtgggccatttaattcagggcccccaattcgtacgtggagaagtgggaatgcgtactttgacctttaaccttcggtccggcgcggtggagggcgcctccgtctctatataaggaattttccggtctcttcgggtcctttttcctctcttcagcgtggggcgcccacaatttgcgcgctctctttctgctgctccccagctctcggatacagccgacaccatgggtttcggagacctgatcgaggggtatgtgccatcacaagcagatgtggcagtatttgaagccgtgtccagcccaccgcctgccgacttgtgtcatgccctacgttggtataatcacatcaagtcttacgaaaaggaaaaggccagcctgccaggagtgaagaaagctttgggcaaatatggtcctgccgatgtggaagacactacaggaagtggagctacagatagtaaagatgatgatgacattgacctctttggatctgatgatgaggaggaaagtgaagaagcaaagaggctaagggaagaacgtcttgcgggggctgccggcagcccccgcaagacggaagaagccacagagagaaccaccagcattgccaccaccaccaccaccaccacagagtctgtggaagaggtggttcgagagg

SEQ ID NO: 58608 - DNA, 919 bp, Homo sapiens
  misc_feature (77)..(77): n is a, c, g, or t
  misc_feature (92)..(94): n is a, c, g, or t
ggggcgtcttcggtcatctccggcgcttctagggctggttcccgtcatcttcgggagccgtggaggtacgaacttangacatgcctattttnnnaatttacttccaaacgcaacgaaaggtccatggacaatttgtgggccatttaattcagggcccccaattcgtacgtggagaagtgggaatgcgtactttgacctttaaccttcggtccggcgcggtggagggcgcctccgtctctatataaggaattttccggtctcttcgggtcctttttcctctcttcagcgtggggcgcccacaatttgcgcgctctctttctgctgctccccagctctcggatacagccgacaccatgggtttcggagacctgaaaagccctgccggcctccaggtgctcaacgattacctggcggacaagagctacatcgaggggtatgtgccatcacaagcagatgtggcagtatttgaagccgtgtccagcccaccgcctgccgacttgtgtcatgccctacgttggtataatcacatcaagtcttacgaaaaggaaaaggccagcctgccaggagtgaagaaagctttgggcaaatatggtcctgccgatgtggaagacactacaggaagtggagctacagatagtaaagatgatgatgacattgacctctttggatctgatgatgaggaggaaagtgaagaagcaaagaggctaagggaagaacgtcttgcacaatatgaatcaaagaaagccaaaaaacctgcacttgttgccaagtcttccatcttactagatgtgaaaccttgggatgatgagacagatatggcgaaattagaggagcgcgtcagaagcattcaagcagacggcttagtctggggctcatctaaactagttccagtgggatacggaattaagaaacttcaaat

SEQ ID NO: 58609 - DNA, 606 bp, Homo sapiens
  misc_feature (77)..(77): n is a, c, g, or t
  misc_feature (92)..(94): n is a, c, g, or t
ggggcgtcttcggtcatctccggcgcttctagggctggttcccgtcatcttcgggagccgtggaggtacgaacttangacatgcctattttnnnaatttacttccaaacgcaacgaaaggtccatggacaatttgtgggccatttaattcagggcccccaattcgtacgtggagaagtgggaatgcgtactttgacctttaaccttcggtccggcgcggtggagggcgcctccgtctctatataaggaattttccggtctcttcgggtcctttttcctctcttcagcgtggggcgcccacaatttgcgcgctctctttctgctgctccccagctctcggatacagccgacaccatgggtttcggagacctgaaaagccctgccggcctccaggtgctcaacgattacctggcggacaagagctacatcgaggggtatgtgccatcacaagcagatgtggcagtatttgaagccgtgtccagcccaccgcctgccgacttgtgtcatgccctacgttggtataatcacatcaagtcttacgaaaaggaaaaggccagcctgccaggagtgaagaaagctttgatgtgatataccaatcgtaggcata

SEQ ID NO: 58610 - DNA, 867 bp, Homo sapiens
gtagtaatatgttcatagaaactttattcacagcagccaattactggaaattacccaaatgatctaaaaacagtataagagataaatgagttgtggcatggtcatacaacagactccagcagtaaatttgagcaaacttcagttgcatgcaacaatatggatgaatcttacaattacaatgttgagtgacagaagccagacaaaggttcatagtgtgtgattccatttacataaagctgaagaacagacaaaactaatctacagagtcagaagtcaggatggctgtaacccttgtcagggcagagggtcctagcattggaagggtacacgaggggggtttctgggatgccggcatccttctgtttcttgattgtggtgctgattttatgaatgtgttcattttgtgacaattcattgagctctgctcttatgatttatgtgcttttctatatatgtacaagacttcaacaaaaagttaagcatatatgctgaaagtgagtaattttttgtctaccactggctactaaagatggaagcttgtttagatggaaaattattcattaaatagtttgagtttagaaaaagaagattttataaggtatatttaccagagaattgtacttatttgcataaaaattgtttttcctagaagaaaagaccttttttatcccaggtgctagacttcatcttattcttactagaaaacttttttggctattttatttgtgaatttgggccataaacctatgtgaagaccagcttgtgattgcagaacacacaagagactttccctttctacactacggtcagggattttcttttacttttttatttttccctagtcttggagtggataggatgataggt

SEQ ID NO: 58611 - DNA, 1260 bp, Homo sapiens
aggccaggcggagggggcggggcttcggccggctaagccgcggccacccgcggtctgagggaccggaggagcggggccgggagctgcgaggagccctccagacgtcgccgagcgcgagggcgggcgtgctcggagtggtcgctcgtcagccgccgcccctcagtctccgcacttgcaggtcccctccctctccgccgggacgcgggagagcccggctcgcggcgggggcggccaatgcgaaactggctggtgctgctgtgcccgtgtgtgctcggggccgcgctgcacctctggctgcggctgcgctccccgccgcccgcctgcgcctccggggccggccctgcagatcagttggccttatttcctcagtggaaatctactcactatgatgtggtagttggcgtgttgtcagctcgcaataaccatgaacttcgaaacgtgataagaagcacctggatgagacatttgctacagcatcccacattaagtcaacgtgtgcttgtgaagttcataataggtgctcatggctgtgaagtgcctgtggaagacagggaagatccttattcctgtaaactactcaacatcacaaatccagttttgaatcaggaaattgaagcgttcagtctgtccgaagacacttcatcggggctgcctgaggatcgagttgtcagcgtgagtttccgagttctctaccccatcgttattaccagtcttggagtgttctacgatgccaatgatgtgggtttccagaggaacatcactgtcaaactttatcaggcagaacaagaggaggccctcttcattgctcgcttcagtcctccaagctgtggtgtgcaggtgaacaagctgtggtacaagcccgtggaacaattcatcttaccagagagctttgaaggtacaatcgtgtgggagagccaagacctccacggccttgtgtcaagaaatctccacaaagtgacagtgaatgatggagggggagttctcagagtcattacagctggggagggtgcattgcctcatgaattcttggaaggtgtggagggagttgcaggtggttttatatatactattcaggaaggtgatgctctcttacacaaccttcattctcgccctcaaagacttattgatcatataaggaatctccatgaggaagatgccttactgaaggaggaaagcagcatctatgatgatattgtttttgtggatgttgtcgacacttatcgtaatgttcctgcaaaattattgaacttctatagatgg

SEQ ID NO: 58612 - DNA, 1159 bp, Homo sapiens
aggccaggcggagggggcggggcttcggccggctaagccgcggccacccgcggtctgagggaccggaggagcggggccgggagctgcgaggagccctccagacgtcgccgagcgcgagggcgggcgtgctcggagtggtcgctcgtcagccgccgcccctcagtctccgcacttgcaggtcccctccctctccgccgggacgcgggagagcccggctcgcggcgggggcggccaatgcgaaactggctggtgctgctgtgcccgtgtgtgctcggggccgcgctgcacctctggctgcggctgcgctccccgccgcccgcctgcgcctccggggccggccctgcagatcagttggccttatttcctcagtggaaatctactcactatgatgtggtagttggcgtgttgtcagctcgcaataaccatgaacttcgaaacgtgataagaagcacctggatgagacatttgctacagcatcccacattaagtcaacgttttgaatcaggaaattgaagcgttcagtctgtccgaagacacttcatcggggctgcctgaggatcgagttgtcagcgtgagtttccgagttctctaccccatcgttattaccagtcttggagtgttctacgatgccaatgatgtgggtttccagaggaacatcactgtcaaactttatcaggcagaacaagaggaggccctcttcattgctcgcttcagtcctccaagctgtggtgtgcaggtgaacaagctgtggtacaagcccgtggaacaattcatcttaccagagagctttgaaggtacaatcgtgtgggagagccaagacctccacggccttgtgtcaagaaatctccacaaagtgacagtgaatgatggagggggagttctcagagtcattacagctggggagggtgcattgcctcatgaattcttggaaggtgtggagggagttgcaggtggttttatatatactattcaggaaggtgatgctctcttacacaaccttcattctcgccctcaaagacttattgatcatataaggaatctccatgaggaagatgccttactgaaggaggaaagcagcatctatgatgatattgtttttgtggatgttgtcgacacttatcgtaatgttcctgcaaaattattgaacttctatagatgg

SEQ ID NO: 58613 - DNA, 348 bp, Homo sapiens
ttatttcctcagtggaaatctactcactatgatgtggtagttggcgtgttgtcagctcgcaataaccatgaacttcgaaacgtgataagaagcacctggatgagacatttgctacagcatcccacattaagtcaacggtaggttttctgagttgttgccttgcctggtttattgaaataagagttctgaaaaacctagccaggcgtggtggtgtgtgcccgtcgtcccagctaccggggaggctgaggtggaaggattgcttgagcttggaaaattgaggctgcagtgagccatgattgcaccactgcattctagcctgcatgatgggaatgagtccctgcctaattt

SEQ ID NO: 58614 - DNA, 306 bp, Homo sapiens
  misc_feature (19)..(19): n is a, c, g, or t
aaaaatattgatgtccttnaccgggtgcggtggctcacacctataatcccagcactttgggaggccgaggtaggcagatcacctgaggtcaggagttcaagacccttggattaggcaatagtttcttgagtgaaacaccaaaagcatgtacagcaaaagaaaaatatagataaatcagactttatcaaaattttaaacttttgtgcttcaaaggacactagcaagaaagtgaaaagagaactcaaagatggaagaaaatatttgcaaattttatatttgataaagagtataccagatatataaaga

SEQ ID NO: 58615 - DNA, 221 bp, Homo sapiens
ccccttcatcctggagatattcagcaatatccagaagcacttttggttgtcacatcttggggtgggagggttgcctctggcatctagcgggtagaaaccagggatgctgctatatatcctgttccaataattaagaattatctgacccaaaatgtctatagcattgagatagagatatcctgcaccaatccattacagaaccaaaactttactaattacag

SEQ ID NO: 58616 - DNA, 203 bp, Homo sapiens
gtttttaaaaactttacataaatgtctcttgttatatgtgacattctgaaattaccttgttttcattcaacttgctttagaaatttatccaggttgatatatgtaaaaataattcattcatttaattgttataaagtgtcgcattatatgattatactacatttctgcatttttcagaagattaaagaacaagtaagaatttg

SEQ ID NO: 58617 - DNA, 264 bp, Homo sapiens
gcctgtgatgtgactcttgataagtggatttttagaaagtcaccaaatgaagaaacagagagcacactggagaagagctcaagtgaagccagactgcctggtttgcactccagttctgctgtgcaccagcttgggcaagttacttcacatctttgtgttaaatattctagcacatgaatggagaagaatgtttctagttctttccatttgggaggcacagattgtttgtaaggtcatatctatggttaaaccaggcatcttttt

SEQ ID NO: 58618 - DNA, 320 bp, Homo sapiens
aagtcccaatctctgcctcctctagttcctcaggtgcttgacctggagatctactttatgaatctgtctcctggtgacaaccttcctccttgtatcaagcagctagatgcaatctagttgacttgctctgctgaccccagcactccacgtggacggcatagatttacagcagtgaccacctttcagtcactgtgtgactataggaaactcgtgcctactttttgtaaacccaccgattccaactgcctgcagaaaacctgcttgggtaactttattgggaccccaataaagactttggcaaacaggtctctctctctctg

SEQ ID NO: 58619 - DNA, 316 bp, Homo sapiens
aaacactaactccgcattcctccctcccccgagccctggcagctaccatttcaccttctgtctctgtgaatttgattactctaggtagctcatataaatggaatcatacagtgtttgtcctttcatgactggcttatttatatacctagcaaagtgtcttcaggattcctccatgttgtatcatgtgtcagaatttctttcctttttaaggttcaatatatttcattgtatgtatataccatcccctactttttttaaaactaaagggatcatgcctatgtatggtctttctacctgcccaatatgtcagaaaaag

SEQ ID NO: 58620 - DNA, 3344 bp, Homo sapiens
cgggcgcccagagacagcgccgcctcagatatcctgctggatgacattgtccttacccattctctcttcctcccgacggagaaatttctgcaggagctacaccagtactttgttcgggcaggaggcatggagggccctgaagggctgggccggaagcaagcctgtctagccatgcttctccatttcttggacacctaccaggggctgcttcaagaggaagagggggccggccacatcatcaaggatctatacctgctaattatgaaggacgagtccctttaccagggcctccgagaggacactctgaggctgcaccagctggtggagacggtggaactaaagattccagaggagaaccagccacccagcaagcaggtgaagccactcttccgccacttccgccggatagactcctgtctgcagacccgggtggccttccggggctctgatgagatcttctgccgtgtatacatgcctgaccactcttatgtgaccatacgcagccgcctttcagcatctgtgcaggacattctgggctctgtgacggagaaacttcaatattcagaggagcccgcggggcgtgaggattccctcatcctggtagctgtgtcctcctctggagagaaggtccttctccagcccactgaggactgtgttttcaccgcactgggcatcaacagccacctgtttgcctgtactcgggacagctatgaggctctggtgcccctccccgaggagatccaggtctcccctggagacacagagatccaccgagtggagcctgaggacgttgccaaccacctaactgccttccactgggagctgttccgatgtgtgcatgagctggagttcgtggactacgtgttccacggggagcgcggccgccgggagacggccaacttggagctgctgctgcagcgctgcagcgaggtcacgcactgggtggccaccgaagtgctgctctgcgaggccccgggcaagcgcgcgcagctgctcaagaagttcatcaagatcgcggccctctgcaagcagaaccaggacctgctgtctttctacgccgtggtcatggggctggacaacgccgctgtcagccgccttcgactcacctgggagaagctgccagggaaattcaagaacttgtttcgcaaatttgagaacctgacggacccctgcaggaaccacaaaagctaccgagaagtgatctccaaaatgaagccccctgtgattcccttcgtgcctctgatcctcaaagacctgactttcctgcacgaagggagtaagacccttgtagatggtttggtgaacatcgagaagctgcattcagtggccgaaaaagtgaggacaatccgcaaataccggagccggcccctttgcctggacatggaggcatcccccaatcacctgcagaccaaggcctatgtgcgccagtttcaggtcatcgacaaccagaacctcctcttcgagctctcctacaagctggaggcaaacagtcagtgagagtggaggctccagtcagacccgccagatccttgggcacctggcactcaagcactttgcacgatgtctcaaccaacatctgacatctttcccgtggagcaacttcctgctccacgggaaagaggtcgatggatttacccctggacccataagtctgttcatcctgctgaagtcccctccccattgctccttcaagccaaaactacactttgctggttcctgtcccctctgagaaaggggatagaaagctccttcctctatgtcctcccatcgagatctgttctggggatggagcttccaacttcctcttgcagcaggaaagaatgctgctcacccttctgtcttgcagagtgggattgtgggagggattggcagccttcttctccaccacctgtccagcttcttcctggtcagggctgggacccccaggaatattatgttgccgtgtgtgtgtgtgtgtgtgtgtgtgtgtgtgtgtgtgtgtgtgtcttcttttagggagcaggagtgcatctggtaattgagggtggatgttgtgtgtgctggggaggggtccttctgtttggtgctacccttgtctactctgcccctggatggtgcggggtgctttctccacccccacactccctgctcagctcctcgtgctgccctgcatgcccaggcttgtgagccaagctgctttttggggcagggagtagcagcaggtgggaggggttacccatcagcccttgcaagtcccccactcaggcctctggaaggtccagggatgggctctgatgagagggtaaaagatgctcagggaaacacaggcctcagctgcctagaggaccctccccctgccttgcagtgggctcgggtagagcagtatcaggagctagggttgtctgctgcccacactcctgctttttgggatatctaactgctaaggagggagttgacatcccccttctggctcatgtgtctgacaccaacaacatggtctctgtccctctctctttgactctccctttgtcctccccatagagctggggtggggtggatccctatacctggggcaggcagccccaaagtgggggagggggatggcagagactgtaaaggcgccactggactctggcaaggcctttattacctttactcccctccctctcccatcaccagcctcaaggcctgaggggtgcaggggctcctggcagctactgggtgaggtttcctggcacagactcacccttctttctggcaccactctttcccttttgaagagacagcaacagccgtagcaaaagcagctgctgctcctgctatgagggtgtatatattttttacccaaagctctggaattgtacatttattttttaaaactcaaagagggaaagagccttgtatcatatgtgaacattgtatcataggtaatgttgtacagacccttttatacagtgatctgtcttgttcctgcagcaaaaatcctctatggacataggaggtgctgtgtcccatgccctcttgccctgacagtgtcccatgggcccccttctgctccctgccccctccctgctactgctgatgcactctcctctccctgcagcccctggcttcccagccttcctcctgaccccttccaacagccttggaactccagctgccaccaccctctgggtcggacactgggacccactggcccagtcttggctgctgcttacccctagccttgatgcctgcccagggacccccagccccctcccgttgccctgcagctttaacagagtgaaccatgtgtattgtacaggcgcggttgtcattgcagaaaccgctgggtggagaagaagccgataaagtctatgaatcaa

SEQ ID NO: 58621 - DNA, 688 bp, Homo sapiens
cgtgatctcaactcactgcaacctccccctcccgggttcaagcgattctcctgcctcagcctcccaagtagctgggattacaggtgcacgccactacgcctggctaatttttgtgtttttagtagagacggggtttcaccatgttggccaggctggtcttgaactcctggcctcaagtgatctgcccacctcagcttcccaaagtgctgggattacaggtgtgagccactgcacctggcctccacctccttctcttcctgctttcctccaaggcccaggtcaaatgccatcttctcaatgaaaacttcccagatcttccttttaggaatagctttcttcttcccccacaccagcataactctcctggtacctttgttatattatcaacacctcctgcctggtattagaagtagctgtatgcctgtctatctccttcctagactgtgaagttcttttcagcaaaattcagcaaacagctgctgacctactacctaccatgtgtcaagcagtgtgttaggccctggtggatgaaaagatactcagtaagaaccaaatcccagtcctcaagagctctcaatctcatagaagagataagaggtgaacataaacattatcccaatgttctatagtagttgagagatgtggtaagtatctcgctgggaaatccaaagatttctgggtctgtatg

SEQ ID NO: 58622 - DNA, 3490 bp, Homo sapiens
  misc_feature (3481)..(3481): n is a, c, g, or t
cgggcgcccagagacagcgccgcctcagatatcctgctggatgacattgtccttacccattctctcttcctcccgacggagaaatttctgcaggagctacaccagtactttgttcgggcaggaggcatggagggccctgaagggctgggccggaagcaagcctgtctagccatgcttctccatttcttggacacctaccaggggctgcttcaagaggaagagggggccggccacatcatcaaggatctatacctgctaattatgaaggacgagtccctttaccagggcctccgagaggacactctgaggctgcaccagctggtggagacggtggaactaaagattccagaggagaaccagccacccagcaagcaggtgaagccactcttccgccacttccgccggatagactcctgtctgcagacccgggtggccttccggggctctgatgagatcttctgccgtgtatacatgcctgaccactcttatgtgaccatacgcagccgcctttcagcatctgtgcaggacattctgggctctgtgacggagaaacttcaatattcagaggagcccgcggggcgtgaggattccctcatcctggtagctgtgtcctcctctggagagaaggtccttctccagcccactgaggactgtgttttcaccgcactgggcatcaacagccacctgtttgcctgtactcgggacagctatgaggctctggtgcccctccccgaggagatccaggtctcccctggagacacagagatccaccgagtggagcctgaggacgttgccaaccacctaactgccttccactgggagctgttccgatgtgtgcatgagctggagttcgtggactacgtgttccacggggagcgcggccgccgggagacggccaacttggagctgctgctgcagcgctgcagcgaggtcacgcactgggtggccaccgaagtgctgctctgcgaggccccgggcaagcgcgcgcagctgctcaagaagttcatcaagatcgcggccctctgcaagcagaaccaggacctgctgtctttctacgccgtggtcatggggctggacaacgccgctgtcagccgccttcgactcacctgggagaagctgccagggaaattcaagaacttgtttcgcaaatttgagaacctgacggacccctgcaggaaccacaaaagctaccgagaagtgatctccaaaatgaagccccctgtgattcccttcgtgcctctgatcctcaaagacctgactttcctgcacgaagggagtaagacccttgtagatggtttggtgaacatcgagaagctgcattcagtggccgaaaaagtgaggacaatccgcaaataccggagccggcccctttgcctggacatggaggcatcccccaatcacctgcagaccaaggcctatgtgcgccagtttcaggtcatcgacaaccagaacctcctcttcgagctctcctacaagctggaggcaaacagtcagtgagagtggaggctccagtcagacccgccagatccttgggcacctggcactcaagcactttgcacgatgtctcaaccaacatctgacatctttcccgtggagcaacttcctgctccacgggaaagaggtcgatggatttacccctggacccataagtctgttcatcctgctgaagtcccctccccattgctccttcaagccaaaactacactttgctggttcctgtcccctctgagaaaggggatagaaagctccttcctctatgtcctcccatcgagatctgttctggggatggagcttccaacttcctcttgcagcaggaaagaatgctgctcacccttctgtcttgcagagtgggattgtgggagggattggcagccttcttctccaccacctgtccagcttcttcctggtcagggctgggacccccaggaatattatgttgccgtgtgtgtgtgtgtgtgtgtgtgtgtgtgtgtgtgtgtgtgtgtcttcttttagggagcaggagtgcatctggtaattgagggtggatgttgtgtgtgctggggaggggtccttctgtttggtgctacccttgtctactctgcccctggatggtgcggggtgctttctccacccccacactccctgctcagctcctcgtgctgccctgcatgcccaggcttgtgagccaagctgctttttggggcagggagtagcagcaggtgggaggggttacccatcagcccttgcaagtcccccactcaggcctctggaaggtccagggatgggctctgatgagagggtaaaagatgctcagggaaacacaggcctcagctgcctagaggaccctccccctgccttgcagtgggctcgggtagagcagtatcaggagctagggttgtctgctgcccacactcctgctttttgggatatctaactgctaaggagggagttgacatcccccttctggctcatgtgtctgacaccaacaacatggtctctgtccctctctctttgactctccctttgtcctccccatagagctggggtggggtggatccctatacctggggcaggcagccccaaagtgggggagggggatggcagagactgtaaaggcgccactggactctggcaaggcctttattacctttactcccctccctctcccatcaccagcctcaaggcctgaggggtgcaggggctcctggcagctactgggtgaggtttcctggcacagactcacccttctttctggcaccactctttcccttttgaagagacagcaacagccgtagcaaaagcagctgctgctcctgctatgagggtgtatatattttttacccaaagctctggaattgtacatttattttttaaaactcaaagagggaaagagccttgtatcatatgtgaacattgtatcataggtaatgttgtacagacccttttatacagtgatctgtcttgttcctgcagcaaaaatcctctatggacataggaggtgctgtgtcccatgccctcttgccctgacagtgtcccatgggcccccttctgctccctgccccctccctgctactgctgatgcactctcctctccctgcagcccctggcttcccagccttcctcctgaccccttccaacagccttggaactccagctgccaccaccctctgggtcggacactgggacccactggcccagtcttggctgctgcttacccctagccttgatgcctgcccagggacccccagccccctcccgttgccctgcagctttaacagagtgaaccatgtgtattgtacaggcgcggttgtcattgcagaaaccgctgggtggagaagaagccgataaagtctatgaatcaaaataaaaaaaaaaaactcgagggggggcccgttacccaattggcctattgtgagggaataacattcaattggccgcggttttacacgtggggatgggaaaaacctgcgttccccaccttaatggcttgcagacatcncccttttgg

SEQ ID NO: 58623 - DNA, 4195 bp, Homo sapiens
ccgccgccgccgccgccgcgtcctctcagccttgcgctccgcccgctgcctctgccgccgcagcgcagagccgggcgcaccggccccgcagcctgcccactcttcgggccgcgtgccggctgcagccggcatggggggttgctgagagcgagcactcctttcctctggcacctcccccggctactggccactggactctggccagcgaggctcggcccctctggcccccagtctggcgcctggcacggccctctactctgctcctccagctctgagcatcgtgtcttcgccgccccccccgcccgcgcctgggatacctgggtcccccggcgacccctaggagaggggcgggggggggcatgaagccgctggagaaatttctgaagaagcagacgtcgcagctggcgggccgaacggtggcgggaggtcccggcgggggtctggggagctgcggtgggcctggagggggtgggggacccggcgggggcggcggtccagccgggggacagcggtcgttgcagcggcgtcagagcgtgtctcgcctgctgctccccgctttcctccgggagccccccgccgagccggggctggagccgcccctgaggaggaaggaggagagccggcgggggtcgcggaggagccgggcagcggggggccctgctggctgcagctggaggaggtgccggggcccgggcctctcgggggacggggggcccatgcgctccccttcctcctactcatctgacgagctgtccccaggcgagcccttgacttcgccgccctgggcccctctgggcgcccccgagcggcccgagcatcttctgaaccgggttctggagcggcttgctggaggggctaccagggacagcgccgcctcagatatcctgctggatgacattgtccttacccattctctcttcctcccgacggagaaatttctgcaggagctacaccagtactttgttcgggcaggaggcatggagggccctgaagggctgggccggaagcaagcctgtctagccatgcttctccatttcttggacacctaccaggggctgcttcaagaggaagagggggccggccacatcatcaaggatctatacctgctaattatgaaggacgagtccctttaccagggcctccgagaggacactctgaggctgcaccagctggtggagacggtggaactaaagattccagaggagaaccagccacccagcaagcaggtgaagccactcttccgccacttccgccggatagactcctgtctgcagacccgggtggccttccggggctctgatgagatcttctgccgtgtatacatgcctgaccactcttatgtgaccatacgcagccgcctttcagcatctgtgcaggacattctgggctctgtgacggagaaacttcaatattcagaggagcccgcggggcgtgaggattccctcatcctggtagctgtgtcctcctctggagagaaggtccttctccagcccactgaggactgtgttttcaccgcactgggcatcaacagccacctgtttgcctgtactcgggacagctatgaggctctggtgcccctccccgaggagatccaggtctcccctggagacacagagatccaccgagtggagcctgaggacgttgccaaccacctaactgccttccactgggagctgttccgatgtgtgcatgagctggagttcgtggactacgtgttccacggggagcgcggccgccgggagacggccaacttggagctgctgctgcagcgctgcagcgaggtcacgcactgggtggccaccgaagtgctgctctgcgaggccccgggcaagcgcgcgcagctgctcaagaagttcatcaagatcgcggccctctgcaagcagaaccaggacctgctgtctttctacgccgtggtcatggggctggacaacgccgctgtcagccgccttcgactcacctgggagaagctgccagggaaattcaagaacttgtttcgcaaatttgagaacctgacggacccctgcaggaaccacaaaagctaccgagaagtgatctccaaaatgaagccccctgtgattcccttcgtgcctctgatcctcaaagacctgactttcctgcacgaagggagtaagacccttgtagatggtttggtgaacatcgagaagctgcattcagtggccgaaaaagtgaggacaatccgcaaataccggagccggcccctttgcctggacatggaggcatcccccaatcacctgcagaccaaggcctatgtgcgccagtttcaggtcatcgacaaccagaacctcctcttcgagctctcctacaagctggaggcaaacagtcagtgagagtggaggctccagtcagacccgccagatccttgggcacctggcactcaagcactttgcacgatgtctcaaccaacatctgacatctttcccgtggagcaacttcctgctccacgggaaagaggtcgatggatttacccctggacccataagtctgttcatcctgctgaagtcccctccccattgctccttcaagccaaaactacactttgctggttcctgtcccctctgagaaaggggatagaaagctccttcctctatgtcctcccatcgagatctgttctggggatggagcttccaacttcctcttgcagcaggaaagaatgctgctcacccttctgtcttgcagagtgggattgtgggagggattggcagccttcttctccaccacctgtccagcttcttcctggtcagggctgggacccccaggaatattatgttgccgtgtgtgtgtgtgtgtgtgtgtgtgtgtgtgtgtgtgtgtgtgtcttcttttagggagcaggagtgcatctggtaattgagggtggatgttgtgtgtgctggggaggggtccttctgtttggtgctacccttgtctactctgcccctggatggtgcggggtgctttctccacccccacactccctgctcagctcctcgtgctgccctgcatgcccaggcttgtgagccaagctgctttttggggcagggagtagcagcaggtgggaggggttacccatcagcccttgcaagtcccccactcaggcctctggaaggtccagggatgggctctgatgagagggtaaaagatgctcagggaaacacaggcctcagctgcctagaggaccctccccctgccttgcagtgggctcgggtagagcagtatcaggagctagggttgtctgctgcccacactcctgctttttgggatatctaactgctaaggagggagttgacatcccccttctggctcatgtgtctgacaccaacaacatggtctctgtccctctctctttgactctccctttgtcctccccatagagctggggtggggtggatccctatacctggggcaggcagccccaaagtgggggagggggatggcagagactgtaaaggcgccactggactctggcaaggcctttattacctttactcccctccctctcccatcaccagcctcaaggcctgaggggtgcaggggctcctggcagctactgggtgaggtttcctggcacagactcacccttctttctggcaccactctttcccttttgaagagacagcaacagccgtagcaaaagcagctgctgctcctgctatgagggtgtatatattttttacccaaagctctggaattgtacatttattttttaaaactcaaagagggaaagagccttgtatcatatgtgaacattgtatcataggtaatgttgtacagacccttttatacagtgatctgtcttgttcctgcagcaaaaatcctctatggacataggaggtgctgtgtcccatgccctcttgccctgacagtgtcccatgggcccccttctgctccctgccccctccctgctactgctgatgcactctcctctccctgcagcccctggcttcccagccttcctcctgaccccttccaacagccttggaactccagctgccaccaccctctgggtcggacactgggacccactggcccagtcttggctgctgcttacccctagccttgatgcctgcccagggacccccagccccctcccgttgccctgcagctttaacagagtgaaccatgtgtattgtacaggcgcggttgtcattgcagaaaccgctgggtggagaagaagccgataaagtctatgaatcaa

SEQ ID NO: 58624 - DNA, 3576 bp, Homo sapiens
cgggcgcccagagacagcgccgcctcagatatcctgctggatgacattgtccttacccattctctcttcctcccgacggagaaatttctgcaggagctacaccagtactttgttcgggcaggaggcatggagggccctgaagggctgggccggaagcaagcctgtctagccatgcttctccatttcttggacacctaccaggggctgcttcaagaggaagagggggccggccacatcatcaaggatctatacctgctaattatgaaggacgagtccctttaccagggcctccgagaggacactctgaggctgcaccagctggtggagacggtggaactaaagattccagaggagaaccagccacccagcaagcaggtgaagccactcttccgccacttccgccggatagactcctgtctgcagacccgggtggccttccggggctctgatgagatcttctgccgtgtatacatgcctgaccactcttatgtgaccatacgcagccgcctttcagcatctgtgcaggacattctgggctctgtgacggagaaacttcaatattcagaggagcccgcggggcgtgaggattccctcatcctggtagctgtgtcctcctctggagagaaggtccttctccagcccactgaggactgtgttttcaccgcactgggcatcaacagccacctgtttgcctgtactcgggacagctatgaggctctggtgcccctccccgaggagatccaggtctcccctggagacacagagatccaccgagtggagcctgaggacgttgccaaccacctaactgccttccactgggagctgttccgatgtgtgcatgagctggagttcgtggactacgtgttccacggggagcgcggccgccgggagacggccaacttggagctgctgctgcagcgctgcagcgaggtcacgcactgggtggccaccgaagtgctgctctgcgaggccccgggcaagcgcgcgcagctgctcaagaagttcatcaagatcgcggccctctgcaagcagaaccaggacctgctgtctttctacgccgtggtcatggggctggacaacgccgctgtcagccgccttcgactcacctgggagaagctgccagggaaattcaagaacttgtttcgcaaatttgagaacctgacggacccctgcaggaaccacaaaagctaccgagaagtgatctccaaaatgaagccccctgtgattcccttcgtgcctctgatcctcaaaggtgagagagttactcccaagctgtgccgcttccacccatgcttcccttctcctatgccctgcttctgacttccagctccctctcgactcagccctgagtacccacctggagaggagccccccaccacagacggagtgggttctggggaagagcggggtcctcgggtgcagtggcccctttcgaactcctctcttatcctttcctcacattggattctctccacatcccctagacctgactttcctgcacgaagggagtaagacccttgtagatggtttggtgaacatcgagaagctgcattcagtggccgaaaaagtgaggacaatccgcaaataccggagccggcccctttgcctggacatggaggcatcccccaatcacctgcagaccaaggcctatgtgcgccagtttcaggtcatcgacaaccagaacctcctcttcgagctctcctacaagctggaggcaaacagtcagtgagagtggaggctccagtcagacccgccagatccttgggcacctggcactcaagcactttgcacgatgtctcaaccaacatctgacatctttcccgtggagcaacttcctgctccacgggaaagaggtcgatggatttacccctggacccataagtctgttcatcctgctgaagtcccctccccattgctccttcaagccaaaactacactttgctggttcctgtcccctctgagaaaggggatagaaagctccttcctctatgtcctcccatcgagatctgttctggggatggagcttccaacttcctcttgcagcaggaaagaatgctgctcacccttctgtcttgcagagtgggattgtgggagggattggcagccttcttctccaccacctgtccagcttcttcctggtcagggctgggacccccaggaatattatgttgccgtgtgtgtgtgtgtgtgtgtgtgtgtgtgtgtgtgtgtgtgtgtcttcttttagggagcaggagtgcatctggtaattgagggtggatgttgtgtgtgctggggaggggtccttctgtttggtgctacccttgtctactctgcccctggatggtgcggggtgctttctccacccccacactccctgctcagctcctcgtgctgccctgcatgcccaggcttgtgagccaagctgctttttggggcagggagtagcagcaggtgggaggggttacccatcagcccttgcaagtcccccactcaggcctctggaaggtccagggatgggctctgatgagagggtaaaagatgctcagggaaacacaggcctcagctgcctagaggaccctccccctgccttgcagtgggctcgggtagagcagtatcaggagctagggttgtctgctgcccacactcctgctttttgggatatctaactgctaaggagggagttgacatcccccttctggctcatgtgtctgacaccaacaacatggtctctgtccctctctctttgactctccctttgtcctccccatagagctggggtggggtggatccctatacctggggcaggcagccccaaagtgggggagggggatggcagagactgtaaaggcgccactggactctggcaaggcctttattacctttactcccctccctctcccatcaccagcctcaaggcctgaggggtgcaggggctcctggcagctactgggtgaggtttcctggcacagactcacccttctttctggcaccactctttcccttttgaagagacagcaacagccgtagcaaaagcagctgctgctcctgctatgagggtgtatatattttttacccaaagctctggaattgtacatttattttttaaaactcaaagagggaaagagccttgtatcatatgtgaacattgtatcataggtaatgttgtacagacccttttatacagtgatctgtcttgttcctgcagcaaaaatcctctatggacataggaggtgctgtgtcccatgccctcttgccctgacagtgtcccatgggcccccttctgctccctgccccctccctgctactgctgatgcactctcctctccctgcagcccctggcttcccagccttcctcctgaccccttccaacagccttggaactccagctgccaccaccctctgggtcggacactgggacccactggcccagtcttggctgctgcttacccctagccttgatgcctgcccagggacccccagccccctcccgttgccctgcagctttaacagagtgaaccatgtgtattgtacaggcgcggttgtcattgcagaaaccgctgggtggagaagaagccgataaagtctatgaatcaa

SEQ ID NO: 58625 - DNA, 3894 bp, Homo sapiens
cgtgatctcaactcactgcaacctccccctcccgggttcaagcgattctcctgcctcagcctcccaagtagctgggattacaggtgcacgccactacgcctggctaatttttgtgtttttagtagagacggggtttcaccatgttggccaggctggtcttgaactcctggcctcaagtgatctgcccacctcagcttcccaaagtgctgggattacaggtgtgagccactgcacctggcctccacctccttctcttcctgctttcctccaaggcccaggtcaaatgccatcttctcaatgaaaacttcccagatcttccttttaggaatagctttcttcttcccccacaccagcataactctcctggtacctttgttatattatcaacacctcctgcctggtattagaagtagctgtatgcctgtctatctccttcctagactgtgaagttcttttcagcaaaattcagcaaacagctgctgacctactacctaccatgtgtcaagcagtgtgttaggccctggtggatgaaaagatactcagtaagaaccaaatcccagtcctcaagagctctcaatctcatagaagagataagaggtgaacataaacattatcccaatgttctatagtagttgagagaagaaagtgaccttcctggtgggtggggtggatcagagaagaattcatggaagaggtggcatttgattagggttacttggataattatcccatactgctcattgtcctctcttctgacccccttaaccacctgaaattgctgctggtgcatccttgacccaattctgatattcttgcttgatgttgcctgcttggtgttggttgtccatatgcctggcagggcgtgctgatgcccagctgtgtccatgccaggattccagaggagaaccagccacccagcaagcaggtgaagccactcttccgccacttccgccggatagactcctgtctgcagacccgggtggccttccggggctctgatgagatcttctgccgtgtatacatgcctgaccactcttatgtgaccatacgcagccgcctttcagcatctgtgcaggacattctgggctctgtgacggagaaacttcaatattcagaggagcccgcggggcgtgaggattccctcatcctggtagctgtgtcctcctctggagagaaggtccttctccagcccactgaggactgtgttttcaccgcactgggcatcaacagccacctgtttgcctgtactcgggacagctatgaggctctggtgcccctccccgaggagatccaggtctcccctggagacacagagatccaccgagtggagcctgaggacgttgccaaccacctaactgccttccactgggagctgttccgatgtgtgcatgagctggagttcgtggactacgtgttccacggggagcgcggccgccgggagacggccaacttggagctgctgctgcagcgctgcagcgaggtcacgcactgggtggccaccgaagtgctgctctgcgaggccccgggcaagcgcgcgcagctgctcaagaagttcatcaagatcgcggccctctgcaagcagaaccaggacctgctgtctttctacgccgtggtcatggggctggacaacgccgctgtcagccgccttcgactcacctgggagaagctgccagggaaattcaagaacttgtttcgcaaatttgagaacctgacggacccctgcaggaaccacaaaagctaccgagaagtgatctccaaaatgaagccccctgtgattcccttcgtgcctctgatcctcaaagacctgactttcctgcacgaagggagtaagacccttgtagatggtttggtgaacatcgagaagctgcattcagtggccgaaaaagtgaggacaatccgcaaataccggagccggcccctttgcctggacatggaggcatcccccaatcacctgcagaccaaggcctatgtgcgccagtttcaggtcatcgacaaccagaacctcctcttcgagctctcctacaagctggaggcaaacagtcagtgagagtggaggctccagtcagacccgccagatccttgggcacctggcactcaagcactttgcacgatgtctcaaccaacatctgacatctttcccgtggagcaacttcctgctccacgggaaagaggtcgatggatttacccctggacccataagtctgttcatcctgctgaagtcccctccccattgctccttcaagccaaaactacactttgctggttcctgtcccctctgagaaaggggatagaaagctccttcctctatgtcctcccatcgagatctgttctggggatggagcttccaacttcctcttgcagcaggaaagaatgctgctcacccttctgtcttgcagagtgggattgtgggagggattggcagccttcttctccaccacctgtccagcttcttcctggtcagggctgggacccccaggaatattatgttgccgtgtgtgtgtgtgtgtgtgtgtgtgtgtgtgtgtgtgtgtgtgtcttcttttagggagcaggagtgcatctggtaattgagggtggatgttgtgtgtgctggggaggggtccttctgtttggtgctacccttgtctactctgcccctggatggtgcggggtgctttctccacccccacactccctgctcagctcctcgtgctgccctgcatgcccaggcttgtgagccaagctgctttttggggcagggagtagcagcaggtgggaggggttacccatcagcccttgcaagtcccccactcaggcctctggaaggtccagggatgggctctgatgagagggtaaaagatgctcagggaaacacaggcctcagctgcctagaggaccctccccctgccttgcagtgggctcgggtagagcagtatcaggagctagggttgtctgctgcccacactcctgctttttgggatatctaactgctaaggagggagttgacatcccccttctggctcatgtgtctgacaccaacaacatggtctctgtccctctctctttgactctccctttgtcctccccatagagctggggtggggtggatccctatacctggggcaggcagccccaaagtgggggagggggatggcagagactgtaaaggcgccactggactctggcaaggcctttattacctttactcccctccctctcccatcaccagcctcaaggcctgaggggtgcaggggctcctggcagctactgggtgaggtttcctggcacagactcacccttctttctggcaccactctttcccttttgaagagacagcaacagccgtagcaaaagcagctgctgctcctgctatgagggtgtatatattttttacccaaagctctggaattgtacatttattttttaaaactcaaagagggaaagagccttgtatcatatgtgaacattgtatcataggtaatgttgtacagacccttttatacagtgatctgtcttgttcctgcagcaaaaatcctctatggacataggaggtgctgtgtcccatgccctcttgccctgacagtgtcccatgggcccccttctgctccctgccccctccctgctactgctgatgcactctcctctccctgcagcccctggcttcccagccttcctcctgaccccttccaacagccttggaactccagctgccaccaccctctgggtcggacactgggacccactggcccagtcttggctgctgcttacccctagccttgatgcctgcccagggacccccagccccctcccgttgccctgcagctttaacagagtgaaccatgtgtattgtacaggcgcggttgtcattgcagaaaccgctgggtggagaagaagccgataaagtctatgaatcaa

SEQ ID NO: 58626 - DNA, 4748 bp, Homo sapiens
ccgccgccgccgccgccgcgtcctctcagccttgcgctccgcccgctgcctctgccgccgcagcgcagagccgggcgcaccggccccgcagcctgcccactcttcgggccgcgtgccggctgcagccggcatggggggttgctgagagcgagcactcctttcctctggcacctcccccggctactggccactggactctggccagcgaggctcggcccctctggcccccagtctggcgcctggcacggccctctactctgctcctccagctctgagcatcgtgtcttcgccgccccccccgcccgcgcctgggatacctgggtcccccggcgacccctaggagaggggcgggggggggcatgaagccgctggagaaatttctgaagaagcagacgtcgcagctggcgggccgaacggtggcgggaggtcccggcgggggtctggggagctgcggtgggcctggagggggtgggggacccggcgggggcggcggtccagccgggggacagcggtcgttgcagcggcgtcagagcgtgtctcgcctgctgctccccgctttcctccgggagccccccgccgagccggggctggagccgcccctgaggaggaaggaggagagccggcgggggtcgcggaggagccgggcagcggggggccctgctggctgcagctggaggaggtgccggggcccgggcctctcgggggacggggggcccatgcgctccccttcctcctactcatctgacgagctgtccccaggcgagcccttgacttcgccgccctgggcccctctgggcgcccccgagcggcccgagcatcttctgaaccgggttctggagcggcttgctggaggggctaccagggacagcgccgcctcagatatcctgctggatgacattgtccttacccattctctcttcctcccgacggagaaatttctgcaggagctacaccagtactttgttcgggcaggaggcatggagggccctgaagggctgggccggaagcaagcctgtctagccatgcttctccatttcttggacacctaccaggggctgcttcaagaggaagagggggccggccacatcatcaaggatctatacctgctaattatgaaggacgagtccctttaccagggcctccgagaggacactctgaggctgcaccagctggtggagacggtggaactaaagattccagaggagaaccagccacccagcaagcaggtgaagccactcttccgccacttccgccggatagactcctgtctgcagacccgggtggccttccggggctctgatgagatcttctgccgtgtatacatgcctgaccactcttatgtgaccatacgcagccgcctttcagcatctgtgcaggacattctgggctctgtgacggagaaacttcaatattcagaggagcccgcggggcgtgaggattccctcatcctggtagctgtgtcctcctctggagagaaggtccttctccagcccactgaggactgtgttttcaccgcactgggcatcaacagccacctgtttgcctgtactcgggacagctatgaggctctggtgcccctccccgaggagatccaggtctcccctggagacacagagatccaccgagtggagcctgaggacgttgccaaccacctaactgccttccactgggagctgttccgatgtgtgcatgaggtggggaccgaggctggtgctatgctggggggctggagggagaaatgtgccattgggagacggtgttcgcagcacaacgtcctggttccaaggctcacttgcagcaagcccttgggcaacgcatggccgtaacctttgttcccccatctgaaaaaaatcgcaaagagagagaccccagagcacagtggctcagggcccaagtgctgtttacacagaacctgacccaggatttctatttttaaaatattcactattaaagaaataaaataaggcagagacaataatgcctagcagatggttgtcttgaggatgtcagccgtgagcgaatgcctggcacctagtaagtgctcagtagctggtgaaatattattaatgctggttgttttctttttccgcatctttgccgcctcctgtcctttctatttttctattttccaccccttccgcccccgccctcctgcctttcgctcctcatcgccttgcactgccatcttcccacccactcccctcaccccctggcgccctggccgcccctccgctgccgtgggtgcagctggagttcgtggactacgtgttccacggggagcgcggccgccgggagacggccaacttggagctgctgctgcagcgctgcagcgaggtcacgcactgggtggccaccgaagtgctgctctgcgaggccccgggcaagcgcgcgcagctgctcaagaagttcatcaagatcgcggccctctgcaagcagaaccaggacctgctgtctttctacgccgtggtcatggggctggacaacgccgctgtcagccgccttcgactcacctgggagaagctgccagggaaattcaagaacttgtttcgcaaatttgagaacctgacggacccctgcaggaaccacaaaagctaccgagaagtgatctccaaaatgaagccccctgtgattcccttcgtgcctctgatcctcaaagacctgactttcctgcacgaagggagtaagacccttgtagatggtttggtgaacatcgagaagctgcattcagtggccgaaaaagtgaggacaatccgcaaataccggagccggcccctttgcctggacatggaggcatcccccaatcacctgcagaccaaggcctatgtgcgccagtttcaggtcatcgacaaccagaacctcctcttcgagctctcctacaagctggaggcaaacagtcagtgagagtggaggctccagtcagacccgccagatccttgggcacctggcactcaagcactttgcacgatgtctcaaccaacatctgacatctttcccgtggagcaacttcctgctccacgggaaagaggtcgatggatttacccctggacccataagtctgttcatcctgctgaagtcccctccccattgctccttcaagccaaaactacactttgctggttcctgtcccctctgagaaaggggatagaaagctccttcctctatgtcctcccatcgagatctgttctggggatggagcttccaacttcctcttgcagcaggaaagaatgctgctcacccttctgtcttgcagagtgggattgtgggagggattggcagccttcttctccaccacctgtccagcttcttcctggtcagggctgggacccccaggaatattatgttgccgtgtgtgtgtgtgtgtgtgtgtgtgtgtgtgtgtgtgtgtgtgtcttcttttagggagcaggagtgcatctggtaattgagggtggatgttgtgtgtgctggggaggggtccttctgtttggtgctacccttgtctactctgcccctggatggtgcggggtgctttctccacccccacactccctgctcagctcctcgtgctgccctgcatgcccaggcttgtgagccaagctgctttttggggcagggagtagcagcaggtgggaggggttacccatcagcccttgcaagtcccccactcaggcctctggaaggtccagggatgggctctgatgagagggtaaaagatgctcagggaaacacaggcctcagctgcctagaggaccctccccctgccttgcagtgggctcgggtagagcagtatcaggagctagggttgtctgctgcccacactcctgctttttgggatatctaactgctaaggagggagttgacatcccccttctggctcatgtgtctgacaccaacaacatggtctctgtccctctctctttgactctccctttgtcctccccatagagctggggtggggtggatccctatacctggggcaggcagccccaaagtgggggagggggatggcagagactgtaaaggcgccactggactctggcaaggcctttattacctttactcccctccctctcccatcaccagcctcaaggcctgaggggtgcaggggctcctggcagctactgggtgaggtttcctggcacagactcacccttctttctggcaccactctttcccttttgaagagacagcaacagccgtagcaaaagcagctgctgctcctgctatgagggtgtatatattttttacccaaagctctggaattgtacatttattttttaaaactcaaagagggaaagagccttgtatcatatgtgaacattgtatcataggtaatgttgtacagacccttttatacagtgatctgtcttgttcctgcagcaaaaatcctctatggacataggaggtgctgtgtcccatgccctcttgccctgacagtgtcccatgggcccccttctgctccctgccccctccctgctactgctgatgcactctcctctccctgcagcccctggcttcccagccttcctcctgaccccttccaacagccttggaactccagctgccaccaccctctgggtcggacactgggacccactggcccagtcttggctgctgcttacccctagccttgatgcctgcccagggacccccagccccctcccgttgccctgcagctttaacagagtgaaccatgtgtattgtacaggcgcggttgtcattgcagaaaccgctgggtggagaagaagccgataaagtctatgaatcaa

SEQ ID NO: 58627 - DNA, 4058 bp, Homo sapiens
cgtgatctcaactcactgcaacctccccctcccgggttcaagcgattctcctgcctcagcctcccaagtagctgggattacaggtgcacgccactacgcctggctaatttttgtgtttttagtagagacggggtttcaccatgttggccaggctggtcttgaactcctggcctcaagtgatctgcccacctcagcttcccaaagtgctgggattacaggtgtgagccactgcacctggcctccacctccttctcttcctgctttcctccaaggcccaggtcaaatgccatcttctcaatgaaaacttcccagatcttccttttaggaatagctttcttcttcccccacaccagcataactctcctggtacctttgttatattatcaacacctcctgcctggtattagaagtagctgtatgcctgtctatctccttcctagactgtgaagttcttttcagcaaaattcagcaaacagctgctgacctactacctaccatgtgtcaagcagtgtgttaggccctggtggatgaaaagatactcagtaagaaccaaatcccagtcctcaagagctctcaatctcatagaagagataagaggtgaacataaacattatcccaatgttctatagtagttgagagaagaaagtgaccttcctggtgggtggggtggatcagagaagaattcatggaagaggtggcatttgattagggttacttggataattatcccatactgctcattgtcctctcttctgacccccttaaccacctgaaattgctgctggtgcatccttgacccaattctgatattcttgcttgatgttgcctgcttggtgttggttgtccatatgcctggcagggcgtgctgatgcccagctgtgtccatgccaggattccagaggagaaccagccacccagcaagcaggtgaagccactcttccgccacttccgccggatagactcctgtctgcagacccgggtggccttccggggctctgatgagagtgagtgtgggcattaggaggggcagggtggtagaaccagcccctttcacaggaccttcttcagaggccagcctctggtggggaatagaggcaccctggaggagactgtgccagctgctgccactctgccctctgttgaaagccattttcctgtttccgtccagtcttctgccgtgtatacatgcctgaccactcttatgtgaccatacgcagccgcctttcagcatctgtgcaggacattctgggctctgtgacggagaaacttcaatattcagaggagcccgcggggcgtgaggattccctcatcctggtagctgtgtcctcctctggagagaaggtccttctccagcccactgaggactgtgttttcaccgcactgggcatcaacagccacctgtttgcctgtactcgggacagctatgaggctctggtgcccctccccgaggagatccaggtctcccctggagacacagagatccaccgagtggagcctgaggacgttgccaaccacctaactgccttccactgggagctgttccgatgtgtgcatgagctggagttcgtggactacgtgttccacggggagcgcggccgccgggagacggccaacttggagctgctgctgcagcgctgcagcgaggtcacgcactgggtggccaccgaagtgctgctctgcgaggccccgggcaagcgcgcgcagctgctcaagaagttcatcaagatcgcggccctctgcaagcagaaccaggacctgctgtctttctacgccgtggtcatggggctggacaacgccgctgtcagccgccttcgactcacctgggagaagctgccagggaaattcaagaacttgtttcgcaaatttgagaacctgacggacccctgcaggaaccacaaaagctaccgagaagtgatctccaaaatgaagccccctgtgattcccttcgtgcctctgatcctcaaagacctgactttcctgcacgaagggagtaagacccttgtagatggtttggtgaacatcgagaagctgcattcagtggccgaaaaagtgaggacaatccgcaaataccggagccggcccctttgcctggacatggaggcatcccccaatcacctgcagaccaaggcctatgtgcgccagtttcaggtcatcgacaaccagaacctcctcttcgagctctcctacaagctggaggcaaacagtcagtgagagtggaggctccagtcagacccgccagatccttgggcacctggcactcaagcactttgcacgatgtctcaaccaacatctgacatctttcccgtggagcaacttcctgctccacgggaaagaggtcgatggatttacccctggacccataagtctgttcatcctgctgaagtcccctccccattgctccttcaagccaaaactacactttgctggttcctgtcccctctgagaaaggggatagaaagctccttcctctatgtcctcccatcgagatctgttctggggatggagcttccaacttcctcttgcagcaggaaagaatgctgctcacccttctgtcttgcagagtgggattgtgggagggattggcagccttcttctccaccacctgtccagcttcttcctggtcagggctgggacccccaggaatattatgttgccgtgtgtgtgtgtgtgtgtgtgtgtgtgtgtgtgtgtgtgtgtgtcttcttttagggagcaggagtgcatctggtaattgagggtggatgttgtgtgtgctggggaggggtccttctgtttggtgctacccttgtctactctgcccctggatggtgcggggtgctttctccacccccacactccctgctcagctcctcgtgctgccctgcatgcccaggcttgtgagccaagctgctttttggggcagggagtagcagcaggtgggaggggttacccatcagcccttgcaagtcccccactcaggcctctggaaggtccagggatgggctctgatgagagggtaaaagatgctcagggaaacacaggcctcagctgcctagaggaccctccccctgccttgcagtgggctcgggtagagcagtatcaggagctagggttgtctgctgcccacactcctgctttttgggatatctaactgctaaggagggagttgacatcccccttctggctcatgtgtctgacaccaacaacatggtctctgtccctctctctttgactctccctttgtcctccccatagagctggggtggggtggatccctatacctggggcaggcagccccaaagtgggggagggggatggcagagactgtaaaggcgccactggactctggcaaggcctttattacctttactcccctccctctcccatcaccagcctcaaggcctgaggggtgcaggggctcctggcagctactgggtgaggtttcctggcacagactcacccttctttctggcaccactctttcccttttgaagagacagcaacagccgtagcaaaagcagctgctgctcctgctatgagggtgtatatattttttacccaaagctctggaattgtacatttattttttaaaactcaaagagggaaagagccttgtatcatatgtgaacattgtatcataggtaatgttgtacagacccttttatacagtgatctgtcttgttcctgcagcaaaaatcctctatggacataggaggtgctgtgtcccatgccctcttgccctgacagtgtcccatgggcccccttctgctccctgccccctccctgctactgctgatgcactctcctctccctgcagcccctggcttcccagccttcctcctgaccccttccaacagccttggaactccagctgccaccaccctctgggtcggacactgggacccactggcccagtcttggctgctgcttacccctagccttgatgcctgcccagggacccccagccccctcccgttgccctgcagctttaacagagtgaaccatgtgtattgtacaggcgcggttgtcattgcagaaaccgctgggtggagaagaagccgataaagtctatgaatcaa

SEQ ID NO: 58628 - DNA, 2152 bp, Homo sapiens
acgacctgaacttccagtacgccggtgatgtgccatgtgtatgcgacgtcccatgtgttcagcgccagcggagacaaaaaccagtacctggacatgaccaacgtgatgttctgcgaaaccccatggctgctcaacaccaccgacccgctgcgcaaccaggttgccgcgcaatggccacaggccaatggcagccttggccgcctgtatgcgatgggcgtagacgcctaccgcctggcaccgcgcctgggccaactcaaggcactgccggacacccgcgttgacggcctgtcgggcaacctgggcattggcgcctaccagcgtgtcgaccgccagatccttgggcacctggcactcaagcactttgcacgatgtctcaaccaacatctgacatctttcccgtggagcaacttcctgctccacgggaaagaggtcgatggatttacccctggacccataagtctgttcatcctgctgaagtcccctccccattgctccttcaagccaaaactacactttgctggttcctgtcccctctgagaaaggggatagaaagctccttcctctatgtcctcccatcgagatctgttctggggatggagcttccaacttcctcttgcagcaggaaagaatgctgctcacccttctgtcttgcagagtgggattgtgggagggattggcagccttcttctccaccacctgtccagcttcttcctggtcagggctgggacccccaggaatattatgttgccgtgtgtgtgtgtgtgtgtgtgtgtgtgtgtgtgtgtgtgtgtgtcttcttttagggagcaggagtgcatctggtaattgagggtggatgttgtgtgtgctggggaggggtccttctgtttggtgctacccttgtctactctgcccctggatggtgcggggtgctttctccacccccacactccctgctcagctcctcgtgctgccctgcatgcccaggcttgtgagccaagctgctttttggggcagggagtagcagcaggtgggaggggttacccatcagcccttgcaagtcccccactcaggcctctggaaggtccagggatgggctctgatgagagggtaaaagatgctcagggaaacacaggcctcagctgcctagaggaccctccccctgccttgcagtgggctcgggtagagcagtatcaggagctagggttgtctgctgcccacactcctgctttttgggatatctaactgctaaggagggagttgacatcccccttctggctcatgtgtctgacaccaacaacatggtctctgtccctctctctttgactctccctttgtcctccccatagagctggggtggggtggatccctatacctggggcaggcagccccaaagtgggggagggggatggcagagactgtaaaggcgccactggactctggcaaggcctttattacctttactcccctccctctcccatcaccagcctcaaggcctgaggggtgcaggggctcctggcagctactgggtgaggtttcctggcacagactcacccttctttctggcaccactctttcccttttgaagagacagcaacagccgtagcaaaagcagctgctgctcctgctatgagggtgtatatattttttacccaaagctctggaattgtacatttattttttaaaactcaaagagggaaagagccttgtatcatatgtgaacattgtatcataggtaatgttgtacagacccttttatacagtgatctgtcttgttcctgcagcaaaaatcctctatggacataggaggtgctgtgtcccatgccctcttgccctgacagtgtcccatgggcccccttctgctccctgccccctccctgctactgctgatgcactctcctctccctgcagcccctggcttcccagccttcctcctgaccccttccaacagccttggaactccagctgccaccaccctctgggtcggacactgggacccactggcccagtcttggctgctgcttacccctagccttgatgcctgcccagggacccccagccccctcccgttgccctgcagctttaacagagtgaaccatgtgtattgtacaggcgcggttgtcattgcagaaaccgctgggtggagaagaagccgataaagtctatgaatcaa

SEQ ID NO: 58629 - DNA, 1732 bp, Homo sapiens
tcctgcggcttcttcctgagcagcgaagaagcggacaggtggtggagaagaaggctgcaatccctcccacaatcccactctgcaagaacagaagggtgagtagcattctttcctgctgaaaggggatagaaagctccttcctctatgtcctcccatcgagatctgttctggggatggagcttccaacttcctcttgcagcaggaaagaatgctgctcacccttctgtcttgcagagtgggattgtgggagggattggcagccttcttctccaccacctgtccagcttcttcctggtcagggctgggacccccaggaatattatgttgccgtgtgtgtgtgtgtgtgtgtgtgtgtgtgtgtgtgtgtgtgtgtcttcttttagggagcaggagtgcatctggtaattgagggtggatgttgtgtgtgctggggaggggtccttctgtttggtgctacccttgtctactctgcccctggatggtgcggggtgctttctccacccccacactccctgctcagctcctcgtgctgccctgcatgcccaggcttgtgagccaagctgctttttggggcagggagtagcagcaggtgggaggggttacccatcagcccttgcaagtcccccactcaggcctctggaaggtccagggatgggctctgatgagagggtaaaagatgctcagggaaacacaggcctcagctgcctagaggaccctccccctgccttgcagtgggctcgggtagagcagtatcaggagctagggttgtctgctgcccacactcctgctttttgggatatctaactgctaaggagggagttgacatcccccttctggctcatgtgtctgacaccaacaacatggtctctgtccctctctctttgactctccctttgtcctccccatagagctggggtggggtggatccctatacctggggcaggcagccccaaagtgggggagggggatggcagagactgtaaaggcgccactggactctggcaaggcctttattacctttactcccctccctctcccatcaccagcctcaaggcctgaggggtgcaggggctcctggcagctactgggtgaggtttcctggcacagactcacccttctttctggcaccactctttcccttttgaagagacagcaacagccgtagcaaaagcagctgctgctcctgctatgagggtgtatatattttttacccaaagctctggaattgtacatttattttttaaaactcaaagagggaaagagccttgtatcatatgtgaacattgtatcataggtaatgttgtacagacccttttatacagtgatctgtcttgttcctgcagcaaaaatcctctatggacataggaggtgctgtgtcccatgccctcttgccctgacagtgtcccatgggcccccttctgctccctgccccctccctgctactgctgatgcactctcctctccctgcagcccctggcttcccagccttcctcctgaccccttccaacagccttggaactccagctgccaccaccctctgggtcggacactgggacccactggcccagtcttggctgctgcttacccctagccttgatgcctgcccagggacccccagccccctcccgttgccctgcagctttaacagagtgaaccatgtgtattgtacaggcgcggttgtcattgcagaaaccgctgggtggagaagaagccgataaagtctatgaatcaa

SEQ ID NO: 58630 - DNA, 1557 bp, Homo sapiens
cgtgatctcaactcactgcaacctccccctcccgggttcaagcgattctcctgcctcagcctcccaagtagctgggattacaggtgcacgccactacgcctggctaatttttgtgtttttagtagagacggggtttcaccatgttggccaggctggtcttgaactcctggcctcaagtgatctgcccacctcagcttcccaaagtgctgggattacaggtgtgagccactgcacctggcctccacctccttctcttcctgctttcctccaaggcccaggtcaaatgccatcttctcaatgaaaacttcccagatcttccttttaggaatagctttcttcttcccccacaccagcataactctcctggtacctttgttatattatcaacacctcctgcctggtattagaagtagctgtatgcctgtctatctccttcctagactgtgaagttcttttcagcaaaattcagcaaacagctgctgacctactacctaccatgtgtcaagcagtgtgttaggccctggtggatgaaaagatactcagtaagaaccaaatcccagtcctcaagagctctcaatctcatagaagagataagaggtgaacataaacattatcccaatgttctatagtagttgagagaagaaagtgaccttcctggtgggtggggtggatcagagaagaattcatggaagaggtggcatttgattagggttacttggataattatcccatactgctcattgtcctctcttctgacccccttaaccacctgaaattgctgctggtgcatccttgacccaattctgatattcttgcttgatgttgcctgcttggtgttggttgtccatatgcctggcagggcgtgctgatgcccagctgtgtccatgccaggattccagaggagaaccagccacccagcaagcaggtgaagccactcttccgccacttccgccggatagactcctgtctgcagacccgggtggccttccggggctctgatgagagtgagtgtgggcattaggaggggcagggtggtagaaccagcccctttcacaggaccttcttcagaggccagcctctggtggggaatagaggcaccctggaggagactgtgccagctgctgccactctgccctctgttgaaagccattttcctgtttccgtccagtcttctgccgtgtatacatgcctgaccactcttatgtgaccatacgcagccgcctttcagcatctgtgcaggacattctgggctctgtgacggagaaacttcaatattcagaggagcccgcggggcgtgaggattccctcatcctggtagctgtgtcctcctctggaggtgagggtcaggaagaactgggctgatgctccgagaggagaaactcacaagctcagggctctgggggaggggtagagactgaattctaggcccttgctactcaaagtatggtcccgggacaagcctcatgtgcatcgcctgggaacttgttaggatgcagcatcttgctgggtgcagtggtgcaaacctgcagtcccagctactcaggaggctgaggcagg

SEQ ID NO: 58631 - DNA, 314 bp, Homo sapiens
agcctagcctcccatctttcttctcaattcctcaggtctgcttgcgtagggatttttcttaacttaagggtcagctttgttcgggcaggaggcatggagggccctgaagggctgggccggaagcaagcctgtctagccatgcttctccatttcttggacacctaccaggggctgcttcaagaggaagagggggccggccacatcatcaaggtgggcctgggggaagagaaggtgggtaaacaggctattagctctggaagggggcccctgtgaaggagccatacttctcattctgggtacctggaaggaagaga

SEQ ID NO: 58632 - DNA, 752 bp, Homo sapiens
tccaacttcctcttgcagcaggaaagaatgctgctcacccttctgtcttgcagagtgggattgtgggagggattggcagccttcttctccaccacctgtccagcttcttcctggtcagggctgggacccccaggaatattatgttgccgtgtgtgtgtgtgtgtgtgtgtgtgtgtgtgtgtgtgtgtgtgtgtgtgtgtgtgtgtcttcttttagggagcaggagtgcatctggtaattgagggtggatgttgtgtgtgctggggaggggtccttctgtttggtgctacccttgtctactctgcccctggatggtgcggggtgctttctccacccccacactccctgctcagctcctcgtgctgccctgcatgcccaggcttgtgagccaagctgctttttggggcagggagtagcagcaggtgggaggggttacccatcagcccttgcaagtcccccactcaggcctctggaaggtccagggatgggctctgatgagagggtaaaagatgctcagggaaacacaggcctcagctgcctagaggaccctccccctgccttgcagtgggctcgggtagagcagtatcaggagctagggttgtctgctgcccacactcctgctttttgggatatctaactgctaaggagggagttgacatcccccttctggctcatgtgtctgacaccaacaacatggtctctgtccctctctctttgactctccctttgtcctccccatagagctggggtgg

SEQ ID NO: 58633 - DNA, 1277 bp, Homo sapiens
cggcttgtcacctgccctaggagacgcagccgccggaccctgcccagggcacccacgcctcggcgaccaccatgtcccagaccaaaatgctgaaggtccgcgtgaccctcttctgcatcctggcaggcatcgtgctggccatgacagccgtggtaaccgaccactgggctgtgctgagcccccacatggagcaccacaacactacctgcgaggcggcccacttcggcctctggcggatttgtaccaagcgcatccccatggacgacagcaagacctgcgggcccatcaccctgcccggggagaagaactgttcctacttcaggcattttaaccccggcgagagctcggagatcttcgaattcaccactcagaaggagtacagcatctcggcagccgccatcgccatcttcagccttggcttcatcatcctgggcagcctctgtgtcctcctgtccctcgggaagaagagggactatctgctgcgacccgcgtccatgttctatgcctttgcaggtctctgcatcctcgtctcggtggaggtcatgcggcagtcggtgaagcgcatgattgacagtgaggacaccgtctggatcgagtactattactcctggtcctttgcctgcgcctgtgccgccttcatcctcctctttctcggcggtctcgccctcctgctgttctccctgcctcgaatgccccggaacccatgggagtcctgcatggatgctgagcccgagcactaaccctcctgcggccctagcgaccctcaggcttcttccccaggaagcggggtcttggcctggaaccttccagagaggaggcgggagcaattttagccccaccctgctcccatctgcccccctgcaacagtcgcaggctgcttcctctctctgagttcctctgggctgccgcaggctcccctgggaatagagcaagacgtgagtcctaacctggccacagttgggggaggcagagccagcaggtggacaggtgtttgcaggggcccaacttcccctggagctcagaggtgtccccactgtaccagcctctgataagctgcctccagttgtcctttatgaacattgcagggacaacctgtgtttgccagctgggtgttccgtgtaaatagccagcctgtctctttctcggtgataaaacacaccctctctggtgagcccagcgtcccctccttggcttccaggagccctgggaagcatttttaactgggtagaatctgactgtggcttgaaataaaaagctctcagaaaaaaaaagctttc

SEQ ID NO: 58634 - DNA, 999 bp, Homo sapiens
cttaaccacccatgtgtatgtttctgaattcactgtcttctatgcagctgggtccagacatatgagagggacaaaccagtgagtgtctccgagttcctcctcttgggactctccaggcagccccagcagcagcatctcctctttgtgttcttcctcagcatgtacctggccactgtcctggggaacctgctcatcatcctggccataagcatagactcccgcctgcacacccccatgtacttcttcctcagcaacatgtcctttgtggacaactgcttctccaccaccgtccccaagatgctggccaatcacatactcaggactcaaaccatctccttctctggctgtctcatgcagatgtattttatcagtgagcttgctgacatggacaatttcctcctggctgtgatggcctatgaccgctttgtcgccgtgtgccgccccttacattacacagcaaagatgacccatcagctctgtgccctgctggtcactggatcatgggtggttgccaactcgaatgctctgctgcacaccctgctgatggctcgactctcattctgtgcagacaacaccatcccccacatcttctgcgatgtgactcccctcctgaaactctcctgttcagacacacacctcagtgaagtgatgattcttactgaggctgccctagtcacgatcaccccatttctttgcctcctggcttcctatatgcacatcacctgcgttgtcctgagggtcccatccacaaagggaagatggaaagccttctccacctgtggctcccacctggctgtggttctcctcttctatggcaccatcatgtctccatatttcagaacttcatcctcccactcagctcagagagatatagcagctgctgtgaggttcacagtggtgactcccgtgatgaatcctttgatctacagcctgaggaacaaggacataaaaggggctcttgtaaaagtggttgctgtgaaatttttttctgttcaataa

SEQ ID NO: 58635 - DNA, 401 bp, Homo sapiens
atcctgggaaggggagcccattggcctaccctgatttagcacgggacatttctctgagtctctagtgttgttttaaattggcctaggtaagtggtgttcccagcccttttagccccagagcccctttcacaaattcctgagatttaaggcaggcgtggggaacgattctgttggatctaggggccaggccaaaccccatggcagtctgaggcccctccaggcgcctctggagcaggtggttcctgggggcttggcagcagagtcccccctttttcagaagtaccagcctaccacatctgggtgctctccctactcagccatagccactccagctgctttctaaatgactccattttccaaggtccttctttaataaagaaagctaattttgctgctgttca

SEQ ID NO: 58636 - DNA, 1452 bp, Homo sapiens
ctcagcaattccagtggagctgatggcccagccagcccagggcccataaccccctcccccaggagccctgagccttccagtgacccagcgggccatggagggatgggttctccctaaggtgtacagaaaagacacgaaaggcctgtttgcacgtgagcctgtgggttcatgtacgttgtggccatgcagcagtgtgagaatccatgtgacgattcttgtgtatggagcatgaatcttgtgcatggtgtggcgtgtctaggtattatgaatatgtgtttgtgtacagatgttttcatgcatgggggagttgggcctttgcacatacacatgcacctgtgtgagtccagataggtatttacatgcttgcctttgtgcctgtgtgtatgatgtctgagtgtgtgtgtgtgtgtgtgtgtgtgtgtgtgtgtgtgtgtgtccatgcacctgcctgagtgggggtcattgggtgcactcatcctgggctcgcaggctcactgtcagggccagcaggatggaagacacacaaggatctctcctgccttccccctctgcactggccgtgtcccagggaggtacctgacaacccgtcacacatgcacacacacactcacactgggccagaacgcggaccacagcccctccctgcaggcgcaggtggtggtgctggagcagagccacagcccggcccagctggaggtggatgcgcagcagcagcagctggagctgcagcaggaggtggagcggctgcgcagcgcccaggcgcagactgagcgcaccctggaggctcgggagcgggcccaccgccagagggtgcgtgggctggaggagcaggtgtccacactgaagggccagctgcagcaggagcttcgaaggagctcagcacccttctccccaccctccggccccccagagaaatgagctcctgctggcatctggagaacacccctgtgcctgggacaggggaggacccttcttttggacagcccccccccccagagcccggtcccttgggggcctcaagctggggtgggatgaggaggcgctctgctggcagtgctgaggacgggtactccagctccaggcctggagaggcttcccagcaacacctgcagtccagcccccctcttctaggatgagccactgtagatcattaaagttcctccttgagaggctgagccgtagccaggattggggagagcccttgtctctggtcagccctggagcatgggatcgtgggaaagaggagggggaccaggcccagggcaggggtcagaggcccaggccctgacttcggcttcccagagatctctccgccttagttaagagcatgtgtcgggaaattcctcagagtgctcagagtccctgtatttttatacctttttacaatgttaactgttcagaactgttttttgtaacaaaaccttgtttttaaaaaagtttgtacagctgtgt

SEQ ID NO: 58637 - DNA, 496 bp, Homo sapiens
aggcagcacttgttacaaagcaacttcgaacttaggtctgggattgctataatgcattcaatgtgctttccttgaatcacaactttttctgctggcagtgctgaggacgggtactccagctccaggcctggagaggcttcccagcaacacctgcagtccagcccccctcttctaggatgagccactgtagatcattaaagttcctccttgagaggctgagccgtagccaggattggggagagcccttgtctctggtcagccctggagcatgggatcgtgggaaagaggagggggaccaggcccagggcaggggtcagaggcccaggccctgacttcggcttcccagagatctctccgccttagttaagagcatgtgtcgggaaattcctcagagtgctcagagtccctgtatttttatacctttttacaatgttaactgttcagaactgttttttgtaacaaaaccttgtttttaaaaaagtttgtacagctgtgt

SEQ ID NO: 58638 - DNA, 569 bp, Homo sapiens
atgataggatagtaggaggtatatatatattgtcatttgtataaaatattgtgaaaagtgaaggaggacactcagtaaacatccgggactattgtaagttatggcaaaaccagatgagagaaaagggacagtcccctctgtatcctcgttgtctcttagtaacatcaaattgtagttaaaaaaattttaaactatgtacaagctacaaaatagcatctctttcatggtatgtttgagtgtgtaattttagtttcttttctggttgtatttgtggtagtcagatgtgttggattgattccaactggacagagtaaggaattccagcatcctcttcctgcttgctcgtgttaccccacagatcaaaccctcaattctagttggggatgctgtctagccccacaccatgactgaagccttaagcactgttgcgcctccatgtgctttggatcagcaaccccagccagtgtggagctctctccacactgggagcaggtgtccacactgaagggccagctgcagcaggagcttcgaaggagctcagcaccgatcaggtttcattgtagctgaaa

SEQ ID NO: 58639 - DNA, 3727 bp, Homo sapiens
gcccttatcactcccttgtatttacctggtcaccctccatctctgagggtatgggggccagatggctcttgctgccctgatgttttggggggtctgcctgggccccctcctggtgtgtcacaggcatccggtcctggccccctaggaggcagcatggcgggagctggaggccgagcgggcccagctgcagagtcagctgcagcgtgagcaggaggagctgctggcccggctggaggctgagaaggaagagctgagtgaggagattgctgccctgcagcaggagcgcgacgagggcctcctcctagcagagagtgagaagcagcaggccttgtctctgaaggagtctgagaagacggcgctgtcagagaagttgatgggtacacggcacagcctggccaccatctccctggagatggagcggcagaaacgagatgcccagagccggcaggagcaggaccggagcaccgtgaacgctctgacgtctgagctgcgggacctacgggcccagcgggaggaggctgctgcggcccacgcccaggaggtgaggaggctgcaagagcaggcccgagacctgggcaagcagcgggactcctgtcttcgcgaggcagaagagcttcggacccagctgcgtctgctggaggatgcccgtgacgggctgcggcgggagctgctggaggcccagcgcaagctgcgtgagagccaggagggccgggaggtgcagcgccaggaggcaggcgagctgcgacgcagcctgggcgagggtgccaaggagcgcgaggccctgcggcgttccaatgaggagcttcggtctgctgtgaagaaggcagagagcgagcgcatcagcctgaagcttgccaatgaggacaaggagcagaagctggcactcctagaggaggcacggacagctgtgggcaaggaggccggggagctgcgaactgggctgcaggaggtggagcgctcacggctggaggctcggcgggagctgcaggagctccggcgtcagatgaagatgctggacagtgagaacaccagactgggccgggagctggcggagctgcagggccgcctggcgctgggcgagcgggcagagaaggagagcaggcgggagaccctgggcctccggcagaggctgctgaagggcgaggccagcctggaggtgatgcggcaggagctccaggtagcccagcggaagctgcaggaacaagaaggcgagttccggacccgcgagcgacgcctgctgggctccctggaggaggcgcgtggcactgaaaagcagcagctggaccacgcccgcggcctggagctgaagctggaggcggcgcgggccgaggccgcagagctgggcctgcggctgagcgcagccgagggccgggcacaaggcctggaggccgagctggcccgcgtggaggtgcagcggcgcgcggcggaggcccagctgggtggcctgcgctcggctctgcgccggggcctcggcctcggtcgcgcgcccagcccagccccgcggccagtgcccggttcccctgcccgggacgcacccgcagaaggaagcggggaagggctcaacagccccagcaccttagaatgcagccctgggtcccagccaccatctccaggacctgccacctccccagcctctccagacctggacccggaggcagtgcgcggggccctccgggaattcctgcaagagctgcggagtgcccagagagaacgggacgaacttcggacccagaccagtgccctgaatcgccagctggccgagatggaggctgagagggacagcgcaacctcgagggccaggcagctgcagaaggcggtggctgagagtgaggaagcccggcgcagtgtggatgggcggctgagcggggtccaggcggagctggcgctgcaggaggagagtgtgcggcgcagtgagcgggagcgccgggccacgctggaccaggtggccacactggagaggagcctgcaggccaccgagagcgagctccgggccagccaggagaagatcagcaagatgaaggccaatgagacaaagctggagggcgacaagcggcgcctgaaggaggttctggacgcctccgagagccgcactgtcaagctggagctgcagcggcgctcgcttgagggggagctgcagcgcagccgcctgggcctcagtgaccgcgaggcccaagcccaggccctccaggatcgggtggattccctgcagagacaggtggccgacagcgaggtgaaggcagggaccctgcagctgaccgtggagcggctgaatggggccctggccaaggtggaggaaagcgagggggccctgcgggacaaggtgcggggcctgacagaggccctggcccagagcagtgccagcctcaacagcacccgggacaagaacctgcatctgcagaaggctctgaccgcctgtgaacatgaccgccaagtactccaggaacggctggatgccgcccggcaggcattatctgaggcacggaagcagagcagctccctgggcgagcaggtgcagacgttgcgaggcgaggtggctgacctggaactgcagcgggtggaggccgagggccagctacaacagctacgggaggtgctgcggcagcggcaggagggtgaggctgcagccctgaacaccgtccagaagctgcaagacgagcggcggctgctgcaggagcgcctgggaagcctgcagcgcgccctggctcagctggaagctgagaagcgggaggtggagcgctcagccctgcggctggagaaggaccgtgtagccctcaggaggacgctggacaaggtggagcgggagaagcttcgtagccatgaggacacagtgcggctgagcgcagagaagggccgcctggaccgcaccctcacgggggctgagctggagctggcagaggcgcagaggcagatccagcagctggaggcgcaggtggtggtgctggagcagagccacagcccggcccagctggaggtggatgcgcagcagcagcagctggagctgcagcaggaggtggagcggctgcgcagcgcccaggcgcagactgagcgcaccctggaggctcgggagcgggcccaccgccagagggtgcgtgggctggaggagcaggtgtccacactgaagggccagctgcagcaggagcttcgaaggagctcagcacccttctccccaccctccggccccccagagaaatgagctcctgctggcatctggagaacacccctgtgcctgggacaggggaggacccttcttttggacagcccccccccccagagcccggtcccttgggggcctcaagctggggtgggatgaggaggcgctctgctggcagtgctgaggacgggtactccagctccaggcctggagaggcttcccagcaacacctgcagtccagcccccctcttctaggatgagccactgtagatcattaaagttcctccttgagaggctgagccgtagccaggattggggagagcccttgtctctggtcagccctggagcatgggatcgtgggaaagaggagggggaccaggcccagggcaggggtcagaggcccaggccctgacttcggcttcccagagatctctccgccttagttaagagcatgtgtcgggaaattcctcagagtgctcagagtccctgtatttttatacctttttacaatgttaactgttcagaactgttttttgtaacaaaaccttgtttttaaaaaagtttgtacagctgtgt

SEQ ID NO: 58640 - DNA, 3148 bp, Homo sapiens
ggtcaacaaggacctcactgagaagcttgaggccctggaatccctgcggctacaggagcaggcggccctggagacagaggatggagaggggctacagcagaccctaagggacctggcacaggccgtcttgtcagactctgagagcggcgtccagctgagcggctctgagcgcaccgcggatgcttccaacggcagcctgcgggggctctcgggccagcggaccccgtccccaccgcggcgctcctcgcccggccgaggccgttcaccccgccgaggcccctccccggcctgctcagactcctccacgctcgccctgatccactccgccctgcacaagcgccagctgcaggtccaggacatgcgtgggcgctatgaggcaagccaggacctactgggcaccctgcggaagcagcttagcgacagcgagagcgagcggcgggccctagaggaacagctgcagcgcctgcgggacaagaccgacggcgccatgcaggcccacgaggacgcccagcgcgaggtgcagcggctgcggagcgccaacgagctcctgagcagggagaagagcaacctggcccacagcctgcaggtggcccagcagcaggccgaggagctgcggcaggagcgggagaagctgcaggctgcccaggaggagctgcggcgccagcgggaccggctggaggaagagcaggaggacgcagtgcaggatggcgcgcgggtgcgccgggagcttgagcgcaggtgagcagcatctcgccaccctgccaggacccttcagatgtgcctcgggtcccctgacagtgcccccctggggttaggtgacacccactgggtcctgggcctcctaccgtctggacccctccgatgtcgggttttctaaccagacccatttcaggaaactggggctcagggaggtatagtcacttacctggagtcagagaactagttaaaaggtagaacttggatgataataacaagaataattaaaataacagtagtaatattagcagtagtattttaaaaatttagttagaagaataataatatccttactaatttcactaagtgccagataccattttaagcaattcagttctctcatttaactccatgataactctgtgacatagaagcggttatctccattttgtggatggtaaactgaggcacagagaagccatgtcacttgccccaggtcacacagttagcagaagagccaggatttgaacccagacattctgccttcagagttaacctcttcaccactgcgctgcttacctctcagggacgtgatcgatgatgatgtttagtagactgtggtggagcatgttattcttgtttctgaaggtccttggggagatgtgtcaggcactattttaagcacatgtgaagtttgtatccttaaaacaggccgggcgcagtggctcacgcctgtaatcccagcactttgagaggccaaggcaggcagatcgcctgaggtcaggagttccagaccagcctgaccaacgtggagaaatcccgtctctactaaaactacaaaaattagtcaggcgtggtggtgagcacctgtaatcccagctactcgggaggctgaggcaggagaattgcttgaacctgggaggcagaggttgcagtcagccaggatcgcaccactgtactccagcctgtgtgacagagcaagactgtgtctcaaaaaaacaaacaatgtcacgaggtaagtgttacctcattttgcagatgtgaaaacggaggcccagggtcatggagctaagcggtagtgggcttggttgccctgtggctcaggctgtttctctccaaactcctgcctcaggcctggtccccagcccagcatctcgctggctacaggaggttcggggcaggaaagtgacatgggccacccacccaccctttgtcccacagccatagacaactagagcagctggaagggaagcgctcagtcctggccaaggagctggtggaggtgagggaggcgctgagccgcgccacactgcaacgggacatgctgcaggccgagaaggccgaggtggccgaggcgctgaccaaggctgaggctggccgcgtggagctcgagctctccatgaccaagctgagggcagaggaggcctccctgcaggactccctgtccaagctgagcgccctcaacgagagccttgctcaggacaagttggatctgaaccgccttgtcgcccagctggaggaagaaaagtccgccctgcagggccggcaacggcaggcagagcaggaggccacagtggcgcgggaagagcaggaacggctagaggagctgcggttggagcaggaggtggcgcggcagggcctggagggctccctacgagtggcggagcaggcccaggaggcattggagcagcagctccccacgctgcgccatgagcgcagccagctgcaggagcagctagcgcagctctcccggcagctgagcgggcgggagcaggagctggagcaggcccggcgggaggcccagcggcaagtggaggcgctggagcgagcggcccgtgagaaggaggcgctagccaaggagcacgctggcctggctgtgcagctggtggctgcggagcgtgaaggcaggaccctgtcagaggaggccacacgcctgcgcttggagaaggaagccctggagggcagcctgtttgaggtgcaacggcagctggcccagcttgaggcccgccgggagcagctggaagccgaggggcaggccctgctgctggccaaggagaccctgactggggagttggcgggcctgcggcagcaaataatagctacacaggagaaagccagtctagacaaggagctgatggcccagaagctggtgcaggctgagcgggaggcccaggcctctctgcgggagcagcgggcagctcacgaggaggacttacagcgactccagcgtgaaaaggttcaggcagctggggaggggtgggcaggactctgagccagtgtttcatcatcgttcttgctctgcctcggtctctacatctgtgaaatgggacttcctctctgttgtggaggtcctggggacagctaggaggactggggggatggggaggttgtggttcttattagacatgcagattcccaggtcccaaatctggtccagccctggtaatcctga

SEQ ID NO: 58641 - DNA, 511 bp, Homo sapiens
gtgagagggtttcagctgggatgggcaagaagacccctaagctatagcagagaagttgggcttgattctgagggctgttgggaaaggcagggatgacagtgagtgagatgtgtgggaggcccgtggcttctgcatcactgagcaagtcttctttctcttctaggaagcggggaagggctcaacagccccagcaccttagaatgcagccctgggtcccagccaccatctccaggacctgccacctccccagcctctccagacctggacccggaggcagtgcgcggggccctccgggaattcctgcaagagctgcggagtgcccagagagaacgggtaagcctgggtgtgcatggctggatggggaacctggagggccctggggaggttgcagggtgtcagagcaggggtctgtctttgttcccccatgtcggggctacaggacgaacttcggacccagaccagtgccctgaatcgccagctggccgagatggaggctgagagggacagcgca

SEQ ID NO: 58642 - DNA, 6493 bp, Homo sapiens
ggtcaacaaggacctcactgagaagcttgaggccctggaatccctgcggctacaggagcaggcggccctggagacagaggatggagaggggctacagcagaccctaagggacctggcacaggccgtcttgtcagactctgagagcggcgtccagctgagcggctctgagcgcaccgcggatgcttccaacggcagcctgcgggggctctcgggccagcggaccccgtccccaccgcggcgctcctcgcccggccgaggccgttcaccccgccgaggcccctccccggcctgctcagactcctccacgctcgccctgatccactccgccctgcacaagcgccagctgcaggtccaggacatgcgtgggcgctatgaggcaagccaggacctactgggcaccctgcggaagcagcttagcgacagcgagagcgagcggcgggccctagaggaacagctgcagcgcctgcgggacaagaccgacggcgccatgcaggcccacgaggacgcccagcgcgaggtgcagcggctgcggagcgccaacgagctcctgagcagggagaagagcaacctggcccacagcctgcaggtggcccagcagcaggccgaggagctgcggcaggagcgggagaagctgcaggctgcccaggaggagctgcggcgccagcgggaccggctggaggaagagcaggaggacgcagtgcaggatggcgcgcgggtgcgccgggagcttgagcgcaggtgagcagcatctcgccaccctgccaggacccttcagatgtgcctcgggtcccctgacagtgcccccctggggttaggtgacacccactgggtcctgggcctcctaccgtctggacccctccgatgtcgggttttctaaccagacccatttcaggaaactggggctcagggaggtatagtcacttacctggagtcagagaactagttaaaaggtagaacttggatgataataacaagaataattaaaataacagtagtaatattagcagtagtattttaaaaatttagttagaagaataataatatccttactaatttcactaagtgccagataccattttaagcaattcagttctctcatttaactccatgataactctgtgacatagaagcggttatctccattttgtggatggtaaactgaggcacagagaagccatgtcacttgccccaggtcacacagttagcagaagagccaggatttgaacccagacattctgccttcagagttaacctcttcaccactgcgctgcttacctctcagggacgtgatcgatgatgatgtttagtagactgtggtggagcatgttattcttgtttctgaaggtccttggggagatgtgtcaggcactattttaagcacatgtgaagtttgtatccttaaaacaggccgggcgcagtggctcacgcctgtaatcccagcactttgagaggccaaggcaggcagatcgcctgaggtcaggagttccagaccagcctgaccaacgtggagaaatcccgtctctactaaaactacaaaaattagtcaggcgtggtggtgagcacctgtaatcccagctactcgggaggctgaggcaggagaattgcttgaacctgggaggcagaggttgcagtcagccaggatcgcaccactgtactccagcctgtgtgacagagcaagactgtgtctcaaaaaaacaaacaatgtcacgaggtaagtgttacctcattttgcagatgtgaaaacggaggcccagggtcatggagctaagcggtagtgggcttggttgccctgtggctcaggctgtttctctccaaactcctgcctcaggcctggtccccagcccagcatctcgctggctacaggaggttcggggcaggaaagtgacatgggccacccacccaccctttgtcccacagccatagacaactagagcagctggaagggaagcgctcagtcctggccaaggagctggtggaggtgagggaggcgctgagccgcgccacactgcaacgggacatgctgcaggccgagaaggccgaggtggccgaggcgctgaccaaggctgaggctggccgcgtggagctcgagctctccatgaccaagctgagggcagaggaggcctccctgcaggactccctgtccaagctgagcgccctcaacgagagccttgctcaggacaagttggatctgaaccgccttgtcgcccagctggaggaagaaaagtccgccctgcagggccggcaacggcaggcagagcaggaggccacagtggcgcgggaagagcaggaacggctagaggagctgcggttggagcaggaggtggcgcggcagggcctggagggctccctacgagtggcggagcaggcccaggaggcattggagcagcagctccccacgctgcgccatgagcgcagccagctgcaggagcagctagcgcagctctcccggcagctgagcgggcgggagcaggagctggagcaggcccggcgggaggcccagcggcaagtggaggcgctggagcgagcggcccgtgagaaggaggcgctagccaaggagcacgctggcctggctgtgcagctggtggctgcggagcgtgaaggcaggaccctgtcagaggaggccacacgcctgcgcttggagaaggaagccctggagggcagcctgtttgaggtgcaacggcagctggcccagcttgaggcccgccgggagcagctggaagccgaggggcaggccctgctgctggccaaggagaccctgactggggagttggcgggcctgcggcagcaaataatagctacacaggagaaagccagtctagacaaggagctgatggcccagaagctggtgcaggctgagcgggaggcccaggcctctctgcgggagcagcgggcagctcacgaggaggacttacagcgactccagcgtgaaaaggaggcagcatggcgggagctggaggccgagcgggcccagctgcagagtcagctgcagcgtgagcaggaggagctgctggcccggctggaggctgagaaggaagagctgagtgaggagattgctgccctgcagcaggagcgcgacgagggcctcctcctagcagagagtgagaagcagcaggccttgtctctgaaggagtctgagaagacggcgctgtcagagaagttgatgggtacacggcacagcctggccaccatctccctggagatggagcggcagaaacgagatgcccagagccggcaggagcaggaccggagcaccgtgaacgctctgacgtctgagctgcgggacctacgggcccagcgggaggaggctgctgcggcccacgcccaggaggtgaggaggctgcaagagcaggcccgagacctgggcaagcagcgggactcctgtcttcgcgaggcagaagagcttcggacccagctgcgtctgctggaggatgcccgtgacgggctgcggcgggagctgctggaggcccagcgcaagctgcgtgagagccaggagggccgggaggtgcagcgccaggaggcaggcgagctgcgacgcagcctgggcgagggtgccaaggagcgcgaggccctgcggcgttccaatgaggagcttcggtctgctgtgaagaaggcagagagcgagcgcatcagcctgaagcttgccaatgaggacaaggagcagaagctggcactcctagaggaggcacggacagctgtgggcaaggaggccggggagctgcgaactgggctgcaggaggtggagcgctcacggctggaggctcggcgggagctgcaggagctccggcgtcagatgaagatgctggacagtgagaacaccagactgggccgggagctggcggagctgcagggccgcctggcgctgggcgagcgggcagagaaggagagcaggcgggagaccctgggcctccggcagaggctgctgaagggcgaggccagcctggaggtgatgcggcaggagctccaggtagcccagcggaagctgcaggaacaagaaggcgagttccggacccgcgagcgacgcctgctgggctccctggaggaggcgcgtggcactgaaaagcagcagctggaccacgcccgcggcctggagctgaagctggaggcggcgcgggccgaggccgcagagctgggcctgcggctgagcgcagccgagggccgggcacaaggcctggaggccgagctggcccgcgtggaggtgcagcggcgcgcggcggaggcccagctgggtggcctgcgctcggctctgcgccggggcctcggcctcggtcgcgcgcccagcccagccccgcggccagtgcccggttcccctgcccgggacgcacccgcagaaggaagcggggaagggctcaacagccccagcaccttagaatgcagccctgggtcccagccaccatctccaggacctgccacctccccagcctctccagacctggacccggaggcagtgcgcggggccctccgggaattcctgcaagagctgcggagtgcccagagagaacgggacgaacttcggacccagaccagtgccctgaatcgccagctggccgagatggaggctgagagggacagcgcaacctcgagggccaggcagctgcagaaggcggtggctgagagtgaggaagcccggcgcagtgtggatgggcggctgagcggggtccaggcggagctggcgctgcaggaggagagtgtgcggcgcagtgagcgggagcgccgggccacgctggaccaggtggccacactggagaggagcctgcaggccaccgagagcgagctccgggccagccaggagaagatcagcaagatgaaggccaatgagacaaagctggagggcgacaagcggcgcctgaaggaggttctggacgcctccgagagccgcactgtcaagctggagctgcagcggcgctcgcttgagggggagctgcagcgcagccgcctgggcctcagtgaccgcgaggcccaagcccaggccctccaggatcgggtggattccctgcagagacaggtggccgacagcgaggtgaaggcagggaccctgcagctgaccgtggagcggctgaatggggccctggccaaggtggaggaaagcgagggggccctgcgggacaaggtgcggggcctgacagaggccctggcccagagcagtgccagcctcaacagcacccgggacaagaacctgcatctgcagaaggctctgaccgcctgtgaacatgaccgccaagtactccaggaacggctggatgccgcccggcaggcattatctgaggcacggaagcagagcagctccctgggcgagcaggtgcagacgttgcgaggcgaggtggctgacctggaactgcagcgggtggaggccgagggccagctacaacagctacgggaggtgctgcggcagcggcaggagggtgaggctgcagccctgaacaccgtccagaagctgcaagacgagcggcggctgctgcaggagcgcctgggaagcctgcagcgcgccctggctcagctggaagctgagaagcgggaggtggagcgctcagccctgcggctggagaaggaccgtgtagccctcaggaggacgctggacaaggtggagcgggagaagcttcgtagccatgaggacacagtgcggctgagcgcagagaagggccgcctggaccgcaccctcacgggggctgagctggagctggcagaggcgcagaggcagatccagcagctggaggcgcaggtggtggtgctggagcagagccacagcccggcccagctggaggtggatgcgcagcagcagcagctggagctgcagcaggaggtggagcggctgcgcagcgcccaggcgcagactgagcgcaccctggaggctcgggagcgggcccaccgccagagggtgtccacactgaagggccagctgcagcaggagcttcgaaggagctcagcacccttctccccaccctccggccccccagagaaatgagctcctgctggcatctggagaacacccctgtgcctgggacaggggaggacccttcttttggacagcccccccccccagagcccggtcccttgggggcctcaagctggggtgggatgaggaggcgctctgctggcagtgctgaggacgggtactccagctccaggcctggagaggcttcccagcaacacctgcagtccagcccccctcttctaggatgagccactgtagatcattaaagttcctccttgagaggctgagccgtagccaggattggggagagcccttgtctctggtcagccctggagcatgggatcgtgggaaagaggagggggaccaggcccagggcaggggtcagaggcccaggccctgacttcggcttcccagagatctctccgccttagttaagagcatgtgtcgggaaattcctcagagtgctcagagtccctgtatttttatacctttttacaatgttaactgttcagaactgttttttgtaacaaaaccttgtttttaaaaaagtttgtacagctgtgt

SEQ ID NO: 58643 - DNA, 3352 bp, Homo sapiens
gcccttatcactcccttgtatttacctggtcaccctccatctctgagggtatgggggccagatggctcttgctgccctgatgttttggggggtctgcctgggccccctcctggtgtgtcacaggcatccggtcctggccccctaggaggcagcatggcgggagctggaggccgagcgggcccagctgcagagtcagctgcagcgtgagcaggaggagctgctggcccggctggaggctgagaaggaagagctgagtgaggagattgctgccctgcagcaggagcgcgacgagggcctcctcctagcagagagtgagaagcagcaggccttgtctctgaaggagtctgagaagacggcgctgtcagagaagttgatgggtacacggcacagcctggccaccatctccctggagatggagcggcagaaacgagatgcccagagccggcaggagcaggaccggagcaccgtgaacgctctgacgtctgagctgcgggacctacgggcccagcgggaggaggctgctgcggcccacgcccaggaggtgaggaggctgcaagagcaggcccgagacctgggcaagcagcgggactcctgtcttcgcgaggcagaagagcttcggacccagctgcgtctgctggaggatgcccgtgacgggctgcggcgggagctgctggaggcccagcgcaagctgcgtgagagccaggagggccgggaggtgcagcgccaggaggcaggcgagctgcgacgcagcctgggcgagggtgccaaggagcgcgaggccctgcggcgttccaatgaggagcttcggtctgctgtgaagaaggcagagagcgagcgcatcagcctgaagcttgccaatgaggacaaggagcagaagctggcactcctagaggaggcacggacagctgtgggcaaggaggccggggagctgcgaactgggctgcaggaggtggagcgctcacggctggaggctcggcgggagctgcaggagctccggcgtcagatgaagatgctggacagtgagaacaccagactgggccgggagctggcggagctgcagggccgcctggcgctgggcgagcgggcagagaaggagagcaggcgggagaccctgggcctccggcagaggctgctgaagggcgaggccagcctggaggtgatgcggcaggagctccaggtagcccagcggaagctgcaggaacaagaaggcgagttccggacccgcgagcgacgcctgctgggctccctggaggaggcgcgtggcactgaaaagcagcagctggaccacgcccgcggcctggagctgaagctggaggcggcgcgggccgaggccgcagagctgggcctgcggctgagcgcagccgagggccgggcacaaggcctggaggccgagctggcccgcgtggaggtgcagcggcgcgcggcggaggcccagctgggtggcctgcgctcggctctgcgccggggcctcggcctcggtcgcgcgcccagcccagccccgcggccagtgcccggttcccctgcccgggacgcacccgcagaaggaagcggggaagggctcaacagccccagcaccttagaatgcagccctgggtcccagccaccatctccaggacctgccacctccccagcctctccagacctggacccggaggcagtgcgcggggccctccgggaattcctgcaagagctgcggagtgcccagagagaacgggacgaacttcggacccagaccagtgccctgaatcgccagctggccgagatggaggctgagagggacagcgcaacctcgagggccaggcagctgcagaaggcggtggctgagagtgaggaagcccggcgcagtgtggatgggcggctgagcggggtccaggcggagctggcgctgcaggaggagagtgtgcggcgcagtgagcgggagcgccgggccacgctggaccaggtggccacactggagaggagcctgcaggccaccgagagcgagctccgggccagccaggagaagatcagcaagatgaaggccaatgagacaaagctggagggcgacaagcggcgcctgaaggaggttctggacgcctccgagagccgcactgtcaagctggagctgcagcggcgctcgcttgagggggagctgcagcgcagccgcctgggcctcagtgaccgcgaggcccaagcccaggccctccaggatcgggtggattccctgcagagacaggtgctgcggcagcggcaggagggtgaggctgcagccctgaacaccgtccagaagctgcaagacgagcggcggctgctgcaggagcgcctgggaagcctgcagcgcgccctggctcagctggaagctgagaagcgggaggtggagcgctcagccctgcggctggagaaggaccgtgtagccctcaggaggacgctggacaaggtggagcgggagaagcttcgtagccatgaggacacagtgcggctgagcgcagagaagggccgcctggaccgcaccctcacgggggctgagctggagctggcagaggcgcagaggcagatccagcagctggaggcgcaggtggtggtgctggagcagagccacagcccggcccagctggaggtggatgcgcagcagcagcagctggagctgcagcaggaggtggagcggctgcgcagcgcccaggcgcagactgagcgcaccctggaggctcgggagcgggcccaccgccagagggtgcgtgggctggaggagcaggtgtccacactgaagggccagctgcagcaggagcttcgaaggagctcagcacccttctccccaccctccggccccccagagaaatgagctcctgctggcatctggagaacacccctgtgcctgggacaggggaggacccttcttttggacagcccccccccccagagcccggtcccttgggggcctcaagctggggtgggatgaggaggcgctctgctggcagtgctgaggacgggtactccagctccaggcctggagaggcttcccagcaacacctgcagtccagcccccctcttctaggatgagccactgtagatcattaaagttcctccttgagaggctgagccgtagccaggattggggagagcccttgtctctggtcagccctggagcatgggatcgtgggaaagaggagggggaccaggcccagggcaggggtcagaggcccaggccctgacttcggcttcccagagatctctccgccttagttaagagcatgtgtcgggaaattcctcagagtgctcagagtccctgtatttttatacctttttacaatgttaactgttcagaactgttttttgtaacaaaaccttgtttttaaaaaagtttgtacagctgtgt

SEQ ID NO: 58644 - DNA, 278 bp, Homo sapiens
gcatgtctgccctgggtccacctgcagtggcacactcaggcctctaagcccccagtgggcacatttcctaggcagcaagaagcctgagcatgcccccaggaccagcccatcccccaagccctttgtcccctgcctctgcccaggccttgtctctgaaggagtctgagaagacggcgctgtcagagaagttgatgggtacacggcacagcctggccaccatctccctggagatggagcggcagaaacgagatgcccagagccggcaggagcaggaccgg

SEQ ID NO: 58645 - DNA, 272 bp, Homo sapiens
aggaaggagatgggaggatagactttaggccagtccagaggagagatatgtggcaggacaagtctctaccctatacaagtgcttccggcaagccctcagcacatgacataggcccagagaaggatgcaaagaattctggtcataaattgttttcaaatatcaaataaatcatatgtgcacatgcacaaacatgccttcacaactgagtaaaaccagactcaccttcaaatatatcaacagttttctcaagcgccgttaaaaatcaggcatcg

SEQ ID NO: 58646 - DNA, 1146 bp, Homo sapiens
gaagaaggagctgactcagccagttctgctacacagctatttctagccatgaatgtattaggtggggcagcaaaaaaattaattttttaaaaaacacatgtgcctccatagaacctgagggtatctactgaattagaagttcataaatatagtaaatttttgtaattataacccatgtatcaagaagagagtagattacagtcagttttcaaaggaggcaagggcaaatataatacatttcagaaatgcttttcaacagtggctaaagctgcttccgtttgacccttaaaagactaagcttccattatttgaaaattttacttactgtttataaagcaaagagtagggacatacagtgtgtgtgtcagggtttcaaatgtgccctctcttctttcatctttagcttggaatcaggtcacttgactttgaatcttatatccgcccctcggtatgttgaccttaaaaaaagtcacttaccccctctgggactcagtttctcatttgtaaatagaggataaaaaatacctgccctgctggcttcatgggtttcctgtgagactcaaaatcaaataagagctttctatgatccatccctttctcttctcctcctattttatttgtcttttgcctctctatgttttttgtacttccccagatccctcccccagagttacactgggagctggtcccttggagcctattttcacagcttagttgccatctgcttctcccagccagaacttaccttgggtgcatagatagccctgcttgatatgcctaactctagttcccaggatttactgcctcagatgctgtcctccctcattcccatctccaaccccattcacctgccctggactctcagcttcccagtatgcccaggagataacattttcccctaccagccttgtccaaaccctcatggcttactcctgctgaaagtctttccgctcctggactttgtaaatgtgagagggaaagactctctcagctttgtgtaacaactgtcagggtgaattagctttttttccctgtattttgcccacttaccttttttcctgtatcttgctaatttggcatgaagatttttgttctttaaagtattttcttgagatatttagggcagagcctgttgctaaaaaaaaa

SEQ ID NO: 58647 - DNA, 389 bp, Homo sapiens
agattttgttccccaaacctggtcacacagcatcctgcaccttagcgtcccatgtaagggactctgcaagcttgttgttcagcaccgcagtgttacctcttggcaagctgtgaacctgtcgcctcatcaggagcattcgagggtgcttggaagcatgaactctgggggtgtttttttttttggttattttaattatgtgatgatgctgttaagcttacagatatgcagttgattttttaaaaagcttaactaggaatctttctgaatacttgtcctattttgaaactacctgtctggttttttgtttggttttgttttctttttttaatgtcagaggaatctatccatgtgaatcgaaaggcacaggaatctaggaactctgaggaatt

SEQ ID NO: 58648 - DNA, 1902 bp, Homo sapiens
ggagtgagcgcggcagtggccctggcagctggcggagcggcccagcccgtgtgcacgtggcgccggcgctgcctttcggttgccaaaattcaggctgtagacggcgagataacaagtttaaaaccccggctaagccagaagagccaaagagggacctcgccaaggccactcctcgctctctaggccgagaatactgcgcaaattctgggaggtttgggcctggcggctctccgttcccgacccccggcgtggattcgttcccgcgctttctggcgtgaggggtcagagggcgcgccgacgctcaggcgaacggagcggaggcggcagcggccatgggcgaagcgggcgccgctgaggaggcctgccggcacatgggaactaaagaggaatttgttaaagtcagaaagaaggatctggaacggctgacaactgaagtgatgcaaatacgggacttcttacccagaatactaaatggggaggtgctggagagcttccagaaattaaagattgtagaaaaaaacctggaaaggaaagagcaagaattagagcagctgaaaatggattgtgagcactttaaagcccgcctggaaaccgtgcaggccgacaacataagagagaagaaggagaaactggctcttcgacagcagttgaatgaagcgaagcagcaactcctgcagcaggcagagtattgtacagaaatgggagcagcagcgtgtaccctcttgtggggtgtctccagcagtgaggaagtcgtcaaggccattttgggaggagataaagctttgaagtttttcagcatcactggtcaaacaatggagagttttgtgaagtcgttagacggtgatgtccaggagctggattcggatgaaagtcagtttgttttcgctctggctggaattgtcacgaatgttgctgctatagcatgtggtcgtgaattcttggttaattcaagccgggtgctcttggacaccatattgcagcttctgggagacttgaagccaggacagtgtaccaaactcaaagtgctaatgctgatgtccctatacaatgtaagcatcaatttgaaaggcttgaaatacatcagcgagagtccaggattcatccctttgctgtggtggcttttgagtgatccagatgcagaggtgtgccttcatgtactgaggcttgtccagtctgtggttctggaacctgaagtcttctccaagtcggcctctgagttccggagctccctgcccctgcaacgcatcctggcaatgtccaagagccgcaacccccgcctgcaaaccgcagcccaggagctcctggaagatctccgcactctggagcataatgtgtaggtgtgctcggccaccagggttttggtgaaaatgccggtgtcccttctccccagatccctcatttgatactccaaaaccatcaccatgtaccatgtgttagagttggcaaaatgtgattgactagagatggacatgaattgatatgtatcccacataactttgtcttggaagtgagagtgcttgtaggtggttggttaagcttgccaaaggagaggccatgaaagaacctgtccttctggaaaagtggtccatgtctgtgctggctggaagagggcttgcttagggcagcttcttgctgctcagcagaccatgacctgtaggttcacctataaaacagggaaattgaataaccatctaccccattagtcagcattttcttgagatacatttctttgaaaagcaattcattctctctctagtaattgtaattaatccccccaaaatgcaagtttacttttataaccttttggtgaacctgctatttcggatgacattgggcattttagttctatattttttgtgcctcttttatttttgaataaagaaaatcagaagagttgtatta

SEQ ID NO: 58649 - DNA, 3137 bp, Homo sapiens
  misc_feature (215)..(215): n is a, c, g, or t
  misc_feature (1713)..(1713): n is a, c, g, or t
cgcgggagccaacttcaggctgctcagaggaagcccgtgcagtcagtcacctgggtgcaagagcgttgctgcctcgggctctcccgctgcagggagagcggcactcgctggcctggatgtggttggatttaggggggctccgcagcaggggtttcgtggcggtggcaagcgctgcaacaggtagacggcgagagacggaccccggccgaggcagngatggagaccaaaggctaccacagtctccctgaaggtctagatatggaaagacggtggggtcaagtttctcaggctgtggagcgttcttccctgggacctacagagaggaccgatgagaataactacatggagattgtcaacgtaagctgtgtttccggtgctattccaaacaacagtactcaaggaagcagcaaagaaaaacaagaactactcccttgccttcagcaagacaataatcggcctgggattttaacatctgatattaaaactgagctggaatctaaggaactttcagcaactgtagctgagtccatgggtttatatatggattctgtaagagatgctgactattcctatgagcagcagaaccaacaaggaagcatgagtccagctaagatttatcagaatgttgaacagctggtgaaattttacaaaggaaatggccatcgtccttccactctaagttgtgtgaacacgcccttgagatcatttatgtctgactctgggagctccgtgaatggtggcgtcatgcgcgccattgttaaaagccctatcatgtgtcatgagaaaagcccgtctgtttgcagccctctgaacatgacatcttcggtttgcagccctgctggaatcaactctgtgtcctccaccacagccagctttggcagttttccagtgcacagcccaatcacccagggaactcctctgacatgctcccctaatgttgaaaatcgaggctccaggtcgcacagccctgcacatgctagcaatgtgggctctcctctctcaagtccgttaagtagcatgaaatcctcaatttccagccctccaagtcactgcagtgtaaaatctccagtctccagtcccaataatgtcactctgagatcctctgtgtctagccctgcaaatattaacaactcaaggtgctctgtttccagcccttcgaacactaataacagatccacgctttccagtccggcagccagtactgtgggatctatctgtagccctgtaaacaatgccttcagctacactgcttctggcacctctgctggatccagtacattgcgggatgtggttcccagtccagacacgcaggagaaaggtgctcaagaggtcccttttcctaagactgaggaagtagagagtgccatctcaaatggtgtgactggccagcttaatattgtccagtacataaaaccagaaccagatggagcttttagcagctcatgtctaggaggaaatagcaaaataaattcggattcttcattctcagtaccaataaagcaagaatcaaccaagcattcatgttcaggcacctcttttaaagggaatccaacagtaaacccgtttccatttatggatggctcgtatttttcctttatggatgataaagactattattccctatcaggaattttaggaccacctgtgcccggctttgatggtaactgtgaaggcagcggattcccagtgggtattaaacaagaaccagatgangggagctattacccagaggccagcatcccttcctctgctattgttggggtgaattcaggtggacagtccttccactacaggattggtgctcaaggtacaatatctttatcacgatcggctagagaccaatctttccaacacctgagttcctttcctcctgtcaatactttagtggagtcatggaaatcacacggcgacctgtcgtctagaagaagtgatgggtatccggtcttagaatacattccagaaaatgtatcaagctctactttacgaagtgtttctactggatcttcaagaccttcaaaaatatgtttggtgtgtggggatgaggcttcaggatgccattatggggtagtcacctgtggcagctgcaaagttttcttcaaaagagcagtggaagggcaacacaactatttatgtgctggaagaaatgattgcatcattgataagattcgacgaaagaattgtcctgcttgcagacttcagaaatgtcttcaagctggaatgaatttaggagagagaagatgcatcagtctgccatgtatgaactatgccaggggatgcaccaaatcagccttcagttcgttcgactgcagctcacctttgaagaatacaccatcatgaaagttttgctgctactaagcacaattccaaaggatggcctcaaaagccaggctgcatttgaagaaatgaggacaaattacatcaaagaactgaggaagatggtaactaagtgtcccaacaattctgggcagagctggcagaggttctaccaactgaccaagctgctggactccatgcatgacctggtgagcgacctgctggaattctgcttctacaccttccgagagtcccatgcgctgaaggtagagttccccgcaatgctggtggagatcatcagcgaccagctgcccaaggtggagtcggggaacgccaagccgctctacttccaccggaagtgactgcccgctgcccagaagaactttgccttaagtttccctgtgttgttccacacccagaaggacccaagaaaacctgtttttaacatgtgatggttgattcacacttgttcaacagtttctcaagtttaaagtcatgtcagaggtttggagccgggaaagctgtttttccgtggatttggcgagaccagagcagtctgaaggattccccacctccaatcccccagcgcttagaaacatgttcctgttcctcgggatgaaaagccatatctagtcaataactctgattttgatattttcacagatggaagaagttttaactatgccgtgtagtttctggtatcgttcgcttgttttaaaagggttcaaggactaacgaacgttttaaagcttacccttggtttgcacataaaacgtatagtcaatatggggcattaatattcttttgttattaaaaaaacacaa

SEQ ID NO: 58650 - DNA, 5400 bp, Homo sapiens
  misc_feature (215)..(215): n is a, c, g, or t
  misc_feature (1713)..(1713): n is a, c, g, or t
cgcgggagccaacttcaggctgctcagaggaagcccgtgcagtcagtcacctgggtgcaagagcgttgctgcctcgggctctcccgctgcagggagagcggcactcgctggcctggatgtggttggatttaggggggctccgcagcaggggtttcgtggcggtggcaagcgctgcaacaggtagacggcgagagacggaccccggccgaggcagngatggagaccaaaggctaccacagtctccctgaaggtctagatatggaaagacggtggggtcaagtttctcaggctgtggagcgttcttccctgggacctacagagaggaccgatgagaataactacatggagattgtcaacgtaagctgtgtttccggtgctattccaaacaacagtactcaaggaagcagcaaagaaaaacaagaactactcccttgccttcagcaagacaataatcggcctgggattttaacatctgatattaaaactgagctggaatctaaggaactttcagcaactgtagctgagtccatgggtttatatatggattctgtaagagatgctgactattcctatgagcagcagaaccaacaaggaagcatgagtccagctaagatttatcagaatgttgaacagctggtgaaattttacaaaggaaatggccatcgtccttccactctaagttgtgtgaacacgcccttgagatcatttatgtctgactctgggagctccgtgaatggtggcgtcatgcgcgccattgttaaaagccctatcatgtgtcatgagaaaagcccgtctgtttgcagccctctgaacatgacatcttcggtttgcagccctgctggaatcaactctgtgtcctccaccacagccagctttggcagttttccagtgcacagcccaatcacccagggaactcctctgacatgctcccctaatgttgaaaatcgaggctccaggtcgcacagccctgcacatgctagcaatgtgggctctcctctctcaagtccgttaagtagcatgaaatcctcaatttccagccctccaagtcactgcagtgtaaaatctccagtctccagtcccaataatgtcactctgagatcctctgtgtctagccctgcaaatattaacaactcaaggtgctctgtttccagcccttcgaacactaataacagatccacgctttccagtccggcagccagtactgtgggatctatctgtagccctgtaaacaatgccttcagctacactgcttctggcacctctgctggatccagtacattgcgggatgtggttcccagtccagacacgcaggagaaaggtgctcaagaggtcccttttcctaagactgaggaagtagagagtgccatctcaaatggtgtgactggccagcttaatattgtccagtacataaaaccagaaccagatggagcttttagcagctcatgtctaggaggaaatagcaaaataaattcggattcttcattctcagtaccaataaagcaagaatcaaccaagcattcatgttcaggcacctcttttaaagggaatccaacagtaaacccgtttccatttatggatggctcgtatttttcctttatggatgataaagactattattccctatcaggaattttaggaccacctgtgcccggctttgatggtaactgtgaaggcagcggattcccagtgggtattaaacaagaaccagatgangggagctattacccagaggccagcatcccttcctctgctattgttggggtgaattcaggtggacagtccttccactacaggattggtgctcaaggtacaatatctttatcacgatcggctagagaccaatctttccaacacctgagttcctttcctcctgtcaatactttagtggagtcatggaaatcacacggcgacctgtcgtctagaagaagtgatgggtatccggtcttagaatacattccagaaaatgtatcaagctctactttacgaagtgtttctactggatcttcaagaccttcaaaaatatgtttggtgtgtggggatgaggcttcaggatgccattatggggtagtcacctgtggcagctgcaaagttttcttcaaaagagcagtggaagggcaacacaactatttatgtgctggaagaaatgattgcatcattgataagattcgacgaaagaattgtcctgcttgcagacttcagaaatgtcttcaagctggaatgaatttaggaggatttaaaaacttgcctcttgaggaccaaattaccctaatccagtattcttggatgtgtctatcatcatttgccttgagctggagatcgtacaaacatacgaacagccaatttctctattttgcaccagacctagtctttaatgaagagaagatgcatcagtctgccatgtatgaactatgccaggggatgcaccaaatcagccttcagttcgttcgactgcagctcacctttgaagaatacaccatcatgaaagttttgctgctactaagcacaattccaaaggatggcctcaaaagccaggctgcatttgaagaaatgaggacaaattacatcaaagaactgaggaagatggtaactaagtgtcccaacaattctgggcagagctggcagaggttctaccaactgaccaagctgctggactccatgcatgacctggtgagcgacctgctggaattctgcttctacaccttccgagagtcccatgcgctgaaggtagagttccccgcaatgctggtggagatcatcagcgaccagctgcccaaggtggagtcggggaacgccaagccgctctacttccaccggaagtgactgcccgctgcccagaagaactttgccttaagtttccctgtgttgttccacacccagaaggacccaagaaaacctgtttttaacatgtgatggttgattcacacttgttcaacagtttctcaagtttaaagtcatgtcagaggtttggagccgggaaagctgtttttccgtggatttggcgagaccagagcagtctgaaggattccccacctccaatcccccagcgcttagaaacatgttcctgttcctcgggatgaaaagccatatctagtcaataactctgattttgatattttcacagatggaagaagttttaactatgccgtgtagtttctggtatcgttcgcttgttttaaaagggttcaaggactaacgaacgttttaaagcttacccttggtttgcacataaaacgtatagtcaatatggggcattaatattcttttgttattaaaaaaacacaaaaaaataataaaaaaatatatacagattcctgttgtgtaataacagaactcgtggcgtggggcagcagctgcctctgagccctcgctcgtccacggtcttctgcatcactggtatacacactcgttagcgtccatttcttatttaattagaatggataagatgatgttaaatgccttggtttgatttctagtatctattgtgttggctttacaaataattttttgcagtcttttgctgtgctgtacattactgtatgtataaattatgaaggacctgaaataaggtataaggatcttttgtaaatgagacacatacaaaaaaaatctttaatggttaataggatgaatgggaaagtatttttgaaagaattctattttgctggagactatttaagtactatctttgtctaaacaaggtaatttttttttgtaaagtgcaatgtcctgcatgcataatgaaccgtttacagtgtatttaagaaagggaaagctgtgccttttttagcttcatatctaatttaccattattttacagtctctgttgtaaataaccacactgaaacctcttcggttgtcttgaaacctttctactttttctgtactttttgttttgttcttggtctcccgcttggggcatttgtgggactccagcacgttttctggcttctgcttcatcctgctccatcggggaatgacacactgcggtgtctgcagctcctggaaggtgtcatttgacaacacatgtgggagaggaggtccttggagtgctgcagctttgggaaagctgcctcgtttcccttttcctctagaagcagaaccagctctacgagagtgagactgggaacttgatggctcagagagcatcttttcctcccattttagaaaatcagattttctcctgtgggaaaaaaaaattccatgcactctctctctgttaaagatcagctattcccttctgatcttggaaagaggttctgcactcctggaaccggtcacaggaacgcacagatcatggcaggatgcgctgggacggcccatcttggcaaggttcagtctgaatggcatggagaccgggagatagaggggttttagatttttaaaaggtaggttttaaaaataagttttatacataaacagttttggagaaaaattacagatcatataagcaagacagtggcactaaaatgtttaattcattaatctgtttgtttggcactgatgcaatgtatggcttttctcttgccccaaatcacaaacatatgtatctttggggaaactaacaatatgattgcactaaataaactactttgaatagaggccaaattaatcttttaaaaatgatgataatcatcaggtttactcagtgaaatcatattaattattttccaaaatctaaaagctgtagctggagaagcccatggccacgaggaagcagcaattaattagatcaacacttttctccagggttcaccatgcaggcaacattaccttgtctttcaaaagacacctgccttatgcaaggggaaacctgtgaaagctgcactcagagggaggagtttttcttacataatttgcaatttcaggaatttaatttataggcagatctttaaatacagtcaacttacggtgcacagtaatatgaaagccacactttgaaggtaataaatacacagcatgcagactgggagttgctagcaaacaaatggcttacttacaaaagcagcttttagttcagacttagtttttataaaatgggaattctgacttacttaaccaggtttgggatggagatggtctgcatcagctttttgtattaacaaagttactggctctttgtgtgtctccaggtaactttgcttgattaaacagcaaagccatattctaaattcactgttgaatgcctgtcccagtccaaattgtctgtctgctcttatttttgtaccatattgctcttaaaaatcttggtttggtacagttcataattcaccaaaagttcatataatttaaaaaaacactaaattagtttaaaatgaagcaatttatatctttatgcaaaaacatatgtctgtctttgcaaaggactgtaagcagattacaataaatcctttactttaatca

SEQ ID NO: 58651 - DNA, 2899 bp, Homo sapiens
  misc_feature (215)..(215): n is a, c, g, or t
  misc_feature (1713)..(1713): n is a, c, g, or t
cgcgggagccaacttcaggctgctcagaggaagcccgtgcagtcagtcacctgggtgcaagagcgttgctgcctcgggctctcccgctgcagggagagcggcactcgctggcctggatgtggttggatttaggggggctccgcagcaggggtttcgtggcggtggcaagcgctgcaacaggtagacggcgagagacggaccccggccgaggcagngatggagaccaaaggctaccacagtctccctgaaggtctagatatggaaagacggtggggtcaagtttctcaggctgtggagcgttcttccctgggacctacagagaggaccgatgagaataactacatggagattgtcaacgtaagctgtgtttccggtgctattccaaacaacagtactcaaggaagcagcaaagaaaaacaagaactactcccttgccttcagcaagacaataatcggcctgggattttaacatctgatattaaaactgagctggaatctaaggaactttcagcaactgtagctgagtccatgggtttatatatggattctgtaagagatgctgactattcctatgagcagcagaaccaacaaggaagcatgagtccagctaagatttatcagaatgttgaacagctggtgaaattttacaaaggaaatggccatcgtccttccactctaagttgtgtgaacacgcccttgagatcatttatgtctgactctgggagctccgtgaatggtggcgtcatgcgcgccattgttaaaagccctatcatgtgtcatgagaaaagcccgtctgtttgcagccctctgaacatgacatcttcggtttgcagccctgctggaatcaactctgtgtcctccaccacagccagctttggcagttttccagtgcacagcccaatcacccagggaactcctctgacatgctcccctaatgttgaaaatcgaggctccaggtcgcacagccctgcacatgctagcaatgtgggctctcctctctcaagtccgttaagtagcatgaaatcctcaatttccagccctccaagtcactgcagtgtaaaatctccagtctccagtcccaataatgtcactctgagatcctctgtgtctagccctgcaaatattaacaactcaaggtgctctgtttccagcccttcgaacactaataacagatccacgctttccagtccggcagccagtactgtgggatctatctgtagccctgtaaacaatgccttcagctacactgcttctggcacctctgctggatccagtacattgcgggatgtggttcccagtccagacacgcaggagaaaggtgctcaagaggtcccttttcctaagactgaggaagtagagagtgccatctcaaatggtgtgactggccagcttaatattgtccagtacataaaaccagaaccagatggagcttttagcagctcatgtctaggaggaaatagcaaaataaattcggattcttcattctcagtaccaataaagcaagaatcaaccaagcattcatgttcaggcacctcttttaaagggaatccaacagtaaacccgtttccatttatggatggctcgtatttttcctttatggatgataaagactattattccctatcaggaattttaggaccacctgtgcccggctttgatggtaactgtgaaggcagcggattcccagtgggtattaaacaagaaccagatgangggagctattacccagaggccagcatcccttcctctgctattgttggggtgaattcaggtggacagtccttccactacaggattggtgctcaaggtacaatatctttatcacgatcggctagagaccaatctttccaacacctgagttcctttcctcctgtcaatactttagtggagtcatggaaatcacacggcgacctgtcgtctagaagaagtgatgggtatccggtcttagaatacattccagaaaatgtatcaagctctactttacgaagtgtttctactggatcttcaagaccttcaaaaatatgtttggtgtgtggggatgaggcttcaggatgccattatggggtagtcacctgtggcagctgcaaagttttcttcaaaagagcagtggaagggcaacacaactatttatgtgctggaagaaatgattgcatcattgataagattcgacgaaagaattgtcctgcttgcagacttcagaaatgtcttcaagctggaatgaatttaggagcacgaaagtcaaagaagttgggaaagttaaaagggattcacgaggagcagccacagcagcagcagcccccacccccacccccacccccgcaaagcccagaggaagggacaacgtacatcgctcctgcaaaagaaccctcggtcaacacagcactggttcctcagctctccacaatctcacgagcgctcacaccttcccccgttatggtccttgaaaacattgaacctgaaattgtatatgcaggctatgacagctcaaaaccagatacagccgaaaatctgctctccacgctcaaccgcttagcaggcaaacagatgatccaagtcgtgaagtgggcaaaggtacttccaggatttaaaaacttgcctcttgaggaccaaattaccctaatccagtattcttggatgtgtctatcatcatttgccttgagctggagatcgtacaaacatacgaacagccaatttctctattttgcaccagacctagtctttaatgaactgttggcgagagtgagagagggttgaagtcttagtggcacttcacatgcctctgtggattctctgagtgtctctctgggatgaaggtgacttccacccacaccatcttgcgtctgaagcactagttgtgtgagggcagctccattagacgagtacacaactcagttgccat

SEQ ID NO: 58652 - DNA, 2781 bp, Homo sapiens
  misc_feature (215)..(215): n is a, c, g, or t
  misc_feature (1713)..(1713): n is a, c, g, or t
cgcgggagccaacttcaggctgctcagaggaagcccgtgcagtcagtcacctgggtgcaagagcgttgctgcctcgggctctcccgctgcagggagagcggcactcgctggcctggatgtggttggatttaggggggctccgcagcaggggtttcgtggcggtggcaagcgctgcaacaggtagacggcgagagacggaccccggccgaggcagngatggagaccaaaggctaccacagtctccctgaaggtctagatatggaaagacggtggggtcaagtttctcaggctgtggagcgttcttccctgggacctacagagaggaccgatgagaataactacatggagattgtcaacgtaagctgtgtttccggtgctattccaaacaacagtactcaaggaagcagcaaagaaaaacaagaactactcccttgccttcagcaagacaataatcggcctgggattttaacatctgatattaaaactgagctggaatctaaggaactttcagcaactgtagctgagtccatgggtttatatatggattctgtaagagatgctgactattcctatgagcagcagaaccaacaaggaagcatgagtccagctaagatttatcagaatgttgaacagctggtgaaattttacaaaggaaatggccatcgtccttccactctaagttgtgtgaacacgcccttgagatcatttatgtctgactctgggagctccgtgaatggtggcgtcatgcgcgccattgttaaaagccctatcatgtgtcatgagaaaagcccgtctgtttgcagccctctgaacatgacatcttcggtttgcagccctgctggaatcaactctgtgtcctccaccacagccagctttggcagttttccagtgcacagcccaatcacccagggaactcctctgacatgctcccctaatgttgaaaatcgaggctccaggtcgcacagccctgcacatgctagcaatgtgggctctcctctctcaagtccgttaagtagcatgaaatcctcaatttccagccctccaagtcactgcagtgtaaaatctccagtctccagtcccaataatgtcactctgagatcctctgtgtctagccctgcaaatattaacaactcaaggtgctctgtttccagcccttcgaacactaataacagatccacgctttccagtccggcagccagtactgtgggatctatctgtagccctgtaaacaatgccttcagctacactgcttctggcacctctgctggatccagtacattgcgggatgtggttcccagtccagacacgcaggagaaaggtgctcaagaggtcccttttcctaagactgaggaagtagagagtgccatctcaaatggtgtgactggccagcttaatattgtccagtacataaaaccagaaccagatggagcttttagcagctcatgtctaggaggaaatagcaaaataaattcggattcttcattctcagtaccaataaagcaagaatcaaccaagcattcatgttcaggcacctcttttaaagggaatccaacagtaaacccgtttccatttatggatggctcgtatttttcctttatggatgataaagactattattccctatcaggaattttaggaccacctgtgcccggctttgatggtaactgtgaaggcagcggattcccagtgggtattaaacaagaaccagatgangggagctattacccagaggccagcatcccttcctctgctattgttggggtgaattcaggtggacagtccttccactacaggattggtgctcaaggtacaatatctttatcacgatcggctagagaccaatctttccaacacctgagttcctttcctcctgtcaatactttagtggagtcatggaaatcacacggcgacctgtcgtctagaagaagtgatgggtatccggtcttagaatacattccagaaaatgtatcaagctctactttacgaagtgtttctactggatcttcaagaccttcaaaaatatgtttggtgtgtggggatgaggcttcaggatgccattatggggtagtcacctgtggcagctgcaaagttttcttcaaaagagcagtggaagggcaacacaactatttatgtgctggaagaaatgattgcatcattgataagattcgacgaaagaattgtcctgcttgcagacttcagaaatgtcttcaagctggaatgaatttaggagcacgaaagtcaaagaagttgggaaagttaaaagggattcacgaggagcagccacagcagcagcagcccccacccccacccccacccccgcaaagcccagaggaagggacaacgtacatcgctcctgcaaaagaaccctcggtcaacacagcactggttcctcagctctccacaatctcacgagcgctcacaccttcccccgttatggtccttgaaaacattgaacctgaaattgtatatgcaggctatgacagctcaaaaccagatacagccgaaaatctgctctccacgctcaaccgcttagcaggcaaacagatgatccaagtcgtgaagtgggcaaaggtacttccaggatttaaaaacttgcctcttgaggaccaaattaccctaatccagtattcttggatgtgtctatcatcatttgccttgagctggagatcgtacaaacatacgaacagccaatttctctattttgcaccagacctagtctttaatgagtaagtacctattaattagccttcataaaataaactgcagagttatgcgttatga

SEQ ID NO: 58653 - DNA, 5751 bp, Homo sapiens
  misc_feature (215)..(215): n is a, c, g, or t
  misc_feature (1713)..(1713): n is a, c, g, or t
cgcgggagccaacttcaggctgctcagaggaagcccgtgcagtcagtcacctgggtgcaagagcgttgctgcctcgggctctcccgctgcagggagagcggcactcgctggcctggatgtggttggatttaggggggctccgcagcaggggtttcgtggcggtggcaagcgctgcaacaggtagacggcgagagacggaccccggccgaggcagngatggagaccaaaggctaccacagtctccctgaaggtctagatatggaaagacggtggggtcaagtttctcaggctgtggagcgttcttccctgggacctacagagaggaccgatgagaataactacatggagattgtcaacgtaagctgtgtttccggtgctattccaaacaacagtactcaaggaagcagcaaagaaaaacaagaactactcccttgccttcagcaagacaataatcggcctgggattttaacatctgatattaaaactgagctggaatctaaggaactttcagcaactgtagctgagtccatgggtttatatatggattctgtaagagatgctgactattcctatgagcagcagaaccaacaaggaagcatgagtccagctaagatttatcagaatgttgaacagctggtgaaattttacaaaggaaatggccatcgtccttccactctaagttgtgtgaacacgcccttgagatcatttatgtctgactctgggagctccgtgaatggtggcgtcatgcgcgccattgttaaaagccctatcatgtgtcatgagaaaagcccgtctgtttgcagccctctgaacatgacatcttcggtttgcagccctgctggaatcaactctgtgtcctccaccacagccagctttggcagttttccagtgcacagcccaatcacccagggaactcctctgacatgctcccctaatgttgaaaatcgaggctccaggtcgcacagccctgcacatgctagcaatgtgggctctcctctctcaagtccgttaagtagcatgaaatcctcaatttccagccctccaagtcactgcagtgtaaaatctccagtctccagtcccaataatgtcactctgagatcctctgtgtctagccctgcaaatattaacaactcaaggtgctctgtttccagcccttcgaacactaataacagatccacgctttccagtccggcagccagtactgtgggatctatctgtagccctgtaaacaatgccttcagctacactgcttctggcacctctgctggatccagtacattgcgggatgtggttcccagtccagacacgcaggagaaaggtgctcaagaggtcccttttcctaagactgaggaagtagagagtgccatctcaaatggtgtgactggccagcttaatattgtccagtacataaaaccagaaccagatggagcttttagcagctcatgtctaggaggaaatagcaaaataaattcggattcttcattctcagtaccaataaagcaagaatcaaccaagcattcatgttcaggcacctcttttaaagggaatccaacagtaaacccgtttccatttatggatggctcgtatttttcctttatggatgataaagactattattccctatcaggaattttaggaccacctgtgcccggctttgatggtaactgtgaaggcagcggattcccagtgggtattaaacaagaaccagatgangggagctattacccagaggccagcatcccttcctctgctattgttggggtgaattcaggtggacagtccttccactacaggattggtgctcaaggtacaatatctttatcacgatcggctagagaccaatctttccaacacctgagttcctttcctcctgtcaatactttagtggagtcatggaaatcacacggcgacctgtcgtctagaagaagtgatgggtatccggtcttagaatacattccagaaaatgtatcaagctctactttacgaagtgtttctactggatcttcaagaccttcaaaaatatgtttggtgtgtggggatgaggcttcaggatgccattatggggtagtcacctgtggcagctgcaaagttttcttcaaaagagcagtggaagggcaacacaactatttatgtgctggaagaaatgattgcatcattgataagattcgacgaaagaattgtcctgcttgcagacttcagaaatgtcttcaagctggaatgaatttaggagcacgaaagtcaaagaagttgggaaagttaaaagggattcacgaggagcagccacagcagcagcagcccccacccccacccccacccccgcaaagcccagaggaagggacaacgtacatcgctcctgcaaaagaaccctcggtcaacacagcactggttcctcagctctccacaatctcacgagcgctcacaccttcccccgttatggtccttgaaaacattgaacctgaaattgtatatgcaggctatgacagctcaaaaccagatacagccgaaaatctgctctccacgctcaaccgcttagcaggcaaacagatgatccaagtcgtgaagtgggcaaaggtacttccaggatttaaaaacttgcctcttgaggaccaaattaccctaatccagtattcttggatgtgtctatcatcatttgccttgagctggagatcgtacaaacatacgaacagccaatttctctattttgcaccagacctagtctttaatgaagagaagatgcatcagtctgccatgtatgaactatgccaggggatgcaccaaatcagccttcagttcgttcgactgcagctcacctttgaagaatacaccatcatgaaagttttgctgctactaagcacaattccaaaggatggcctcaaaagccaggctgcatttgaagaaatgaggacaaattacatcaaagaactgaggaagatggtaactaagtgtcccaacaattctgggcagagctggcagaggttctaccaactgaccaagctgctggactccatgcatgacctggtgagcgacctgctggaattctgcttctacaccttccgagagtcccatgcgctgaaggtagagttccccgcaatgctggtggagatcatcagcgaccagctgcccaaggtggagtcggggaacgccaagccgctctacttccaccggaagtgactgcccgctgcccagaagaactttgccttaagtttccctgtgttgttccacacccagaaggacccaagaaaacctgtttttaacatgtgatggttgattcacacttgttcaacagtttctcaagtttaaagtcatgtcagaggtttggagccgggaaagctgtttttccgtggatttggcgagaccagagcagtctgaaggattccccacctccaatcccccagcgcttagaaacatgttcctgttcctcgggatgaaaagccatatctagtcaataactctgattttgatattttcacagatggaagaagttttaactatgccgtgtagtttctggtatcgttcgcttgttttaaaagggttcaaggactaacgaacgttttaaagcttacccttggtttgcacataaaacgtatagtcaatatggggcattaatattcttttgttattaaaaaaacacaaaaaaataataaaaaaatatatacagattcctgttgtgtaataacagaactcgtggcgtggggcagcagctgcctctgagccctcgctcgtccacggtcttctgcatcactggtatacacactcgttagcgtccatttcttatttaattagaatggataagatgatgttaaatgccttggtttgatttctagtatctattgtgttggctttacaaataattttttgcagtcttttgctgtgctgtacattactgtatgtataaattatgaaggacctgaaataaggtataaggatcttttgtaaatgagacacatacaaaaaaaatctttaatggttaataggatgaatgggaaagtatttttgaaagaattctattttgctggagactatttaagtactatctttgtctaaacaaggtaatttttttttgtaaagtgcaatgtcctgcatgcataatgaaccgtttacagtgtatttaagaaagggaaagctgtgccttttttagcttcatatctaatttaccattattttacagtctctgttgtaaataaccacactgaaacctcttcggttgtcttgaaacctttctactttttctgtactttttgttttgttcttggtctcccgcttggggcatttgtgggactccagcacgttttctggcttctgcttcatcctgctccatcggggaatgacacactgcggtgtctgcagctcctggaaggtgtcatttgacaacacatgtgggagaggaggtccttggagtgctgcagctttgggaaagctgcctcgtttcccttttcctctagaagcagaaccagctctacgagagtgagactgggaacttgatggctcagagagcatcttttcctcccattttagaaaatcagattttctcctgtgggaaaaaaaaattccatgcactctctctctgttaaagatcagctattcccttctgatcttggaaagaggttctgcactcctggaaccggtcacaggaacgcacagatcatggcaggatgcgctgggacggcccatcttggcaaggttcagtctgaatggcatggagaccgggagatagaggggttttagatttttaaaaggtaggttttaaaaataagttttatacataaacagttttggagaaaaattacagatcatataagcaagacagtggcactaaaatgtttaattcattaatctgtttgtttggcactgatgcaatgtatggcttttctcttgccccaaatcacaaacatatgtatctttggggaaactaacaatatgattgcactaaataaactactttgaatagaggccaaattaatcttttaaaaatgatgataatcatcaggtttactcagtgaaatcatattaattattttccaaaatctaaaagctgtagctggagaagcccatggccacgaggaagcagcaattaattagatcaacacttttctccagggttcaccatgcaggcaacattaccttgtctttcaaaagacacctgccttatgcaaggggaaacctgtgaaagctgcactcagagggaggagtttttcttacataatttgcaatttcaggaatttaatttataggcagatctttaaatacagtcaacttacggtgcacagtaatatgaaagccacactttgaaggtaataaatacacagcatgcagactgggagttgctagcaaacaaatggcttacttacaaaagcagcttttagttcagacttagtttttataaaatgggaattctgacttacttaaccaggtttgggatggagatggtctgcatcagctttttgtattaacaaagttactggctctttgtgtgtctccaggtaactttgcttgattaaacagcaaagccatattctaaattcactgttgaatgcctgtcccagtccaaattgtctgtctgctcttatttttgtaccatattgctcttaaaaatcttggtttggtacagttcataattcaccaaaagttcatataatttaaaaaaacactaaattagtttaaaatgaagcaatttatatctttatgcaaaaacatatgtctgtctttgcaaaggactgtaagcagattacaataaatcctttactttaatca

SEQ ID NO: 58654 - DNA, 4185 bp, Homo sapiens
  misc_feature (14)..(14): n is a, c, g, or t
  misc_feature (50)..(50): n is a, c, g, or t
  misc_feature (115)..(115): n is a, c, g, or t
  misc_feature (122)..(122): n is a, c, g, or t
  misc_feature (126)..(126): n is a, c, g, or t
  misc_feature (130)..(130): n is a, c, g, or t
  misc_feature (148)..(148): n is a, c, g, or t
  misc_feature (155)..(155): n is a, c, g, or t
  misc_feature (209)..(209): n is a, c, g, or t
  misc_feature (498)..(498): n is a, c, g, or t
aggtttcaagacanccgaagaggtttcagtgtggttatttacaacagagnctgtaaaataatggtaaattagatatggagctaaaaaaggcacagctttccctttcttaaatacnctgtaancggntcantatgcatgcaggacattncactttnccaaaaaaaattaccttgtttagaccaagatagtacttaaatagtctccagccnaatagaattctttccaaaatactttcccattcatcctattaaccattaaagattttttttgtatgtgtctcatttacaaaagatccttatacattcatgttcaggcacctcttttaaagggaatccaacagtaaacccgtttccatttatggatggctcgtatttttcctttatggatgataaagactattattccctatcaggaattttaggaccacctgtgcccggctttgatggtaactgtgaaggcagcggattcccagtgggtattaaacaagaaccagatgangggagctattacccagaggccagcatcccttcctctgctattgttggggtgaattcaggtggacagtccttccactacaggattggtgctcaaggtacaatatctttatcacgatcggctagagaccaatctttccaacacctgagttcctttcctcctgtcaatactttagtggagtcatggaaatcacacggcgacctgtcgtctagaagaagtgatgggtatccggtcttagaatacattccagaaaatgtatcaagctctactttacgaagtgtttctactggatcttcaagaccttcaaaaatatgtttggtgtgtggggatgaggcttcaggatgccattatggggtagtcacctgtggcagctgcaaagttttcttcaaaagagcagtggaagggcaacacaactatttatgtgctggaagaaatgattgcatcattgataagattcgacgaaagaattgtcctgcttgcagacttcagaaatgtcttcaagctggaatgaatttaggaggatttaaaaacttgcctcttgaggaccaaattaccctaatccagtattcttggatgtgtctatcatcatttgccttgagctggagatcgtacaaacatacgaacagccaatttctctattttgcaccagacctagtctttaatgaagagaagatgcatcagtctgccatgtatgaactatgccaggggatgcaccaaatcagccttcagttcgttcgactgcagctcacctttgaagaatacaccatcatgaaagttttgctgctactaagcacaattccaaaggatggcctcaaaagccaggctgcatttgaagaaatgaggacaaattacatcaaagaactgaggaagatggtaactaagtgtcccaacaattctgggcagagctggcagaggttctaccaactgaccaagctgctggactccatgcatgacctggtgagcgacctgctggaattctgcttctacaccttccgagagtcccatgcgctgaaggtagagttccccgcaatgctggtggagatcatcagcgaccagctgcccaaggtggagtcggggaacgccaagccgctctacttccaccggaagtgactgcccgctgcccagaagaactttgccttaagtttccctgtgttgttccacacccagaaggacccaagaaaacctgtttttaacatgtgatggttgattcacacttgttcaacagtttctcaagtttaaagtcatgtcagaggtttggagccgggaaagctgtttttccgtggatttggcgagaccagagcagtctgaaggattccccacctccaatcccccagcgcttagaaacatgttcctgttcctcgggatgaaaagccatatctagtcaataactctgattttgatattttcacagatggaagaagttttaactatgccgtgtagtttctggtatcgttcgcttgttttaaaagggttcaaggactaacgaacgttttaaagcttacccttggtttgcacataaaacgtatagtcaatatggggcattaatattcttttgttattaaaaaaacacaaaaaaataataaaaaaatatatacagattcctgttgtgtaataacagaactcgtggcgtggggcagcagctgcctctgagccctcgctcgtccacggtcttctgcatcactggtatacacactcgttagcgtccatttcttatttaattagaatggataagatgatgttaaatgccttggtttgatttctagtatctattgtgttggctttacaaataattttttgcagtcttttgctgtgctgtacattactgtatgtataaattatgaaggacctgaaataaggtataaggatcttttgtaaatgagacacatacaaaaaaaatctttaatggttaataggatgaatgggaaagtatttttgaaagaattctattttgctggagactatttaagtactatctttgtctaaacaaggtaatttttttttgtaaagtgcaatgtcctgcatgcataatgaaccgtttacagtgtatttaagaaagggaaagctgtgccttttttagcttcatatctaatttaccattattttacagtctctgttgtaaataaccacactgaaacctcttcggttgtcttgaaacctttctactttttctgtactttttgttttgttcttggtctcccgcttggggcatttgtgggactccagcacgttttctggcttctgcttcatcctgctccatcggggaatgacacactgcggtgtctgcagctcctggaaggtgtcatttgacaacacatgtgggagaggaggtccttggagtgctgcagctttgggaaagctgcctcgtttcccttttcctctagaagcagaaccagctctacgagagtgagactgggaacttgatggctcagagagcatcttttcctcccattttagaaaatcagattttctcctgtgggaaaaaaaaattccatgcactctctctctgttaaagatcagctattcccttctgatcttggaaagaggttctgcactcctggaaccggtcacaggaacgcacagatcatggcaggatgcgctgggacggcccatcttggcaaggttcagtctgaatggcatggagaccgggagatagaggggttttagatttttaaaaggtaggttttaaaaataagttttatacataaacagttttggagaaaaattacagatcatataagcaagacagtggcactaaaatgtttaattcattaatctgtttgtttggcactgatgcaatgtatggcttttctcttgccccaaatcacaaacatatgtatctttggggaaactaacaatatgattgcactaaataaactactttgaatagaggccaaattaatcttttaaaaatgatgataatcatcaggtttactcagtgaaatcatattaattattttccaaaatctaaaagctgtagctggagaagcccatggccacgaggaagcagcaattaattagatcaacacttttctccagggttcaccatgcaggcaacattaccttgtctttcaaaagacacctgccttatgcaaggggaaacctgtgaaagctgcactcagagggaggagtttttcttacataatttgcaatttcaggaatttaatttataggcagatctttaaatacagtcaacttacggtgcacagtaatatgaaagccacactttgaaggtaataaatacacagcatgcagactgggagttgctagcaaacaaatggcttacttacaaaagcagcttttagttcagacttagtttttataaaatgggaattctgacttacttaaccaggtttgggatggagatggtctgcatcagctttttgtattaacaaagttactggctctttgtgtgtctccaggtaactttgcttgattaaacagcaaagccatattctaaattcactgttgaatgcctgtcccagtccaaattgtctgtctgctcttatttttgtaccatattgctcttaaaaatcttggtttggtacagttcataattcaccaaaagttcatataatttaaaaaaacactaaattagtttaaaatgaagcaatttatatctttatgcaaaaacatatgtctgtctttgcaaaggactgtaagcagattacaataaatcctttactttaatca

SEQ ID NO: 58655 - DNA, 2539 bp, Homo sapiens
  misc_feature (215)..(215): n is a, c, g, or t
  misc_feature (1713)..(1713): n is a, c, g, or t
cgcgggagccaacttcaggctgctcagaggaagcccgtgcagtcagtcacctgggtgcaagagcgttgctgcctcgggctctcccgctgcagggagagcggcactcgctggcctggatgtggttggatttaggggggctccgcagcaggggtttcgtggcggtggcaagcgctgcaacaggtagacggcgagagacggaccccggccgaggcagngatggagaccaaaggctaccacagtctccctgaaggtctagatatggaaagacggtggggtcaagtttctcaggctgtggagcgttcttccctgggacctacagagaggaccgatgagaataactacatggagattgtcaacgtaagctgtgtttccggtgctattccaaacaacagtactcaaggaagcagcaaagaaaaacaagaactactcccttgccttcagcaagacaataatcggcctgggattttaacatctgatattaaaactgagctggaatctaaggaactttcagcaactgtagctgagtccatgggtttatatatggattctgtaagagatgctgactattcctatgagcagcagaaccaacaaggaagcatgagtccagctaagatttatcagaatgttgaacagctggtgaaattttacaaaggaaatggccatcgtccttccactctaagttgtgtgaacacgcccttgagatcatttatgtctgactctgggagctccgtgaatggtggcgtcatgcgcgccattgttaaaagccctatcatgtgtcatgagaaaagcccgtctgtttgcagccctctgaacatgacatcttcggtttgcagccctgctggaatcaactctgtgtcctccaccacagccagctttggcagttttccagtgcacagcccaatcacccagggaactcctctgacatgctcccctaatgttgaaaatcgaggctccaggtcgcacagccctgcacatgctagcaatgtgggctctcctctctcaagtccgttaagtagcatgaaatcctcaatttccagccctccaagtcactgcagtgtaaaatctccagtctccagtcccaataatgtcactctgagatcctctgtgtctagccctgcaaatattaacaactcaaggtgctctgtttccagcccttcgaacactaataacagatccacgctttccagtccggcagccagtactgtgggatctatctgtagccctgtaaacaatgccttcagctacactgcttctggcacctctgctggatccagtacattgcgggatgtggttcccagtccagacacgcaggagaaaggtgctcaagaggtcccttttcctaagactgaggaagtagagagtgccatctcaaatggtgtgactggccagcttaatattgtccagtacataaaaccagaaccagatggagcttttagcagctcatgtctaggaggaaatagcaaaataaattcggattcttcattctcagtaccaataaagcaagaatcaaccaagcattcatgttcaggcacctcttttaaagggaatccaacagtaaacccgtttccatttatggatggctcgtatttttcctttatggatgataaagactattattccctatcaggaattttaggaccacctgtgcccggctttgatggtaactgtgaaggcagcggattcccagtgggtattaaacaagaaccagatgangggagctattacccagaggccagcatcccttcctctgctattgttggggtgaattcaggtggacagtccttccactacaggattggtgctcaaggtacaatatctttatcacgatcggctagagaccaatctttccaacacctgagttcctttcctcctgtcaatactttagtggagtcatggaaatcacacggcgacctgtcgtctagaagaagtgatgggtatccggtcttagaatacattccagaaaatgtatcaagctctactttacgaagtgtttctactggatcttcaagaccttcaaaaatatgtttggtgtgtggggatgaggcttcaggatgccattatggggtagtcacctgtggcagctgcaaagttttcttcaaaagagcagtggaaggtaaatgttcatgtgggtgttccttttacatattttttcctagtgtgtagtttacttgtacagctaatgctatagcattattgggaattcttcaaaaagatttttgatttaatctgtcagtgataaacagtaatagtgccttgtataaaaaccacctggagattttccacaaagcaatatttaatgagcaaaatttgaaattctgagcaaggatcaaccaaagaggtttttttgttgtttgtcacagtttgtttttcagtaagactcagaaaaataattccttgtcattgtaaatttaatttatgtgatctggaatagaagttttactaggcacacacagaatacatgatttctgccttttctgggtttctgtataaatatgtgtttgtggcaaattaaaacgttaatatcagaatcaagtctgtg

SEQ ID NO: 58656 - DNA, 388 bp, Homo sapiens
cccagcagcagtttgtcctgggagcaacagcaggcgctggtttggcttgattgtgaaaagaggggtcctgtgatgctcttatatctttctgagaacacagagtatgtgatcgctcccacacccggctgtagccactgggtttctgttttaaatatgagtacctcagtgagtcatagggagtccatttggtctgtgggctgtgaacatactttaaacaatcccaatcctgttctctcttgacaaatcactttctttacccaaatacagatactggagtacgtgtctttcctccccttaaggacagtacctcttgggcttactttagttagccccacctaggagagagcctggcacatgttaggtcttaataaacactgagcaaatgaat

SEQ ID NO: 58657 - DNA, 342 bp, Homo sapiens
tgctgctggccggccatgtttcagcttctcaagctcacctagtgggttacggctcatccaccaggtttccagtctccaaaatgttctgtttaaagaggagaatggatggttacacatcctgcttgggatccaatcactgaaccagaggggaacaccgtgcatgatgggctggtaaggcgtgggggtcagtacagcatgacacagaaggaggcgtcgagctgagatgctaacaatagccaagcacgatgccggcctgattggagaggctaaaaaaagcagctcattccaaagcctcatcagggaagaaaagggccacgaaggcaggtttgcagggctttaggg

SEQ ID NO: 58658 - DNA, 505 bp, Homo sapiens
agtctgcctgtccttcaggaaatgccagaggaaaaagattctttggctgagctgatgctctcagtgtcaatagctccagccctatgcaatctccattcttccacccccatctctatttcacaggttgctgtaaagagaagaaaattcttattgtaatctttattcaagccaagtcttgataccctggggctgtgggagaggaatggcaagccatggaagaatagaggagccagaaagatgggaatagaaagtctgtgctaagtaccaggcaggactggtcttcaaccttgatgtcttatgatactgtagttaattttgttcactaccagctatttatttgcaaacgttcgtggttcaacattctgcttaaagtatggacagttatcttcttcatcgatgtgtggccatatgtttctattcctctccttaaatcctccctccatcctgagaccactctttcttaatgttctaattttaactaaatgcatgtaaatgtatgtaaaaa

SEQ ID NO: 58659 - DNA, 2501 bp, Homo sapiens
agtggggagagatgagtgtagataaaaggagtgcagaaggcacgaggaagccacagtgctccggatcctccaatcttcgctcctccaatctccgctcctccacccagttcaggaacccgcgaccgctcgcagcgctctcttgaccactatgagcctcctgtccagccgcgcggcccgtgtccccggtccttcgagctccttgtgcgcgctgttggtgctgctgctgctgctgacgcagccagggcccatcgccagcgctggtcctgccgctgctgtgttgagagagctgcgttgcgtttgtttacagaccacgcagggagttcatcccaaaatgatcagtaatctgcaagtgttcgccataggcccacagtgctccaaggtggaagtggtagcctccctgaagaacgggaaggaaatttgtcttgatccagaagccccttttctaaagaaagtcatccagaaaattttggacggtggaaacaaggaaaactgattaagagaaatgagcacgcatggaaaagtttcccagtcttcagcagagaagttttctggaggtctctgaacccagggaagacaagaaggaaagattttgttgttgtttgtttatttgtttttccagtagttagctttcttcctggattcctcacttttgaagagtgtgaggaaaacctatgtttgccgcttaagctttcagctcagcttaatgaagtgtttagcatagtacctctgctatttgctgttattttatctgctatgctattgaagttttggcaattgactatagtgtgagccaggaatcactggctgttaatctttcaaagtgtcttgaattgtaggtgactattatatttccaagaaatattccttaagatattaactgagaaggctgtggatttaatgtggaaatgatgtttcataagaattctgttgatggaaatacaactgttatcttcacttttataagaaataggaaatattttaatgtttcttggggaatatgttagagaattcccttactcttgattgtgggatactatttaattatttcactttagaaagctgagtgtttcacaccttatctatgtagaatatatttccttattcagaatttctaaaagtttaagttctatgagggctaatatcttatcttcctataattttagacattctttatctttttagtatggcaaactgccatcatttacttttaaactttgattttatatgctatttattaagtattttattaggagtaccataattctggtagctaaatatatattttagatagatgaagaagctagaaaacaggcaaattcctgactgctagtttatatagaaatgtattcttttagtttttaaagtaaaggcaaacttaacaatgacttgtactctgaaagttttggaaacgtattcaaacaatttgaatataaatttatcatttagttataaaaatatatagcgacatcctcgaggccctagcatttctccttggataggggaccagagagagcttggaatgttaaaaacaaaacaaaacaaaaaaaaacaaggagaagttgtccaagggatgtcaattttttatccctctgtatgggttagattttccaaaatcataatttgaagaaggccagcatttatggtagaatatataattatatataaggtggccacgctggggcaagttccctccccactcacagctttggcccctttcacagagtagaacctgggttagaggattgcagaagacgagcggcagcggggagggcagggaagatgcctgtcgggtttttagcacagttcatttcactgggattttgaagcatttctgtctgaatgtaaagcctgttctagtcctggtgggacacactggggttgggggtgggggaagatgcggtaatgaaaccggttagtcagtgttgtcttaatatccttgataatgctgtaaagtttatttttacaaatatttctgtttaagctatttcacctttgtttggaaatccttcccttttaaagagaaaatgtgacacttgtgaaaaggcttgtaggaaagctcctccctttttttctttaaacctttaaatgacaaacctaggtaattaatggttgtgaatttctatttttgctttgtttttaatgaacatttgtctttcagaataggattctgtgataatatttaaatggcaaaaacaaaacataattttgtgcaattaacaaagctactgcaagaaaaataaaacatttcttggtaaaaacgtatgtatttatatattatatatttatatataatatatattatatatttagcattgctgagctttttagatgcctattgtgtatcttttaaaggttttgaccattttgttatgagtaattacatatatattacattcactatattaaaattgtacttttttactatgtgtctcattggttcatagtctttattttgtcctttgaataaacattaaaagatttctaaacttcactcatattgt

SEQ ID NO: 58660 - DNA, 581 bp, Homo sapiens
cacttataatgcttctgagcatataggaaacactatacatgccaactaatttcattaccatcattatcatcaatgtagtttcttttgagtgtaataatgtctacatacctaccttctagcctccttcctacacgccaaactccttgaaagccaaatgataaatgttatctcttcaaagaactatttgaatccatctcttaagggattaggacttatcgcactgaagaaggtaccaaatctacaaagtttagcaagaagccatgcccaggaagccaaaataaaactagaaccattggtaaaaattaaagatgggtttatggaaaatgatgcaaatgcaaagagatatgattattagctccatgggaaagaaaatataagaaaagtaaatatagccatagtgaaattatctgactctataataaacaatgtttacatgaacctaataatataaatattgatgactaacacaaaattgtttattggttttaagaagatcaaatcaatatgaagatgttcagttgatttttgaaatggtaaaatgtgtcatgtgtttttatatttccacagttgtacttttacag

SEQ ID NO: 58661 - DNA, 375 bp, Homo sapiens
gcggccgcctactactactactgctcgaattcaagcttctaacgatgtacggggacatgagtagcaggtagagcacagctttactggctgtttgtatgctttggtttagtgcaatgtgtggtagattacttatcagaaaacatatatgtcatctctagaacgaagaaaaagcatagtagttcaattcccagtgtgtccctttgattttttttttttaatagtaaaaataagaatctgtactgacttttcacttggccattctggttttaaaggacaagctacaagctctgtgtttctgtactgatgtgtcacttattaaatacttttgtaccatgagtaaaacttcaggtgtttcgcaagaaccaccattctcaa

SEQ ID NO: 58662 - DNA, 1959 bp, Homo sapiens
aattcggcactaggggtcagagaggatcccgccgggcggccgcgccctgcatgcgagttgggccgcgggcggggttggagcctactcggggcgactgcgatggacgccttagaaggagagagctttgcgctgtctttctcctccgcctctgatgcagaatttgatgctgtggttggatatttagaggacattatcatggatgacgagttccagttattacagagaaatttcatggacaagtactacctggagtttgaagacacagaagagaataaactcatctacacacctatttttaatgaatacatttctttggtagaaaaatacattgaagaacagctgctgcagcggattcctgagttcaacatggcagccttcaccacaacattacagcaccataaggatgaagtggctggtgacatattcgacatgctgctcaccttcacagattttctggcttttaaagaaatgtttttggactacagagcagaaaaagaaggccgaggactggacttaagcagtggcttagtggtgacttcattgtgcaaatcatcttctctgccagcttcccagaacaatctgcggcactaggtcctacctccagccaatgaatgggatcattctggatgtcaccagcccaataggctcagctcatgatgacagaacacatcttggaaagactgactctgttatgtaactcttcatttatgttaagtattaataggtcaaaaccaaaatgacctaaccctcctggacctatttatcctgaaacaccttcttgtattcattaaccatagtactcctccccacctcaagtagacacctctctcaggagcttctgagtcagacgcctctggagcgagccctatgtcaggcactccacctggggggcccttccccagcatacctgctggtgtgtaagtgtggactaacccgccgccaccaccctctgttccagcaggctctgcatgaatctttgtgcacttgcacctctttttcacatgggccacagtttcagtacttcagcctcagtggggttcctgatgtttatctagggtgttactcaagcccagtttgagattttggagtctcctgtgatcacatcttgtctcggctgtaggaatcaacagaaggagacgtcctctacataaaagctccatgtgaaaagctactcctagtcttaacatttgcagtccttgtgtcactgtcttctggtcctgatgtagtcccactgtttctagaagtctcttttaagcattatttttgaaaaaaaaaatatttttatagatgaatactcaggctaacctagtggatgtgatcttggaacttccatgattatccacttaaagatcaaagtattatatgctgtgtgctttttaggtgtttgttagtactgtgaaggcaaaaatgctttctacattgacattcattcctattttactgggcacctatgaatgtatgctgtgtgctagaaatagactaaaacatattcctatagcatgttagtgtgtttgcatgtttgctgaaaatcctttgtgtataaaccagtttgtaaggttctctgggttaggtagggactctgcagtttcttcctgtcaaaatctctcctaccaagatggtgttccactgtccagcccagcatgagtagcaggtagagcacagctttactggctgtttgtatgctttggtttagtgcaatgtgtggtagattacttatcagaaaacatatatgtcatctctagaacgaagaaaaagcatagtagttcaattcccagtgtgtccctttgattttttttttttaatagtaaaaataagaatctgtactgacttttcacttggccattctggttttaaaggacaagctacaagctctgtgtttctgtactgatgtgtcacttattaaatacttttgtaccatgagtaaaacttcaggtgtttcgcaagaaccaccattctcaa

SEQ ID NO: 58663 - DNA, 2021 bp, Homo sapiens
ctagtgcgaggcgggggtgaatcggccgaggcaggcgctgacccgacctggcagtgagctggccgcggccttggctgagaggccttaaccccgccgggcggccgcgccctgcatgcgagttgggccgcgggcggggttggagcctactcggggcgactgcgatggacgccttagaaggagagagctttgcgctgtctttctcctccgcctctgatgcagaatttgatgctgtggttggatatttagaggacattatcatggatgacgagttccagttattacagagaaatttcatggacaagtactacctggagtttgaagacacagaagagaataaactcatctacacacctatttttaatgaatacatttctttggtagaaaaatacattgaagaacagctgctgcagcggattcctgagttcaacatggcagccttcaccacaacattacagcaccataaggatgaagtggctggtgacatattcgacatgctgctcaccttcacagattttctggcttttaaagaaatgtttttggactacagagcagaaaaagaaggccgaggactggacttaagcagtggcttagtggtgacttcattgtgcaaatcatcttctctgccagcttcccagaacaatctgcggcactaggtcctacctccagccaatgaatgggatcattctggatgtcaccagcccaataggctcagctcatgatgacagaacacatcttggaaagactgactctgttatgtaactcttcatttatgttaagtattaataggtcaaaaccaaaatgacctaaccctcctggacctatttatcctgaaacaccttcttgtattcattaaccatagtactcctccccacctcaagtagacacctctctcaggagcttctgagtcagacgcctctggagcgagccctatgtcaggcactccacctggggggcccttccccagcatacctgctggtgtgtaagtgtggactaacccgccgccaccaccctctgttccagcaggctctgcatgaatctttgtgcacttgcacctctttttcacatgggccacagtttcagtacttcagcctcagtggggttcctgatgtttatctagggtgttactcaagcccagtttgagattttggagtctcctgtgatcacatcttgtctcggctgtaggaatcaacagaaggagacgtcctctacataaaagctccatgtgaaaagctactcctagtcttaacatttgcagtccttgtgtcactgtcttctggtcctgatgtagtcccactgtttctagaagtctcttttaagcattatttttgaaaaaaaaaatatttttatagatgaatactcaggctaacctagtggatgtgatcttggaacttccatgattatccacttaaagatcaaagtattatatgctgtgtgctttttaggtgtttgttagtactgtgaaggcaaaaatgctttctacattgacattcattcctattttactgggcacctatgaatgtatgctgtgtgctagaaatagactaaaacatattcctatagcatgttagtgtgtttgcatgtttgctgaaaatcctttgtgtataaaccagtttgtaaggttctctgggttaggtagggactctgcagtttcttcctgtcaaaatctctcctaccaagatggtgttccactgtccagcccagcatgagtagcaggtagagcacagctttactggctgtttgtatgctttggtttagtgcaatgtgtggtagattacttatcagaaaacatatatgtcatctctagaacgaagaaaaagcatagtagttcaattcccagtgtgtccctttgattttttttttttaatagtaaaaataagaatctgtactgacttttcacttggccattctggttttaaaggacaagctacaagctctgtgtttctgtactgatgtgtcacttattaaatacttttgtaccatgagtaaaacttcaggtgtttcgcaagaaccaccattctcaa

SEQ ID NO: 58664 - DNA, 2151 bp, Homo sapiens
acaggaggcggggcgccgcgcccctccggcagtcaccgaggcccggacctgcggcgtcggcggcgcgcgcagagggccaggcgggcgtagaggccggaccgacgcgtggcggcagagggtatccaaggccggacctggcgcgcaggcgctgacccgacctggcagtgagctggccgcggccttggctgagaggccttaaccccgccgggcggccgcgccctgcatgcgagttgggccgcgggcggggttggagcctactcggggcgactgcgatggacgccttagaaggagagagctttgcgctgtctttctcctccgcctctgatgcagaatttgatgctgtggttggatatttagaggacattatcatggatgacgagttccagttattacagagaaatttcatggacaagtactacctggagtttgaagacacagaagagaataaactcatctacacacctatttttaatgaatacatttctttggtagaaaaatacattgaagaacagctgctgcagcggattcctgagttcaacatggcagccttcaccacaacattacaccatctgttccgtttgcaggcaccataaggatgaagtggctggtgacatattcgacatgctgctcaccttcacagattttctggcttttaaagaaatgtttttggactacagagcagaaaaagaaggccgaggactggacttaagcagtggcttagtggtgacttcattgtgcaaatcatcttctctgccagcttcccagaacaatctgcggcactaggtcctacctccagccaatgaatgggatcattctggatgtcaccagcccaataggctcagctcatgatgacagaacacatcttggaaagactgactctgttatgtaactcttcatttatgttaagtattaataggtcaaaaccaaaatgacctaaccctcctggacctatttatcctgaaacaccttcttgtattcattaaccatagtactcctccccacctcaagtagacacctctctcaggagcttctgagtcagacgcctctggagcgagccctatgtcaggcactccacctggggggcccttccccagcatacctgctggtgtgtaagtgtggactaacccgccgccaccaccctctgttccagcaggctctgcatgaatctttgtgcacttgcacctctttttcacatgggccacagtttcagtacttcagcctcagtggggttcctgatgtttatctagggtgttactcaagcccagtttgagattttggagtctcctgtgatcacatcttgtctcggctgtaggaatcaacagaaggagacgtcctctacataaaagctccatgtgaaaagctactcctagtcttaacatttgcagtccttgtgtcactgtcttctggtcctgatgtagtcccactgtttctagaagtctcttttaagcattatttttgaaaaaaaaaatatttttatagatgaatactcaggctaacctagtggatgtgatcttggaacttccatgattatccacttaaagatcaaagtattatatgctgtgtgctttttaggtgtttgttagtactgtgaaggcaaaaatgctttctacattgacattcattcctattttactgggcacctatgaatgtatgctgtgtgctagaaatagactaaaacatattcctatagcatgttagtgtgtttgcatgtttgctgaaaatcctttgtgtataaaccagtttgtaaggttctctgggttaggtagggactctgcagtttcttcctgtcaaaatctctcctaccaagatggtgttccactgtccagcccagcatgagtagcaggtagagcacagctttactggctgtttgtatgctttggtttagtgcaatgtgtggtagattacttatcagaaaacatatatgtcatctctagaacgaagaaaaagcatagtagttcaattcccagtgtgtccctttgattttttttttttaatagtaaaaataagaatctgtactgacttttcacttggccattctggttttaaaggacaagctacaagctctgtgtttctgtactgatgtgtcacttattaaatacttttgtaccatgagtaaaacttcaggtgtttcgcaagaaccaccattctcaa

SEQ ID NO: 58665 - DNA, 1888 bp, Homo sapiens
acaggaggcggggcgccgcgcccctccggcagtcaccgaggcccggacctgcggcgtcggcggcgcgcgcagagggccaggcgggcgtagaggccggaccgacgcgtggcggcagagggtatccaaggccggacctggcgcgcaggcgctgacccgacctggcagtgagctggccgcggccttggctgagaggccttaaccccgccgggcggccgcgccctgcatgcgagttgggccgcgggcggggttggagcctactcggggcgactgcgatggacgccttagaaggagagagctttgcgctgtctttctcctccgcctctgatgcagaatttgatgctgtggttggatatttagaggacattatcatggatgacgagttccagttattacagagaaatttcatggacaagtactacctggagtttgaagacacagaagagaataaactcatctacacacctatttttaatgaatacatttctttggtagaaaaatacattgaagaacagctgctgcagcggattcctgagttcaacatggcagccttcaccacaacattacacccaataggctcagctcatgatgacagaacacatcttggaaagactgactctgttatgtaactcttcatttatgttaagtattaataggtcaaaaccaaaatgacctaaccctcctggacctatttatcctgaaacaccttcttgtattcattaaccatagtactcctccccacctcaagtagacacctctctcaggagcttctgagtcagacgcctctggagcgagccctatgtcaggcactccacctggggggcccttccccagcatacctgctggtgtgtaagtgtggactaacccgccgccaccaccctctgttccagcaggctctgcatgaatctttgtgcacttgcacctctttttcacatgggccacagtttcagtacttcagcctcagtggggttcctgatgtttatctagggtgttactcaagcccagtttgagattttggagtctcctgtgatcacatcttgtctcggctgtaggaatcaacagaaggagacgtcctctacataaaagctccatgtgaaaagctactcctagtcttaacatttgcagtccttgtgtcactgtcttctggtcctgatgtagtcccactgtttctagaagtctcttttaagcattatttttgaaaaaaaaaatatttttatagatgaatactcaggctaacctagtggatgtgatcttggaacttccatgattatccacttaaagatcaaagtattatatgctgtgtgctttttaggtgtttgttagtactgtgaaggcaaaaatgctttctacattgacattcattcctattttactgggcacctatgaatgtatgctgtgtgctagaaatagactaaaacatattcctatagcatgttagtgtgtttgcatgtttgctgaaaatcctttgtgtataaaccagtttgtaaggttctctgggttaggtagggactctgcagtttcttcctgtcaaaatctctcctaccaagatggtgttccactgtccagcccagcatgagtagcaggtagagcacagctttactggctgtttgtatgctttggtttagtgcaatgtgtggtagattacttatcagaaaacatatatgtcatctctagaacgaagaaaaagcatagtagttcaattcccagtgtgtccctttgattttttttttttaatagtaaaaataagaatctgtactgacttttcacttggccattctggttttaaaggacaagctacaagctctgtgtttctgtactgatgtgtcacttattaaatacttttgtaccatgagtaaaacttcaggtgtttcgcaagaaccaccattctcaa

SEQ ID NO: 58666 - DNA, 1441 bp, Homo sapiens
ccaggaaaacgtagccagatacgattcgagctcgtacccgacgcttcaacgccagaacaatctgcggcactaggtcctacctccagccaatgaatgggatcattctggatgtcaccagcccaataggctcagctcatgatgacagaacacatcttggaaagactgactctgttatgtaactcttcatttatgttaagtattaataggtcaaaaccaaaatgacctaaccctcctggacctatttatcctgaaacaccttcttgtattcattaaccatagtactcctccccacctcaagtagacacctctctcaggagcttctgagtcagacgcctctggagcgagccctatgtcaggcactccacctggggggcccttccccagcatacctgctggtgtgtaagtgtggactaacccgccgccaccaccctctgttccagcaggctctgcatgaatctttgtgcacttgcacctctttttcacatgggccacagtttcagtacttcagcctcagtggggttcctgatgtttatctagggtgttactcaagcccagtttgagattttggagtctcctgtgatcacatcttgtctcggctgtaggaatcaacagaaggagacgtcctctacataaaagctccatgtgaaaagctactcctagtcttaacatttgcagtccttgtgtcactgtcttctggtcctgatgtagtcccactgtttctagaagtctcttttaagcattatttttgaaaaaaaaaatatttttatagatgaatactcaggctaacctagtggatgtgatcttggaacttccatgattatccacttaaagatcaaagtattatatgctgtgtgctttttaggtgtttgttagtactgtgaaggcaaaaatgctttctacattgacattcattcctattttactgggcacctatgaatgtatgctgtgtgctagaaatagactaaaacatattcctatagcatgttagtgtgtttgcatgtttgctgaaaatcctttgtgtataaaccagtttgtaaggttctctgggttaggtagggactctgcagtttcttcctgtcaaaatctctcctaccaagatggtgttccactgtccagcccagcatgagtagcaggtagagcacagctttactggctgtttgtatgctttggtttagtgcaatgtgtggtagattacttatcagaaaacatatatgtcatctctagaacgaagaaaaagcatagtagttcaattcccagtgtgtccctttgattttttttttttaatagtaaaaataagaatctgtactgacttttcacttggccattctggttttaaaggacaagctacaagctctgtgtttctgtactgatgtgtcacttattaaatacttttgtaccatgagtaaaacttcaggtgtttcgcaagaaccaccattctcaa

SEQ ID NO: 58667 - DNA, 1682 bp, Homo sapiens
acaggaggcggggcgccgcgcccctccggcagtcaccgaggcccggacctgcggcgtcggcggcgcgcgcagagggccaggcgggcgtagaggccggaccgacgcgtggcggcagagggtatccaaggccggacctggcgcgcaggcgctgacccgacctggcagtgagctggccgcggccttggctgagaggccttaaccccgccgggcggccgcgccctgcatgcgagttgggccgcgggcggggttggagcctactcggggcgactgcgatggacgccttagaaggagagagctttgcgctgtctttctcctccgcctctgatgcagaatttgatgctgtggttggatatttagaggacattatcatggatgacgagttccagttattacagagaaatttcatggacaagtactacctggagtttgaagacacagaagagaataaactcatctacacacctatttttaatgaatacctatttatcctgaaacaccttcttgtattcattaaccatagtactcctccccacctcaagtagacacctctctcaggagcttctgagtcagacgcctctggagcgagccctatgtcaggcactccacctggggggcccttccccagcatacctgctggtgtgtaagtgtggactaacccgccgccaccaccctctgttccagcaggctctgcatgaatctttgtgcacttgcacctctttttcacatgggccacagtttcagtacttcagcctcagtggggttcctgatgtttatctagggtgttactcaagcccagtttgagattttggagtctcctgtgatcacatcttgtctcggctgtaggaatcaacagaaggagacgtcctctacataaaagctccatgtgaaaagctactcctagtcttaacatttgcagtccttgtgtcactgtcttctggtcctgatgtagtcccactgtttctagaagtctcttttaagcattatttttgaaaaaaaaaatatttttatagatgaatactcaggctaacctagtggatgtgatcttggaacttccatgattatccacttaaagatcaaagtattatatgctgtgtgctttttaggtgtttgttagtactgtgaaggcaaaaatgctttctacattgacattcattcctattttactgggcacctatgaatgtatgctgtgtgctagaaatagactaaaacatattcctatagcatgttagtgtgtttgcatgtttgctgaaaatcctttgtgtataaaccagtttgtaaggttctctgggttaggtagggactctgcagtttcttcctgtcaaaatctctcctaccaagatggtgttccactgtccagcccagcatgagtagcaggtagagcacagctttactggctgtttgtatgctttggtttagtgcaatgtgtggtagattacttatcagaaaacatatatgtcatctctagaacgaagaaaaagcatagtagttcaattcccagtgtgtccctttgattttttttttttaatagtaaaaataagaatctgtactgacttttcacttggccattctggttttaaaggacaagctacaagctctgtgtttctgtactgatgtgtcacttattaaatacttttgtaccatgagtaaaacttcaggtgtttcgcaagaaccaccattctcaa

SEQ ID NO: 58668 - DNA, 1198 bp, Homo sapiens
ccacgcgtcgcggacgcgtgggttcattaaccatagtactcctccccacctcaagtagacacctctctcaggagcttctgagtcagacgcctctggagcgagccctatgtcaggcactccacctggggggcccttccccagcatacctgctggtgtgtaagtgtggactaacccgccgccaccaccctctgttccagcaggctctgcatgaatctttgtgcacttgcacctctttttcacatgggccacagtttcagtacttcagcctcagtggggttcctgatgtttatctagggtgttactcaagcccagtttgagattttggagtctcctgtgatcacatcttgtctcggctgtaggaatcaacagaaggagacgtcctctacataaaagctccatgtgaaaagctactcctagtcttaacatttgcagtccttgtgtcactgtcttctggtcctgatgtagtcccactgtttctagaagtctcttttaagcattatttttgaaaaaaaaaatatttttatagatgaatactcaggctaacctagtggatgtgatcttggaacttccatgattatccacttaaagatcaaagtattatatgctgtgtgctttttaggtgtttgttagtactgtgaaggcaaaaatgctttctacattgacattcattcctattttactgggcacctatgaatgtatgctgtgtgctagaaatagactaaaacatattcctatagcatgttagtgtgtttgcatgtttgctgaaaatcctttgtgtataaaccagtttgtaaggttctctgggttaggtagggactctgcagtttcttcctgtcaaaatctctcctaccaagatggtgttccactgtccagcccagcatgagtagcaggtagagcacagctttactggctgtttgtatgctttggtttagtgcaatgtgtggtagattacttatcagaaaacatatatgtcatctctagaacgaagaaaaagcatagtagttcaattcccagtgtgtccctttgattttttttttttaatagtaaaaataagaatctgtactgacttttcacttggccattctggttttaaaggacaagctacaagctctgtgtttctgtactgatgtgtcacttattaaatacttttgtaccatgagtaaaacttcaggtgtttcgcaagaaccaccattctcaa

SEQ ID NO: 58669 - DNA, 990 bp, Homo sapiens
acaggaggcggggcgccgcgcccctccggcagtcaccgaggcccggacctgcggcgtcggcggcgcgcgcagagggccaggcgggcgtagaggccggaccgacgcgtggcggcagagggtatccaaggccggacctggcgcgcaggcgctgacccgacctggcagtgagctggccgcggccttggctgagaggccttaaccccgccgggcggccgcgccctgcatgcgagttgggccgcgggcggggttggagcctactcggggcgactgcgatggacgccttagaaggagagagctttgcgctgtctttctcctccgcctctgatgcagaatttgatgctgtggttggatatttagaggacattatcatggatgacgagttccagttattacagagaaatttcatggacaagtactacctggagtttgaagacacagaagagaataaactcatctacacacctatttttaatgaatacctatgaatgtatgctgtgtgctagaaatagactaaaacatattcctatagcatgttagtgtgtttgcatgtttgctgaaaatcctttgtgtataaaccagtttgtaaggttctctgggttaggtagggactctgcagtttcttcctgtcaaaatctctcctaccaagatggtgttccactgtccagcccagcatgagtagcaggtagagcacagctttactggctgtttgtatgctttggtttagtgcaatgtgtggtagattacttatcagaaaacatatatgtcatctctagaacgaagaaaaagcatagtagttcaattcccagtgtgtccctttgattttttttttttaatagtaaaaataagaatctgtactgacttttcacttggccattctggttttaaaggacaagctacaagctctgtgtttctgtactgatgtgtcacttattaaatacttttgtaccatgagtaaaacttcaggtgtttcgcaagaaccaccattctcaa

SEQ ID NO: 58670 - DNA, 878 bp, Homo sapiens
  misc_feature (17)..(17): n is a, c, g, or t
cattgtgttcgagaggngcgtttatggggcagggtttccaggagaatctctctgtttccatttctgataaagagggacatgaatgagaagagcatctgggcaccgactaacccccccgaatgcatgcgggcggggttggagcctactcggggcgactgcgatggacgccttagaaggagagagctttgcgctgtctttctcctccgcctctgatgcagaatttgatgctgtggttggatatttagaggacattatcatggatgacgagttccagttattacagagaaatttcatggacaagtactacctggagtttgaagacacagaagagaataaactcatctacacacctatttttaatgaatacctatgaatgtatgctgtgtgctagaaatagactaaaacatattcctatagcatgttagtgtgtttgcatgtttgctgaaaatcctttgtgtataaaccagtttgtaaggttctctgggttaggtagggactctgcagtttcttcctgtcaaaatctctcctaccaagatggtgttccactgtccagcccagcatgagtagcaggtagagcacagctttactggctgtttgtatgctttggtttagtgcaatgtgtggtagattacttatcagaaaacatatatgtcatctctagaacgaagaaaaagcatagtagttcaattcccagtgtgtccctttgattttttttttttaatagtaaaaataagaatctgtactgacttttcacttggccattctggttttaaaggacaagctacaagctctgtgtttctgtactgatgtgtcacttattaaatacttttgtaccatgagtaaaacttcaggtgtttcgcaagaaccaccattctcaa

SEQ ID NO: 58671 - DNA, 929 bp, Homo sapiens
acaggaggcggggcgccgcgcccctccggcagtcaccgaggcccggacctgcggcgtcggcggcgcgcgcagagggccaggcgggcgtagaggccggaccgacgcgtggcggcagagggtatccaaggccggacctggcgcgcaggcgctgacccgacctggcagtgagctggccgcggccttggctgagaggccttaaccccgccgggcggccgcgccctgcatgcgagttgggccgcgggcggggttggagcctactcggggcgactgcgatggacgccttagaaggagagagctttgcgctgtctttctcctccgcctctgatgcagaatttgatgctgtggttggatatttagaggacattatcatggatgacgagttccagttattacagagaaatttcatggacaagtactacctggagtttgaagacacagaagagaataaactcatctacacacctatttttaatgaatacatttctttggtagaaaaatacattgaagaacagctgctgcagcggattcctgagttcaacatggcagccttcaccacaacattacagcaccataaggatgaagtggctggtgacatattcgacatgctgctcaccttcacagattttctggcttttaaagaaatgtttttggactacagagcagaaaaagaaggccgaggactggacttaagcagtggcttagtggtgacttcattgtgcaaatcatcttctctgccagcttcccagaacaatctgcggcactaggtcctacctccagccaatgaatgggatcattctggatgtcaccagcccaataggctcagctcatgatgacagaacacatcttggaaagactgactctgttatgtaactcttcatttatgttaagtattaataggtgtgtcgccagccaacaggactatatactaa

SEQ ID NO: 58672 - DNA, 249 bp, Homo sapiens
cggccgcgccctgcatgcgagttgggccgcgggcggggttggagcctactcggggcgactgcgatggacgccttagaaggagagagctttgcgctgtctttgtgagtagctcctccagggcgcaggcgacttggggccggaggcagcgggcgttcgccccggggcctgaccctataaaacaggtgtccttaggggccgggccgggccgggccgggcagggtgggggccgccaaggcgccgtcccagctc

SEQ ID NO: 58673 - DNA, 2132 bp, Homo sapiens
acaggaggcggggcgccgcgcccctccggcagtcaccgaggcccggacctgcggcgtcggcggcgcgcgcagagggccaggcgggcgtagaggccggaccgacgcgtggcggcagagggtatccaaggccggacctggcgcgcaggcgctgacccgacctggcagtgagctggccgcggccttggctgagaggccttaaccccgccgggcggccgcgccctgcatgcgagttgggccgcgggcggggttggagcctactcggggcgactgcgatggacgccttagaaggagagagctttgcgctgtctttctcctccgcctctgatgcagaatttgatgctgtggttggatatttagaggacattatcatggatgacgagttccagttattacagagaaatttcatggacaagtactacctggagtttgaagacacagaagagaataaactcatctacacacctatttttaatgaatacatttctttggtagaaaaatacattgaagaacagctgctgcagcggattcctgagttcaacatggcagccttcaccacaacattacagcaccataaggatgaagtggctggtgacatattcgacatgctgctcaccttcacagattttctggcttttaaagaaatgtttttggactacagagcagaaaaagaaggccgaggactggacttaagcagtggcttagtggtgacttcattgtgcaaatcatcttctctgccagcttcccagaacaatctgcggcactaggtcctacctccagccaatgaatgggatcattctggatgtcaccagcccaataggctcagctcatgatgacagaacacatcttggaaagactgactctgttatgtaactcttcatttatgttaagtattaataggtcaaaaccaaaatgacctaaccctcctggacctatttatcctgaaacaccttcttgtattcattaaccatagtactcctccccacctcaagtagacacctctctcaggagcttctgagtcagacgcctctggagcgagccctatgtcaggcactccacctggggggcccttccccagcatacctgctggtgtgtaagtgtggactaacccgccgccaccaccctctgttccagcaggctctgcatgaatctttgtgcacttgcacctctttttcacatgggccacagtttcagtacttcagcctcagtggggttcctgatgtttatctagggtgttactcaagcccagtttgagattttggagtctcctgtgatcacatcttgtctcggctgtaggaatcaacagaaggagacgtcctctacataaaagctccatgtgaaaagctactcctagtcttaacatttgcagtccttgtgtcactgtcttctggtcctgatgtagtcccactgtttctagaagtctcttttaagcattatttttgaaaaaaaaaatatttttatagatgaatactcaggctaacctagtggatgtgatcttggaacttccatgattatccacttaaagatcaaagtattatatgctgtgtgctttttaggtgtttgttagtactgtgaaggcaaaaatgctttctacattgacattcattcctattttactgggcacctatgaatgtatgctgtgtgctagaaatagactaaaacatattcctatagcatgttagtgtgtttgcatgtttgctgaaaatcctttgtgtataaaccagtttgtaaggttctctgggttaggtagggactctgcagtttcttcctgtcaaaatctctcctaccaagatggtgttccactgtccagcccagcatgagtagcaggtagagcacagctttactggctgtttgtatgctttggtttagtgcaatgtgtggtagattacttatcagaaaacatatatgtcatctctagaacgaagaaaaagcatagtagttcaattcccagtgtgtccctttgattttttttttttaatagtaaaaataagaatctgtactgacttttcacttggccattctggttttaaaggacaagctacaagctctgtgtttctgtactgatgtgtcacttattaaatacttttgtaccatgagtaaaacttcaggtgtttcgcaagaaccaccattctcaa

SEQ ID NO: 58674 - DNA, 2166 bp, Homo sapiens
aattcggcactaggggtcagagaggatcccgccgggcggccgcgccctgcatgcgagttgggccgcgggcggggttggagcctactcggggcgactgcgatggacgccttagaaggagagagctttgcgctgtctttctcctccgcctctgatgcagaatttgatgctgtggttggatatttagaggacattatcatggatgacgagttccagttattacagagaaatttcatggacaagtactacctggagtttgaagacacagaagagaataaactcatctacacacctatttttaatgaatacatttctttggtagaaaaatacattgaagaacagctgctgcagcggattcctgagttcaacatggcagccttcaccacaacattacagcaccataaggatgaagtggctggtgacatattcgacatgctgctcaccttcacagattttctggcttttaaagaaatgtttttggactacagagcagaaaaagaaggccgaggactggacttaagcagtggcttagtggtgacttcattgtgcaaatcatcttctctgccagcttcccagaacaatctgcggcactaggtcctacctccagccaatgaatgggatcattctggatgtcaccagcccaataggctcagctcatgatgacagaacacatcttggaaagactgactctgttatgtaactcttcatttatgttaagtattaataggtcaaaaccaaaatgacctaaccctcctggacctatttatcctgaaacaccttcttgtattcattaaccatagtactcctccccacctcaagtagacacctctctcaggagcttctgagtcagacgcctctggagcgagccctatgtcaggcactccacctggggggcccttccccagcatacctgctggtgtgtaagtgtggactaacccgccgccaccaccctctgttccagcaggctctgcatgaatctttgtgcacttgcacctctttttcacatgggccacagtttcagtacttcagcctcagtggggttcctgatgtttatctagggtgttactcaagcccagtttgagattttggagtctcctgtgatcacatcttgtctcggctgtaggaatcaacagaaggagacgtcctctacataaaagctccatgtgaaaagctactcctagtcttaacatttgcagtccttgtgtcactgtcttctggtcctgatgtagtcccactgtttctagaagtctcttttaagcattatttttgaaaaaaaaaatatttttatagatgaatactcaggctaacctagtggatgtgatcttggaacttccatgattatccacttaaagatcaaagtattatatgctgtgtgctttttaggtgtttgttagtactgtgaaggcaaaaatgctttctacattgacattcattcctattttactgggcacctatgaatgtatgctgtgtgctagaaatagactaaaacatattcctatagcatgttagtgtgtttgcatgtttgctgaaaatcctttgtgtataaaccagtttgtaaggttctctgggttaggtagggactctgcagtttcttcctgtcaaaatctctcctaccaagatggtgttccactgtccagcccagcatgagtagcaggtagagcacagctttactggctgtttgtatgctttggtttagtgcaatgtgtggtagattacttatcagaaaacatatatgtcatctctagaacgaagaaaaagcatagtagttcaattcccagtgtgtccctttgattttttttttttaatagtaaaaataagaatctgtactgacttttcacttggccattctggttttaaaggacaagctacaagctctgtgtttctgtactgatgtgtcacttattaaatacttttgtaccatgagtaaaacttcaggtgtttcgcaagaaccaccattctcaaaaaaaaaaaaaaaaaactccggagggcacctaatggccgggggggggggaaaaagggggtcatggaaagcgggcccgatgggtccaaacgctggcccccctggaacccaaggcttttcttggtcccaaggggggggaaaaccggggcggcggccccctaaaaaggggagccgcgaataaaattcggaaaacccgggttaaccggtac

SEQ ID NO: 58675 - DNA, 2052 bp, Homo sapiens
acaggaggcggggcgccgcgcccctccggcagtcaccgaggcccggacctgcggcgtcggcggcgcgcgcagagggccaggcgggcgtagaggccggaccgacgcgtggcggcagagggtatccaaggccggacctggcgcgcaggcgctgacccgacctggcagtgagctggccgcggccttggctgagaggccttaaccccgccgggcggccgcgccctgcatgcgagttgggccgcgggcggggttggagcctactcggggcgactgcgatggacgccttagaaggagagagctttgcgctgtctttctcctccgcctctgatgcagaatttgatgctgtggttggatatttagaggacattatcatggatgacgagttccagttattacagagaaatttcatggacaagtactacctggagtttgaagacacagaagagaataaactcatctacacacctatttttaatgaatacatttctttggtagaaaaatacattgaagaacagctgctgcagcggattcctgagttcaacatggcagccttcaccacaacattacagcaccataaggatgaagtggctggtgacatattcgacatgctgctcaccttcacagattttctggcttttaaagaaatgtttttggactacagagcaccagaacaatctgcggcactaggtcctacctccagccaatgaatgggatcattctggatgtcaccagcccaataggctcagctcatgatgacagaacacatcttggaaagactgactctgttatgtaactcttcatttatgttaagtattaataggtcaaaaccaaaatgacctaaccctcctggacctatttatcctgaaacaccttcttgtattcattaaccatagtactcctccccacctcaagtagacacctctctcaggagcttctgagtcagacgcctctggagcgagccctatgtcaggcactccacctggggggcccttccccagcatacctgctggtgtgtaagtgtggactaacccgccgccaccaccctctgttccagcaggctctgcatgaatctttgtgcacttgcacctctttttcacatgggccacagtttcagtacttcagcctcagtggggttcctgatgtttatctagggtgttactcaagcccagtttgagattttggagtctcctgtgatcacatcttgtctcggctgtaggaatcaacagaaggagacgtcctctacataaaagctccatgtgaaaagctactcctagtcttaacatttgcagtccttgtgtcactgtcttctggtcctgatgtagtcccactgtttctagaagtctcttttaagcattatttttgaaaaaaaaaatatttttatagatgaatactcaggctaacctagtggatgtgatcttggaacttccatgattatccacttaaagatcaaagtattatatgctgtgtgctttttaggtgtttgttagtactgtgaaggcaaaaatgctttctacattgacattcattcctattttactgggcacctatgaatgtatgctgtgtgctagaaatagactaaaacatattcctatagcatgttagtgtgtttgcatgtttgctgaaaatcctttgtgtataaaccagtttgtaaggttctctgggttaggtagggactctgcagtttcttcctgtcaaaatctctcctaccaagatggtgttccactgtccagcccagcatgagtagcaggtagagcacagctttactggctgtttgtatgctttggtttagtgcaatgtgtggtagattacttatcagaaaacatatatgtcatctctagaacgaagaaaaagcatagtagttcaattcccagtgtgtccctttgattttttttttttaatagtaaaaataagaatctgtactgacttttcacttggccattctggttttaaaggacaagctacaagctctgtgtttctgtactgatgtgtcacttattaaatacttttgtaccatgagtaaaacttcaggtgtttcgcaagaaccaccattctcaa

SEQ ID NO: 58676 - DNA, 2634 bp, Homo sapiens
acaggaggcggggcgccgcgcccctccggcagtcaccgaggcccggacctgcggcgtcggcggcgcgcgcagagggccaggcgggcgtagaggccggaccgacgcgtggcggcagagggtatccaaggccggacctggcgcgcaggcgctgacccgacctggcagtgagctggccgcggccttggctgagaggccttaaccccgccgggcggccgcgccctgcatgcgagttgggccgcgggcggggttggagcctactcggggcgactgcgatggacgccttagaaggagagagctttgcgctgtctttctcctccgcctctgatgcagaatttgatgctgtggttggatatttagaggacattatcatggatgacgagttccagttattacagagaaatttcatggacaagtactacctggagtttgaagacacagaagagaataaactcatctacacacctatttttaatgaatacatttctttggtagaaaaatacattgaagaacagctgctgcagcggattcctgagttcaacatggcagccttcaccacaacattacagcaccataaggatgaagtggctggtgacatattcgacatgctgctcaccttcacagattttctggcttttaaagaaatgtttttggactacagagcagaaaaagaaggccgaggactggacttaagcagtggcttagtggtgacttcattgtgcaaatcatcttctctgccagcttcccagaacaatctgcggcactaggtcctacctccagccaatgaatgggatcattctggatgtcaccagcccaataggctcagctcatgatgacagaacacatcttggaaagactgactctgttatgtaactcttcatttatgttaagtattaataggtcaaaaccaaaatgacctaaccctcctggacctatttatcctgaaacaccttcttgtattcattaaccatagtactcctccccacctcaagtagacacctctctcaggagcttctgagtcagacgcctctggagcgagccctatgtcaggcactccacctggggggcccttccccagcatacctgctggtgtgtaagtgtggactaacccgccgccaccaccctctgttccagcaggctctgcatgaatctttgtgcacttgcacctctttttcacatgggccacagtttcagtacttcagcctcagtggggttcctgatgtttatctagggtgttactcaagcccagtttgagattttggagtctcctgtgatcacatcttgtctcggctgtaggaatcaacagaaggagacgtcctctacataaaagctccatgtgaaaagctactcctagtcttaacatttgcagtccttgtgtcactgtcttctggtcctgatgtagtcccactgtttctagaagtctcttttaagcattatttttgaaaaaaaaaatatttttatagatgaatactcaggctaacctagtggatgtgatcttggaacttccatgattatccacttaaagatcaaagtattatatgctgtgtgctttttaggtgtttgttagtactgtgaaggcaaaaatgctttctacattgacattcattcctattttactgggcacctatgaatgtatgctgtgtgctagaaatagactaaaacatattcctataaaaaaaaaaaaaaaaaaaaaaaaaaaaaaaaaaaaaaaaaaaagaaaaaaaaaaaaagaaaaaaaaaaaaaaaaaaaaaaaaaaaaaaaaacaaaaaacaacaacaaaagaaacaaataaacaaacaaaagaaaacaacacagaacaacaaaacacaaaaagaaagaaaaaacgcaaacgacaagaagataaccaccaggcctcgcagcgacgcccgaagaaatcgaaccatgacaacagactgaccaccaccaggtcgccgcgacgcggcaaccgacgataacgcaggcgcgagtagtgacacgagaggaacacgacaagaacgcagaaagggagacagcacaaggagctggacgaagggatagggaagcagaaacgaggatcagacacgaagggcaagcacaggaggaggagccaagccagactgcgagccggagagccggaaacagagagcagagccgagcatggcaaccgggactcgactcaaaacaacctgaacgaataggcaagacagcagagacaagcagagaaagaaaagacgacaaaagacagaccaccaaagacacggcgacccaatgggaaaaagacaacaaagagaggaacaagtaaggaagaagagaggaaatgaaagaccacaagaaaaagaatacgaaaagaacagaaagggcgagagaacaagcagaagtaagaaacggagaaaaacacgaagagaaagcaagaaaaaacgatagaagcgagaaaaatcataacgagagaacaggacccaggacaggtggacagacgagaaggaaacactaacacgggaacgagaaccaagaaaagagaaacgacgggaacaacaacgacgaccatgaagagagcacaagctggacgaaagaagagacaagaggacagaagtcacgggagaaagaaagagaagaagacgaaagacaaatagagcagggagaacgcgagcacacagacg

SEQ ID NO: 58677 - DNA, 1060 bp, Homo sapiens
acaggaggcggggcgccgcgcccctccggcagtcaccgaggcccggacctgcggcgtcggcggcgcgcgcagagggccaggcgggcgtagaggccggaccgacgcgtggcggcagagggtatccaaggccggacctggcgcgcaggcgctgacccgacctggcagtgagctggccgcggccttggctgagaggccttaaccccgccgggcggccgcgccctgcatgcgagttgggccgcgggcggggttggagcctactcggggcgactgcgatggacgccttagaaggagagagctttgcgctgtctttctcctccgcctctgatgcagaatttgatgctgtggttggatatttagaggacattatcatggatgacgagttccagttattacagagaaatttcatggacaagtactacctggagtttgaagacacagaagagaataaactcatctacacacctatttttaatgaatacatttctttggtagaaaaatacattgaagaacagctgctgcagcggattcctgagttcaacatggcagccttcaccacaacattacagcaccataaggatgaagtggctggtgacatattcgacatgctgctcaccttcacagattttctggcttttaaagaaatgtttttggactacagagcagaaaaagaaggccgaggactggacttaagcagtggcttagtggtgacttcattgtgcaaatcatcttctctgccagcttcccagaacaatctgcggcactaggtcctacctccagccaatgaatgggatcattctggatgtcaccagcccaataggctcagctcatgatgacagaacacatcttggaaagactgactctgttatgtaactcttcatttatgttaagtattaataggtcaaaaccaaaatgacctaaccctcctggacctatttatcctgaaacaccttcttgtattcattaaccatagtactcccactaagtaacctttccggagtctggtcgaccctgtgaggcctttggcaccctggggctccgagtctgggggaggtgaccgccc

SEQ ID NO: 58678 - DNA, 583 bp, Homo sapiens
acaggaggcggggcgccgcgcccctccggcagtcaccgaggcccggacctgcggcgtcggcggcgcgcgcagagggccaggcgggcgtagaggccggaccgacgcgtggcggcagagggtatccaaggccggacctggcgcgcaggcgctgacccgacctggcagtgagctggccgcggccttggctgagaggccttaaccccgccgggcggccgcgccctgcatgcgagttgggccgcgggcggggttggagcctactcggggcgactgcgatggacgccttagaaggagagagctttgcgctgtctttctcctccgcctctgatgcagaatttgatgctgtggttggatatttagaggacattatcatggatgacgagttccagttattacagagaaatttcatggacaagtactacctggagtttgaagacacagaagagaataaactcatctacacacctatttttaatgaatacatttctttggtagaaaaatacattgaagaacagctgctgcagcggattcctgagttaactcaggggcgagctgctaactcaggggcgagctgctaattcagggg

SEQ ID NO: 58679 - DNA, 392 bp, Homo sapiens
gtgaactcagccaagcacagtggtggcagggcctacctgctacaaagaagacatggtttagacaaatactcatgtatatgggcaaaaaactcgaggactgtatttgtgaataactgtattattttagtttctgttctgtggaaagtgtaaagcagtccaacaaagggttttaatgtagatttttttttttgcactcatgctgttgattgctaaatatagtagtgtgatcatgacgctgaataaatgtatctttaaaaaaagataacagagtgttgccaatcctgactgcacattagaatcaccaggggtcttattggtacccaaaaccatcctgcagcaagtgaaacaccatctcaactcaaataatcctgatgtacaaccgattaagaacc

SEQ ID NO: 58680 - DNA, 272 bp, Homo sapiens
tgtgtgtgtgtgtgtgtgtgtgtgtgagaaatggggaaagactggtctagataatatttcaggtacgggacccttcccaaccctaaaatggtatgattcccagcttacaaaaagcaaactattttaatattcaccactcaatatagtgtatcaagctctcggtttatgtttaaggcttagggacagcagcaactattcgtggcaataatcaaaaactatgtaccaaaaagcatgtttaggtcatgaggatagtgaaaaagcaagaccagtct

SEQ ID NO: 58681 - DNA, 1684 bp, Homo sapiens
aagggctgaggcataaaactgccagagggtctcaaggcaggcaaagaagaaccatgaggctcatcctgcctgtgggtttgattgctaccactcttgcaattgctcctgtccgctttgacagggagaaggtgttccgcgtgaagccccaggatgaaaaacaagcagacatcataaaggacttggccaaaaccaatgagcttgacttctggtatccaggtgccacccaccacgtagctgctaatatgatggtggatttccgagttagtgagaaggaatcccaagccatccagtctgccttggatcaaaataaaatgcactatgaaatcttgattcatgatctacaagaagagattgagaaacagtttgatgttaaagaagatatcccaggcaggcacagctacgcaaaatacaataattgggaaaagattgtggcttggactgaaaagatgatggataagtatcctgaaatggtctctcgtattaaaattggatctactgttgaagataatccactatatgttctgaagattggggaaaagaatgaaagaagaaaggctatttttatggattgtggcattcacgcacgagaatgggtctccccagcattctgccagtggtttgtctatcaggcaaccaaaacttatgggagaaacaaaattatgaccaaactcttggaccgaatgaatttttacattcttcctgtgttcaatgttgatggatatatttggtcatggacaaagaaccgcatgtggagaaaaaatcgttccaagaaccaaaactccaaatgcatcggcactgacctcaacaggaattttaatgcttcatggaactccattcctaacaccaatgacccatgtgcagataactatcggggctctgcaccagagtccgagaaagagacgaaagctgtcactaatttcattagaagccacctgaatgaaatcaaggtttacatcaccttccattcctactcccagatgctattgtttccctatggatatacatcaaaactgccacctaaccatgaggacttggccaaagttgcaaagattggcactgatgttctatcaactcgatatgaaacccgctacatctatggcccaatagaatcaacaatttacccgatatcaggttcttctttagactgggcttatgacctgggcatcaaacacacatttgcctttgagctccgagataaaggcaaatttggttttctccttccagaatcccggataaagccaacgtgcagagagaccatgctagctgtcaaatttattgccaagtatatcctcaagcatacttcctaaagaactgccctctgtttggaataagccaattaatccttttttgtgcctttcatcagaaagtcaatcttcagttatccccaaatgcagcttctatttcacctgaatccttctcttgctcatttaagtcccatgttactgctgtttgcttttacttactttcagtagcaccataacgaagtagctttaagtgaaaccttttaactacctttctttgctccaagtgaagtttggacccagcagaaagcattattttgaaaggtgatatacagtggggcacagaaaacaaatgaaaaccctcagtttctcacagattttcaccatgtggcttcatcaatttatgtgctaatacaataaaataaaatgcacttaatgcttta

SEQ ID NO: 58682 - DNA, 1302 bp, Homo sapiens
aagggctgaggcataaaactgccagagggtctcaaggcaggcaaagaagaaccatgaggctcatcctgcctgtgggtttgattgctaccactcttgcaattgctcctgtccgctttgacagggagaaggtgttccgcgtgaagccccaggatgaaaaacaagcagacatcataaaggacttggccaaaaccaatgagcttgacttctggtatccaggtgccacccaccacgtagctgctaatatgatggtggatttccgagttagtgagaaggaatcccaagccatccagtctgccttggatcaaaataaaatgcactatgaaatcttgattcatgatctacaagaagagattgagaaacagtttgatgttaaagaagatatcccaggcaggcacagctacgcaaaatacaataattgggaaaagattgtggcttggactgaaaagatgatggataagtatcctgaaatggtctctcgtattaaaattggatctactgttgaagataatccactatatgttctgaagattggggaaaagaatgaaagaagaaaggctatttttatggattgtggcattcacgcacgagaatgggtctccccagcattctgccagtggtttgtctatcaggcaaccaaaacttatgggagaaacaaaattatgaccaaactcttggaccgaatgaatttttacattcttcctgtgttcaatgttgatggatatatttggtcatggacaaagaaccgcatgtggagaaaaaatcgttccaagaaccaaaactccaaatgcatcggcactgacctcaacaggaattttaatgcttcatggaactccattcctaacaccaatgacccatgtgcagataactatcggggctctgcaccagagtccgagaaagagacgaaagctgtcactaatttcattagaagccacctgaatgaaatcaaggtttacatcaccttccattcctactcccagatgctattgtttccctatggatatacatcaaaactgccacctaaccatgaggacttgtccaagtttcaaattggcctgtggtcataacctgtttaaacaccgtctatatgtcccaagaaacaaatcccgcataaagggttttttaagggctttaccggggtaaaacaacttctcttcgccgaataagacattggtttctccaaacccgtaaccacctcagaacctcctcttgcaattgcggcattctcagtttctctaaacacctgtttacctacttgtgctctctagtcctcttccccgctcttttttctacgctttactatac

SEQ ID NO: 58683 - DNA, 358 bp, Homo sapiens
aagggctgaggcataaaactgccagagggtctcaaggcaggcaaagaagaaccatgaggctcatcctgcctgtgggtttgattgctaccactcttgctcatttaagtcccatgttactgctgtttgcttttacttactttcagtagcaccataacgaagtagctttaagtgaaaccttttaactacctttctttgctccaagtgaagtttggacccagcagaaagcattattttgaaaggtgatatacagtggggcacagaaaacaaatgaaaaccctcagtttctcacagattttcaccatgtggcttcatcaatttatgtgctaatacaataaaataaaatgcacttaatgcttta

SEQ ID NO: 58684 - DNA, 1796 bp, Homo sapiens
aagggctgaggcataaaactgccagagggtctcaaggcaggcaaagaagaaccatgaggctcatcctgcctgtgggtttgattgctaccactcttgcaattgctcctgtccgctttgacagggagaaggtgttccgcgtgaagccccaggatgaaaaacaagcagacatcataaaggacttggccaaaaccaatgagcttgacttctggtatccaggtgccacccaccacgtagctgctaatatgatggtggatttccgagttagtgagaaggaatcccaagccatccagtctgccttggatcaaaataaaatgcactatgaaatcttgattcatgatctacaagaagagattgagaaacagtttgatgttaaagaagatatcccaggcaggcacagctacgcaaaatacaataattgggaaaagattgtggcttggactgaaaagatgatggataagtatcctgaaatggtctctcgtattaaaattggatctactgttgaagataatccactatatgttctgaagattggggaaaagaatgaaagaagaaaggctatttttatggattgtggcattcacgcacgagaatgggtctccccagcattctgccagtggtttgtctatcaggcaaccaaaacttatgggagaaacaaaattatgaccaaactcttggaccgaatgaatttttacattcttcctgtgttcaatgttgatggatatatttggtcatggacaaagaaccgcatgtggagaaaaaatcgttccaagaaccaaaactccaaatgcatcggcactgacctcaacaggaattttaatgcttcatggaactccattcctaacaccaatgacccatgtgcagataactatcggggctctgcaccagagtccgagaaagagacgaaagctgtcactaatttcattagaagccacctgaatgaaatcaaggtttacatcaccttccattcctactcccagatgctattgtttccctatggatatacatcaaaactgccacctaaccatgaggacttggccaaagttgcaaagattggcactgatgttctatcaactcgatatgaaacccgctacatctatggcccaatagaatcaacaatttacccgatatcaggttcttctttagactgggcttatgacctgggcatcaaacacacatttgcctttgagctccgagataaaggcaaatttggttttctccttccagaatcccggataaagccaacgtgcagagagaccatgctagctgtcaaatttattgccaagtatatcctcaagcatacttcctaaagaactgccctctgtttggaataagccaattaatccttttttgtgcctttcatcagaaagtcaatcttcagttatccccaaatgcagcttctatttcacctgaatccttctcttgctcatttaagtcccatgttactgctgtttgcttttacttactttcagtagcaccataacgaagtagctttaagtgaaaccttttaactacctttctttgctccaagtgaagtttggacccagcagaaagcattattttgaaaggtgatatacagtggggcacagaaaacaaatgaaaaccctcagtttctcacagattttcaccatgtggcttcatcaatttatgtgctaatacaataaaataaaatgcacttaatgctttaaaattcatctttttatgataaactatattctctgtatttctctatagcattaataatcaatattaatgccattcattcagtctgttaataagaaataatatcttcaattttc

SEQ ID NO: 58685 - DNA, 188 bp, Homo sapiens
ttttaactacctttctttgctccaagtgaagtttggacccagcagaaagcattattttgaaaggtgatatacagtggggcacagaaaacaaatgaaaaccctcagtttctcacagattttcaccatgtggcttcatcaatttatgtgctaatacaataaaataaaatgcacttaatgctttaaaattc

SEQ ID NO: 58686 - DNA, 439 bp, Homo sapiens
tttactgcttgtgttttacagacccgatatcaggttcttctttagactgggcttatgacctgggcatcaaacacacatttgcctttgagctccgagataaaggcaaatttggttttctccttccagaatcccggataaagccaacgtgcagagagaccatgctagctgtcaaatttattgccaagtatatcctcaagcatacttcctaaagaactgccctctgtttggaataagccaattaatccttttttgtgcctttcatcagaaagtcaatcttcagttatccccaaatgcagcttctatttcacctgaatccttctcttgctcatttaagtcccatgttactgctgtttgcttttacttactttcagtagcaccataacgaagtagctttaagtgaaaccttttaactacctttctttgctccaagtgaagtttg

SEQ ID NO: 58687 - DNA, 292 bp, Homo sapiens
gaaacttatagtcttgcctcccaaccttctgaacactccagtagaaaaatcttctcgcctacctttatcaccccacgacctactagcatttcttactctcaaaaaaaatcttttctgaaaaatcaagacagagtgcaaacaatcagcataattttattatgacaaaacttttaaattttatccccctctctgagaggtctgctaggactccttcagataagtgaaaaagaaattttttaaaatttattctcaaatccgaattccaatctgtataaaaaggcgattctccctc

SEQ ID NO: 58688 - DNA, 9030 bp, Homo sapiens
gcttagtgctgagcacatccagtgggtaaagttccttaaaatgctctgcaaagaaattgggacttttcattaaatcagaaattttacttttttcccctcctgggagctaaagatattttagagaagaattaaccttttgcttctccagttgaacatttgtagcaataagtcatgcaaatagagctctccacctgcttctttctgtgccttttgcgattctgctttagtgccaccagaagatactacctgggtgcagtggaactgtcatgggactatatgcaaagtgatctcggtgagctgcctgtggacgcaagatttcctcctagagtgccaaaatcttttccattcaacacctcagtcgtgtacaaaaagactctgtttgtagaattcacggatcaccttttcaacatcgctaagccaaggccaccctggatgggtctgctaggtcctaccatccaggctgaggtttatgatacagtggtcattacacttaagaacatggcttcccatcctgtcagtcttcatgctgttggtgtatcctactggaaagcttctgagggagctgaatatgatgatcagaccagtcaaagggagaaagaagatgataaagtcttccctggtggaagccatacatatgtctggcaggtcctgaaagagaatggtccaatggcctctgacccactgtgccttacctactcatatctttctcatgtggacctggtaaaagacttgaattcaggcctcattggagccctactagtatgtagagaagggagtctggccaaggaaaagacacagaccttgcacaaatttatactactttttgctgtatttgatgaagggaaaagttggcactcagaaacaaagaactccttgatgcaggatagggatgctgcatctgctcgggcctggcctaaaatgcacacagtcaatggttatgtaaacaggtctctgccaggtctgattggatgccacaggaaatcagtctattggcatgtgattggaatgggcaccactcctgaagtgcactcaatattcctcgaaggtcacacatttcttgtgaggaaccatcgccaggcgtccttggaaatctcgccaataactttccttactgctcaaacactcttgatggaccttggacagtttctactgttttgtcatatctcttcccaccaacatgatggcatggaagcttatgtcaaagtagacagctgtccagaggaaccccaactacgaatgaaaaataatgaagaagcggaagactatgatgatgatcttactgattctgaaatggatgtggtcaggtttgatgatgacaactctccttcctttatccaaattcgctcagttgccaagaagcatcctaaaacttgggtacattacattgctgctgaagaggaggactgggactatgctcccttagtcctcgcccccgatgacagaagttataaaagtcaatatttgaacaatggccctcagcggattggtaggaagtacaaaaaagtccgatttatggcatacacagatgaaacctttaagactcgtgaagctattcagcatgaatcaggaatcttgggacctttactttatggggaagttggagacacactgttgattatatttaagaatcaagcaagcagaccatataacatctaccctcacggaatcactgatgtccgtcctttgtattcaaggagattaccaaaaggtgtaaaacatttgaaggattttccaattctgccaggagaaatattcaaatataaatggacagtgactgtagaagatgggccaactaaatcagatcctcggtgcctgacccgctattactctagtttcgttaatatggagagagatctagcttcaggactcattggccctctcctcatctgctacaaagaatctgtagatcaaagaggaaaccagataatgtcagacaagaggaatgtcatcctgttttctgtatttgatgagaaccgaagctggtacctcacagagaatatacaacgctttctccccaatccagctggagtgcagcttgaggatccagagttccaagcctccaacatcatgcacagcatcaatggctatgtttttgatagtttgcagttgtcagtttgtttgcatgaggtggcatactggtacattctaagcattggagcacagactgacttcctttctgtcttcttctctggatataccttcaaacacaaaatggtctatgaagacacactcaccctattcccattctcaggagaaactgtcttcatgtcgatggaaaacccaggtctatggattctggggtgccacaactcagactttcggaacagaggcatgaccgccttactgaaggtttctagttgtgacaagaacactggtgattattacgaggacagttatgaagatatttcagcatacttgctgagtaaaaacaatgccattgaaccaagaagcttctcccagaattcaagacaccctagcactaggcaaaagcaatttaatgccaccacaattccagaaaatgacatagagaagactgacccttggtttgcacacagaacacctatgcctaaaatacaaaatgtctcctctagtgatttgttgatgctcttgcgacagagtcctactccacatgggctatccttatctgatctccaagaagccaaatatgagactttttctgatgatccatcacctggagcaatagacagtaataacagcctgtctgaaatgacacacttcaggccacagctccatcacagtggggacatggtatttacccctgagtcaggcctccaattaagattaaatgagaaactggggacaactgcagcaacagagttgaagaaacttgatttcaaagtttctagtacatcaaataatctgatttcaacaattccatcagacaatttggcagcaggtactgataatacaagttccttaggacccccaagtatgccagttcattatgatagtcaattagataccactctatttggcaaaaagtcatctccccttactgagtctggtggacctctgagcttgagtgaagaaaataatgattcaaagttgttagaatcaggtttaatgaatagccaagaaagttcatggggaaaaaatgtatcgtcaacagagagtggtaggttatttaaagggaaaagagctcatggacctgctttgttgactaaagataatgccttattcaaagttagcatctctttgttaaagacaaacaaaacttccaataattcagcaactaatagaaagactcacattgatggcccatcattattaattgagaatagtccatcagtctggcaaaatatattagaaagtgacactgagtttaaaaaagtgacacctttgattcatgacagaatgcttatggacaaaaatgctacagctttgaggctaaatcatatgtcaaataaaactacttcatcaaaaaacatggaaatggtccaacagaaaaaagagggccccattccaccagatgcacaaaatccagatatgtcgttctttaagatgctattcttgccagaatcagcaaggtggatacaaaggactcatggaaagaactctctgaactctgggcaaggccccagtccaaagcaattagtatccttaggaccagaaaaatctgtggaaggtcagaatttcttgtctgagaaaaacaaagtggtagtaggaaagggtgaatttacaaaggacgtaggactcaaagagatggtttttccaagcagcagaaacctatttcttactaacttggataatttacatgaaaataatacacacaatcaagaaaaaaaaattcaggaagaaatagaaaagaaggaaacattaatccaagagaatgtagttttgcctcagatacatacagtgactggcactaagaatttcatgaagaaccttttcttactgagcactaggcaaaatgtagaaggttcatatgacggggcatatgctccagtacttcaagattttaggtcattaaatgattcaacaaatagaacaaagaaacacacagctcatttctcaaaaaaaggggaggaagaaaacttggaaggcttgggaaatcaaaccaagcaaattgtagagaaatatgcatgcaccacaaggatatctcctaatacaagccagcagaattttgtcacgcaacgtagtaagagagctttgaaacaattcagactcccactagaagaaacagaacttgaaaaaaggataattgtggatgacacctcaacccagtggtccaaaaacatgaaacatttgaccccgagcaccctcacacagatagactacaatgagaaggagaaaggggccattactcagtctcccttatcagattgccttacgaggagtcatagcatccctcaagcaaatagatctccattacccattgcaaaggtatcatcatttccatctattagacctatatatctgaccagggtcctattccaagacaactcttctcatcttccagcagcatcttatagaaagaaagattctggggtccaagaaagcagtcatttcttacaaggagccaaaaaaaataacctttctttagccattctaaccttggagatgactggtgatcaaagagaggttggctccctggggacaagtgccacaaattcagtcacatacaagaaagttgagaacactgttctcccgaaaccagacttgcccaaaacatctggcaaagttgaattgcttccaaaagttcacatttatcagaaggacctattccctacggaaactagcaatgggtctcctggccatctggatctcgtggaagggagccttcttcagggaacagagggagcgattaagtggaatgaagcaaacagacctggaaaagttccctttctgagagtagcaacagaaagctctgcaaagactccctccaagctattggatcctcttgcttgggataaccactatggtactcagataccaaaagaagagtggaaatcccaagagaagtcaccagaaaaaacagcttttaagaaaaaggataccattttgtccctgaacgcttgtgaaagcaatcatgcaatagcagcaataaatgagggacaaaataagcccgaaatagaagtcacctgggcaaagcaaggtaggactgaaaggctgtgctctcaaaacccaccagtcttgaaacgccatcaacgggaaataactcgtactactcttcagtcagatcaagaggaaattgactatgatgataccatatcagttgaaatgaagaaggaagattttgacatttatgatgaggatgaaaatcagagcccccgcagctttcaaaagaaaacacgacactattttattgctgcagtggagaggctctgggattatgggatgagtagctccccacatgttctaagaaacagggctcagagtggcagtgtccctcagttcaagaaagttgttttccaggaatttactgatggctcctttactcagcccttataccgtggagaactaaatgaacatttgggactcctggggccatatataagagcagaagttgaagataatatcatggtaactttcagaaatcaggcctctcgtccctattccttctattctagccttatttcttatgaggaagatcagaggcaaggagcagaacctagaaaaaactttgtcaagcctaatgaaaccaaaacttacttttggaaagtgcaacatcatatggcacccactaaagatgagtttgactgcaaagcctgggcttatttctctgatgttgacctggaaaaagatgtgcactcaggcctgattggaccccttctggtctgccacactaacacactgaaccctgctcatgggagacaagtgacagtacaggaatttgctctgtttttcaccatctttgatgagaccaaaagctggtacttcactgaaaatatggaaagaaactgcagggctccctgcaatatccagatggaagatcccacttttaaagagaattatcgcttccatgcaatcaatggctacataatggatacactacctggcttagtaatggctcaggatcaaaggattcgatggtatctgctcagcatgggcagcaatgaaaacatccattctattcatttcagtggacatgtgttcactgtacgaaaaaaagaggagtataaaatggcactgtacaatctctatccaggtgtttttgagacagtggaaatgttaccatccaaagctggaatttggcgggtggaatgccttattggcgagcatctacatgctgggatgagcacactttttctggtgtacagcaataagtgtcagactcccctgggaatggcttctggacacattagagattttcagattacagcttcaggacaatatggacagtgggccccaaagctggccagacttcattattccggatcaatcaatgcctggagcaccaaggagcccttttcttggatcaaggtggatctgttggcaccaatgattattcacggcatcaagacccagggtgcccgtcagaagttctccagcctctacatctctcagtttatcatcatgtatagtcttgatgggaagaagtggcagacttatcgaggaaattccactggaaccttaatggtcttctttggcaatgtggattcatctgggataaaacacaatatttttaaccctccaattattgctcgatacatccgtttgcacccaactcattatagcattcgcagcactcttcgcatggagttgatgggctgtgatttaaatagttgcagcatgccattgggaatggagagtaaagcaatatcagatgcacagattactgcttcatcctactttaccaatatgtttgccacctggtctccttcaaaagctcgacttcacctccaagggaggagtaatgcctggagacctcaggtgaataatccaaaagagtggctgcaagtggacttccagaagacaatgaaagtcacaggagtaactactcagggagtaaaatctctgcttaccagcatgtatgtgaaggagttcctcatctccagcagtcaagatggccatcagtggactctcttttttcagaatggcaaagtaaaggtttttcagggaaatcaagactccttcacacctgtggtgaactctctagacccaccgttactgactcgctaccttcgaattcacccccagagttgggtgcaccagattgccctgaggatggaggttctgggctgcgaggcacaggacctctactgagggtggccactgcagcacctgccactgccgtcacctctccctcctcagctccagggcagtgtccctccctggcttgccttctacctttgtgctaaatcctagcagacactgccttgaagcctcctgaattaactatcatcagtcctgcatttctttggtggggggccaggagggtgcatccaatttaacttaactcttacctattttctgcagctgctcccagattactccttccttccaatataactaggcaaaaagaagtgaggagaaacctgcatgaaagcattcttccctgaaaagttaggcctctcagagtcaccacttcctctgttgtagaaaaactatgtgatgaaactttgaaaaagatatttatgatgttaacatttcaggttaagcctcatacgtttaaaataaaactctcagttgtttattatcctgatcaagcatggaacaaagcatgtttcaggatcagatcaatacaatcttggagtcaaaaggcaaatcatttggacaatctgcaaaatggagagaatacaataactactacagtaaagtctgtttctgcttccttacacatagatataattatgttatttagtcattatgaggggcacattcttatctccaaaactagcattcttaaactgagaattatagatggggttcaagaatccctaagtcccctgaaattatataaggcattctgtataaatgcaaatgtgcatttttctgacgagtgtccatagatataaagccatttggtcttaattctgaccaataaaaaaataagtcaggaggatgcaattgttgaaagctttgaaataaaataacaatgtcttcttgaaatttgtgatggccaagaaagaaaatgatgatgacattaggcttctaaaggacatacatttaatatttctgtggaaatatgaggaaaatccatggttatctgagataggagatacaaactttgtaattctaataatgcactcagtttactctctccctctactaatttcctgctgaaaataacacaacaaaaatgtaacaggggaaattatataccgtgactgaaaactagagtcctacttacatagttgaaatatcaaggaggtcagaagaaaattggactggtgaaaacagaaaaaacactccagtctgccatatcaccacacaataggatcccccttcttgccctccacccccataagattgtgaagggtttactgctccttccatctgcctgaccccttcactatgactacacagaatctcctgatagtaaagggggctggaggcaaggataagttatagagcagttggaggaagcatccaaagattgcaacccagggcaaatggaaaacaggagatcctaatatgaaagaaaaatggatcccaatctgagaaaaggcaaaagaatggctacttttttctatgctggagtattttctaataatcctgcttgacccttatctgacctctttggaaactataacatagctgtcacagtatagtcacaatccacaaatgatgcaggtgcaaatggtttatagccctgtgaagttcttaaagtttagaggctaacttacagaaatgaataagttgttttgttttatagcccggtagaggagttaaccccaaaggtgatatggttttatttcctgttatgtttaacttgataatcttattttggcattcttttcccattgactatatacatctctatttctcaaatgttcatggaactagctcttttattttcctgctggtttcttcagtaatgagttaaataaaacattgacacataca

SEQ ID NO: 58689 - DNA, 1819 bp, Homo sapiens
gcttagtgctgagcacatccagtgggtaaagttccttaaaatgctctgcaaagaaattgggacttttcattaaatcagaaattttacttttttcccctcctgggagctaaagatattttagagaagaattaaccttttgcttctccagttgaacatttgtagcaataagtcatgcaaatagagctctccacctgcttctttctgtgccttttgcgattctgctttagtgccaccagaagatactacctgggtgcagtggaactgtcatgggactatatgcaaagtgatctcggtgagctgcctgtggacgcaagatttcctcctagagtgccaaaatcttttccattcaacacctcagtcgtgtacaaaaagactctgtttgtagaattcacggatcaccttttcaacatcgctaagccaaggccaccctggatgggtctgctaggtcctaccatccaggctgaggtttatgatacagtggtcattacacttaagaacatggcttcccatcctgtcagtcttcatgctgttggtgtatcctactggaaagcttctgagggagctgaatatgatgatcagaccagtcaaagggagaaagaagatgataaagtcttccctggtggaagccatacatatgtctggcaggtcctgaaagagaatggtccaatggcctctgacccactgtgccttacctactcatatctttctcatgtggacctggtaaaagacttgaattcaggcctcattggagccctactagtatgtagagaagggagtctggccaaggaaaagacacagaccttgcacaaatttatactactttttgctgtatttgatgaagggaaaagttggcactcagaaacaaagaactccttgatgcaggatagggatgctgcatctgctcgggcctggcctaaaatgcacacagtcaatggttatgtaaacaggtctctgccaggtctgattggatgccacaggaaatcagtctattggcatgtgattggaatgggcaccactcctgaagtgcactcaatattcctcgaaggtcacacatttcttgtgaggaaccatcgccaggcgtccttggaaatctcgccaataactttccttactgctcaaacactcttgatggaccttggacagtttctactgttttgtcatatctcttcccaccaacatgatggcatggaagcttatgtcaaagtagacagctgtccagaggaaccccaactacgaatgaaaaataatgaagaagcggaagactatgatgatgatcttactgattctgaaatggatgtggtcaggtttgatgatgacaactctccttcctttatccaaattcgctcagttgccaagaagcatcctaaaacttgggtacattacattgctgctgaagaggaggactgggactatgctcccttagtcctcgcccccgatgacagaagttataaaagtcaatatttgaacaatggccctcagcggattggtaggaagtacaaaaaagtccgatttatggcatacacagatgaaacctttaagactcgtgaagctattcagcatgaatcaggaatcttgggacctttactttatggggaagttggagacacactgttggtaagttgaagaaaagatttaaggtcaggtaagaagaaaaagtctggagagttttgagtttctaaaatacctcataattcagccttgtctccaatggacatgatcttttaaaagctataaatgttacacaaataatagctgattgtatgtatttaaagtttgagtatatagaataaaaatttaatgtcacccactaaactcgaca

SEQ ID NO: 58690 - DNA, 3899 bp, Homo sapiens
gggcagatcacctgaggtcaggagtttgagaccagcctgggcaacagggtgaaaccgcatctctactaaaaatacaaaaaaaattaaccaggtgtgatggcacacctgtaatcccagctactcaggaggctgaggcatgagaattgcttgaacccaggatgtggaggctgcagtgagctgagatgtactccagcctgggtgacagagtgagactctgtctcaaataaaaaaataaaaattaaatcaatgttttcacttctactttctctgttttctcctcctaaactccaatcagttgtgtgttggaatttactgatggctcctttactcagcccttataccgtggagaactaaatgaacatttgggactcctggggccatatataagagcagaagttgaagataatatcatggtaactttcagaaatcaggcctctcgtccctattccttctattctagccttatttcttatgaggaagatcagaggcaaggagcagaacctagaaaaaactttgtcaagcctaatgaaaccaaaacttacttttggaaagtgcaacatcatatggcacccactaaagatgagtttgactgcaaagcctgggcttatttctctgatgttgacctggaaaaagatgtgcactcaggcctgattggaccccttctggtctgccacactaacacactgaaccctgctcatgggagacaagtgacagtacaggaatttgctctgtttttcaccatctttgatgagaccaaaagctggtacttcactgaaaatatggaaagaaactgcagggctccctgcaatatccagatggaagatcccacttttaaagagaattatcgcttccatgcaatcaatggctacataatggatacactacctggcttagtaatggctcaggatcaaaggattcgatggtatctgctcagcatgggcagcaatgaaaacatccattctattcatttcagtggacatgtgttcactgtacgaaaaaaagaggagtataaaatggcactgtacaatctctatccaggtgtttttgagacagtggaaatgttaccatccaaagctggaatttggcgggtggaatgccttattggcgagcatctacatgctgggatgagcacactttttctggtgtacagcaataagtgtcagactcccctgggaatggcttctggacacattagagattttcagattacagcttcaggacaatatggacagtgggccccaaagctggccagacttcattattccggatcaatcaatgcctggagcaccaaggagcccttttcttggatcaaggtggatctgttggcaccaatgattattcacggcatcaagacccagggtgcccgtcagaagttctccagcctctacatctctcagtttatcatcatgtatagtcttgatgggaagaagtggcagacttatcgaggaaattccactggaaccttaatggtcttctttggcaatgtggattcatctgggataaaacacaatatttttaaccctccaattattgctcgatacatccgtttgcacccaactcattatagcattcgcagcactcttcgcatggagttgatgggctgtgatttaaatagttgcagcatgccattgggaatggagagtaaagcaatatcagatgcacagattactgcttcatcctactttaccaatatgtttgccacctggtctccttcaaaagctcgacttcacctccaagggaggagtaatgcctggagacctcaggtgaataatccaaaagagtggctgcaagtggacttccagaagacaatgaaagtcacaggagtaactactcagggagtaaaatctctgcttaccagcatgtatgtgaaggagttcctcatctccagcagtcaagatggccatcagtggactctcttttttcagaatggcaaagtaaaggtttttcagggaaatcaagactccttcacacctgtggtgaactctctagacccaccgttactgactcgctaccttcgaattcacccccagagttgggtgcaccagattgccctgaggatggaggttctgggctgcgaggcacaggacctctactgagggtggccactgcagcacctgccactgccgtcacctctccctcctcagctccagggcagtgtccctccctggcttgccttctacctttgtgctaaatcctagcagacactgccttgaagcctcctgaattaactatcatcagtcctgcatttctttggtggggggccaggagggtgcatccaatttaacttaactcttacctattttctgcagctgctcccagattactccttccttccaatataactaggcaaaaagaagtgaggagaaacctgcatgaaagcattcttccctgaaaagttaggcctctcagagtcaccacttcctctgttgtagaaaaactatgtgatgaaactttgaaaaagatatttatgatgttaacatttcaggttaagcctcatacgtttaaaataaaactctcagttgtttattatcctgatcaagcatggaacaaagcatgtttcaggatcagatcaatacaatcttggagtcaaaaggcaaatcatttggacaatctgcaaaatggagagaatacaataactactacagtaaagtctgtttctgcttccttacacatagatataattatgttatttagtcattatgaggggcacattcttatctccaaaactagcattcttaaactgagaattatagatggggttcaagaatccctaagtcccctgaaattatataaggcattctgtataaatgcaaatgtgcatttttctgacgagtgtccatagatataaagccatttggtcttaattctgaccaataaaaaaataagtcaggaggatgcaattgttgaaagctttgaaataaaataacaatgtcttcttgaaatttgtgatggccaagaaagaaaatgatgatgacattaggcttctaaaggacatacatttaatatttctgtggaaatatgaggaaaatccatggttatctgagataggagatacaaactttgtaattctaataatgcactcagtttactctctccctctactaatttcctgctgaaaataacacaacaaaaatgtaacaggggaaattatataccgtgactgaaaactagagtcctacttacatagttgaaatatcaaggaggtcagaagaaaattggactggtgaaaacagaaaaaacactccagtctgccatatcaccacacaataggatcccccttcttgccctccacccccataagattgtgaagggtttactgctccttccatctgcctgaccccttcactatgactacacagaatctcctgatagtaaagggggctggaggcaaggataagttatagagcagttggaggaagcatccaaagattgcaacccagggcaaatggaaaacaggagatcctaatatgaaagaaaaatggatcccaatctgagaaaaggcaaaagaatggctacttttttctatgctggagtattttctaataatcctgcttgacccttatctgacctctttggaaactataacatagctgtcacagtatagtcacaatccacaaatgatgcaggtgcaaatggtttatagccctgtgaagttcttaaagtttagaggctaacttacagaaatgaataagttgttttgttttatagcccggtagaggagttaaccccaaaggtgatatggttttatttcctgttatgtttaacttgataatcttattttggcattcttttcccattgactatatacatctctatttctcaaatgttcatggaactagctcttttattttcctgctggtttcttcagtaatgagttaaataaaacattgacacataca

SEQ ID NO: 58691 - DNA, 443 bp, Homo sapiens
tcagtcttggcaccaaatgagccagtttatatcatcagctattcaataaaacactaatctaggtgtcaccatgaaagtattttgtgacattgttatgtacgtgttgttacaaatgtgcatgatgcatttactacagcatacaattttgcctgggtgccagcctgaagtctgtccgacagatcatagccatgttagtcccacagtcacaggggccaatggattaaattattttatctcccttgagaactaaaaataaaatcctaagccccccacccgacttagcagacccccttttggccaacggaacccgtttcttttcttttttttcttttttgattgagatgaagtctcatgcttgtcacccaggctggactgcaatggtgcaatctcagctcactgcaacctccgcctcctgggttcaagcgattctcctgactcagcct

SEQ ID NO: 58692 - DNA, 3512 bp, Homo sapiens
  misc_feature (1646)..(1646): n is a, c, g, or t
  misc_feature (2143)..(2143): n is a, c, g, or t
  misc_feature (2784)..(2784): n is a, c, g, or t
  misc_feature (2840)..(2840): n is a, c, g, or t
ggcacgagctttggctggctagggaggggatgcaatgatataaacatttatcccctgatacctcatgttaaaatctgatgcccactgtgggacgtggggcctaatggccaccatttgggtcatggtgaccaatcttttatgaatagagagatactgccctctcttgggaatgaatgaattgttgctttattattttccaagagagctagttgttaaaaagaccctggcaacttcctactctctctgttcctctgttaccatgtgttctctgcatataccagctcacctttgtcttctgccatgagtggaagcagcctgaggccctcactaaatgcgcaaacatttccagacatcagaatcttgagccacatgaaccttgtttatataaattagtcagtctcagacatttctttatagcaacacaaaatggaaaaagataacactcgcatcacaggtatgtgtctctggcagctagccaccgttcttaagatatccaggatccactcagccaagagtcttctcatcagtactctaaagacacttatcactcaagagagtctaaggtttttaggagaaaccagggacaaagtctaaatgtttttgtgataactcagattgcccacttttctttgaccacatatcttttacaggaaaaaggattgtaacagtaaagaggtattggcatattatcagagtctcatccattcattcaaaattaggccagtttatcatcctcttgtatgaatatgtctcccagaatgaaatcactcagctttgctgacaacactcaatcttaccaggttccaaaaacaagaatggtctcagggacatacagcttcactcttttaggcatccagtataattgacctaagtgacaatatcttctcttgctcacaccacctttgaggagttaagctaatattgaatttttctcattatataaccctttgatttattcacttgccctcagccactattcctccctctgtccctttatatcagttgtttccaggtttgggagtgacattaggtttgtctgctgggctggcctagactgcaggcagcaatagtattctagcatgtcttccctcagtctagtcttgatcatagagggtaggttatataggtaaggaactagtgggggctatcaagaccaccaggctatataactctacttactgttaatcctaacttttccagatgaaatgaatacttgagaattcttacataaaggtataaaaatatagttatggtttttggcttagggataattcctgtttctggcacttttatttacatccctattcctggtactatggcataacatatgaaaaaataaatttgaggtgaagtgtagtctttattccagcatcctctcctcttcagaagaattgtatgtatcgtcataacagcatcgtcctgatccatcaggtaaaagagaggatgctacctagtggagttattcttgcagccccactcatgttgacagcgagcacattcatgaagatataaaagccagtccttcatgtttatattgcccaacaattagattggcagtttttagacaaacaatgtttcaattgaccatttcaattttctatcaaattttcccctgaggaggacatgtccctctgcattgttggccntttgaggctgtaaagtgtgttttcttgtgtaaagaagtgtgactcggcagtccaaattggtgcaatctcttcttttctggttcttgtatagcccttgaagcattgacatctacccctggttgagcatagcccaatccagagtcagtgattttcctgtcaagatccattggcagctcctttggggttgctggcatcattctggcttgccaggtattatgatcaaagccttcccactagagaatctgtcacatctccatctgctgcctctgtctgttttcttgaccaacagtgaaaaaagagattatgagaaataagataaattaccaaaattgtgaacaaaagagagattatcactaatgacccttaggaagttaaaaaacattataagtgaatactctgaaaaacctgaagccaataagttagaccacttggataaaaaggaccaattcgtgcagagatagaaattgccaaaactgacccaaattaactggaaaacntgaagagaactgtgaactaagtcagaaattgaaaaaccttctcaaaaagaaatgccaaagcccagatatcttcactggtgaattctatcaaatattttgaaagctctttcagacaagaagagaggagggaagactttccagcccatttacagaactggcattaccctcatatcaaagtcacagcaagactcacaggaaaagagtgccatacaccagtgtcaccaataaacataaatgaaaacatccttaacaaacattggcagataatacaaagccacataaaaaaggattacactccatgaccaatgggattcatcccaggaacatatggttggattaacatttgaaaatcagttcatggaatgcactgtattaatggaaaaaaagacataattatctcaaaagatgcaggagaaacagttgacaaaaatgttaacatcactcatgttcataagtttcaacaaaataggaatggaggagaccttcttcactctgataaagggcgtctataaaaaacccacagctaaaatcaaacttaatgaagaaagactgaagactgaatgcttttctcctaagatggggatcaatgcaaggatgtccaatcccaccacttttatttaatattatactggagattgtanccagtgcaataaggcagaaaattaaaaattaaaggcatccagataaaaaggaaaanatacaattctattcacagataacatgaccctgtctgtagaattcacaagcagataaaaactggctagcactaataaatgaatccagaagggcccataggatatcaaatcaatataaaaattaattattaacatatttctctatagaagcaatgaaaatctcaactttcctatcacagtagttaccagaagagcgaaataggaataaatttaggaagacagcagtgtttgttcactgaaaataaaaaaacattcctcagagaaattaaaggtctaaataaatggagagatgcgagttggaaagctcgataatactgttaagatggcagttctcccccagtagatctataggttcaacacaatccctatcaaaatcccagcaggattttatagaaaattgacaaaataggccgggcgcggtggctcatgccggtaatcccagcactttgggaggctgaggcgggcggatcatgagatcaggagatccagaccatcctggctaacacggtgaaaccccgtctctactaaaaatacaaaaaattagccgggcgtggtggcaggctcctcgggaggctgaggcagaaaaatggcatgaacccggtaggcagaagttgcagtgagcggagatcgtgccactgcactccagcctgggtgacagagcgagactccgtctc

SEQ ID NO: 58693 - DNA, 304 bp, Homo sapiens
ttttacttggagtgttcttcagtgttaccccatcttcactttaatatgaatacttatatctctctgatctctgctttaaaaaaaactaactttttatttggaattattttatttattttattgtttagagacagggtcttgctatgaggctggtctcaaactcctggcctcaagcaattctcccacctcagcctcccaagtatctgggattacaggtttgagtatttggaataattttagatttacaaaggttgtgaagataatacagagaattttcgtatacacttgcccatctcccctaatg

SEQ ID NO: 58694 - DNA, 744 bp, Homo sapiens
  misc_feature (739)..(740): n is a, c, g, or t
  misc_feature (742)..(743): n is a, c, g, or t
ctcctcaggccccgcccgccctgccctcccctcccgatcccggagccatgtggcccctggccctagtgatcgcctccctgaccttggccttgtcaggaggtgtctcccaggagtcttccaaggttctcaacaccaatgggaccagtgggtttctcccaggtggctacacctgcttcccccactctcagccctggcaggctgccctactagtgcaagggcggctactctgtgggggagtcctggtccaccccaaatgggtcctcactgccgcacactgtctaaaggaggggctcaaagtttacctaggcaagcacgccctagggcgtgtggaagctggtgagcaggtgagggaagttgtccactctatcccccaccctgaataccggagaagccccacccacctgaaccacgaccatgacatcatgcttctggagctgcagtccccggtccagctcacaggctacatccaaaccctgcccctttcccacaacaaccgcctaacccctggcaccacctgtcgggtgtctggctggggcaccaccaccagcccccagggtatgcacccacacaggtggcctgaggccccataggagtggctggggaaacaggggcagagatgggagggaaggtctgaggtaggttcctttatatataaaaatataaataagtaaataaatatatatatttaaagttagctgtatcctttatataaatataaattcatgaatatataaaaaannanna

SEQ ID NO: 58695 - DNA, 1842 bp, Homo sapiens
ctcctcaggccccgcccgccctgccctcccctcccgatcccggagccatgtggcccctggccctagtgatcgcctccctgaccttggccttgtcaggaggtgtctcccaggagtcttccaaggttctcaacaccaatgggaccagtgggtttctcccaggtggctacacctgcttcccccactctcagccctggcaggctgccctactagtgcaagggcggctactctgtgggggagtcctggtccaccccaaatgggtcctcactgccgcacactgtctaaaggaggggctcaaagtttacctaggcaagcacgccctagggcgtgtggaagctggtgagcaggtgagggaagttgtccactctatcccccaccctgaataccggagaagccccacccacctgaaccacgaccatgacatcatgcttctggagctgcagtccccggtccagctcacaggctacatccaaaccctgcccctttcccacaacaaccgcctaacccctggcaccacctgtcgggtgtctggctggggcaccaccaccagcccccaggtgaattaccccaaaactctacaatgtgccaacatccaacttcgctcagatgaggagtgtcgtcaagtctacccaggaaagatcactgacaacatgttgtgtgccggcacaaaagagggtggcaaagactcctgtgagggtgactctgggggccccctggtctgtaacagaacactgtatggcatcgtctcctggggagacttcccatgtgggcaacctgaccggcctggtgtctacacccgtgtctcaagatacgtcctgtggatccgtgaaacaatccgaaaatatgaaacccagcagcaaaaatggttgaagggcccacaataaaagttgagaaatgtaccggcttccatcctgtcaccatgacttcctcacatggtctgcttagcccttctctgctccttattcccagtgttccatttgaaccagtgatccatgtcctgaaaaatgctcaatctcagctaacattccatgtttcagaagcattcaggcactgccaggcttgcagtctcccagatgttgcatccctgaaacatctcaacaacctgaatgtcccaacccagacaatggcccaggtctctcaacttcatcagtgtggcttctatgagcccagatcaccacctgaacgttctgtctgtggcacattcttaaatatttccatcagcccatctcaacaatatatgtcctataaatggaccatccttgacaacatcctctaactcttcaagtatttattcaatgccagtatcctagaccttctattttttgcactcaagaaggctctagactcccatgatagttcatcctgaaaatattctcttatgcccacaatcttctgccctgacaacattctgtgtacctctgtgactcaccacagctaacattggatcctcagaatatttcattctcacactgttatgggtgtctcagaagtcccaacccaacctacatcccacattcttccaataccccacctctgccaacattccctctctgaatcaatggcaccctagtctctagagttatagggttcagtataccaaagggtcttcttgcctgaactttattgtctaccaaatattccgtcttgtatcccctccatgaacatccttggtcagtgtcccttgctgttacatctttgtgcatgaccctaaaatgtagtgcaaatccttgctttggacaagttataaaactcacagtctctgtgctttctcatctgtaaaatgggttcataattttttttaattgtaacattattacaagaataaatgtcaagcatttatcacta

SEQ ID NO: 58696 - DNA, 1469 bp, Homo sapiens
  misc_feature (1435)..(1435): n is a, c, g, or t
ctcctcaggccccgcccgccctgccctcccctcccgatcccggagccatgtggcccctggccctagtgatcgcctccctgaccttggccttgtcaggaggtgtctcccaggagtcttccaaggttctcaacaccaatgggaccagtgggtttctcccaggtggctacacctgcttcccccactctcagccctggcaggctgccctactagtgcaagggcggctactctgtgggggagtcctggtccaccccaaatgggtcctcactgccgcacactgtctaaaggaggggctcaaagtttacctaggcaagcacgccctagggcgtgtggaagctggtgagcaggtgagggaagttgtccactctatcccccaccctgaataccggagaagccccacccacctgaaccacgaccatgacatcatgcttctggagctgcagtccccggtccagctcacaggctacatccaaaccctgcccctttcccacaacaaccgcctaacccctggcaccacctgtcgggtgtctggctggggcaccaccaccagcccccaggtgaattaccccaaaactctacaatgtgccaacatccaacttcgctcagatgaggagtgtcgtcaagtctacccaggaaagatcactgacaacatgttgtgtgccggcacaaaagagggtggcaaagactcctgtgagggtgactctgggggccccctggtctgtaacagaacactgtatggcatcgtctcctggggagacttcccatgtgggcaacctgaccggcctggtgtctacacccgtgtctcaagatacgtcctgtggatccgtgaaacaatccgaaaatatgaaacccagcagcaaaaatggttgaagggcccacaataaaagttgagaaatgtaccggcttccatcctgtcaccatgacttcctcacatggtctgcttagcccttctctgctccttattcccagtgttccatttgaaccagtgatccatgtcctgaaaaatgctcaatctcagctaacattccatgtttcagaagcattcaggcactgccaggcttgcagtctcccagatgttgcatccctgaaacatctcaacaacctgaatgtcccaacccagacaatggcccaggtctctcaacttcatcagtgtggcttctatgagcccagatcaccacctgaacgttctgtctgtggcacattcttaaatatttccatcagcccatctcaacaatatatgtcctataaatggaccatccttgacaacatcctctaactcttcaagtatttattcaatgccagtatcctagaccttctattttttgcactcaagaaggctctagactcccatgatagttcatcctgaaaatattctcttatgcccacaatcttctgccctgacaacattctgtgtacctctgtgactcaccacagccantttaggtacagccatttagggggatcctctaggt

SEQ ID NO: 58697 - DNA, 1346 bp, Homo sapiens
  misc_feature (1322)..(1322): n is a, c, g, or t
ctcctcaggccccgcccgccctgccctcccctcccgatcccggagccatgtggcccctggccctagtgatcgcctccctgaccttggccttgtcaggaggtgtctcccaggagtcttccaaggttctcaacaccaatgggaccagtgggtttctcccaggtggctacacctgcttcccccactctcagccctggcaggctgccctactagtgcaagggcggctactctgtgggggagtcctggtccaccccaaatgggtcctcactgccgcacactgtctaaaggaggggctcaaagtttacctaggcaagcacgccctagggcgtgtggaagctggtgagcaggtgagggaagttgtccactctatcccccaccctgaataccggagaagccccacccacctgaaccacgaccatgacatcatgcttctggagctgcagtccccggtccagctcacaggctacatccaaaccctgcccctttcccacaacaaccgcctaacccctggcaccacctgtcgggtgtctggctggggcaccaccaccagcccccaggtgaattaccccaaaactctacaatgtgccaacatccaacttcgctcagatgaggagtgtcgtcaagtctacccaggaaagatcactgacaacatgttgtgtgccggcacaaaagagggtggcaaagactcctgtgagggtgactctgggggccccctggtctgtaacagaacactgtatggcatcgtctcctggggagacttcccatgtgggcaacctgaccggcctggtgtctacacccgtgtctcaagatacgtcctgtggatccgtgaaacaatccgaaaatatgaaacccagcagcaaaaatggttgaagggcccacaataaaagttgagaaatgtaccggcttccatcctgtcaccatgacttcctcacatggtctgcttagcccttctctgctccttattcccagtgttccatttgaaccagtgatccatgtcctgaaaaatgctcaatctcagctaacattccatgtttcagaagcattcaggcactgccaggcttgcagtctcccagatgttgcatccctgaaacatctcaacaacctgaatgtcccaacccagacaatggcccaggtctctcaacttcatcagtgtggcttctatgagcccagatcaccacctgaacgttctgtctgtggcacattcttaaatatttccatcagcccatctcaacaatatatgtcctataaatggaccatccttgacaacatcctctaactcttcaagtatttattcaatgccagtatcctagaccttctattttttngtcccttccctccttgtccgggga

SEQ ID NO: 58698 - DNA, 2296 bp, Homo sapiens
ctacctaaatggatgaatggatagatggatgagtagacggatggacaaatcaataggatgaatgggggatggatgattggatagattgatggatagatattgcctaggtggatgtgtaggtcagtctcacttctacctcctgaaatccatcttctggtagaatgatataaaaaatgcatgtggagagaaagtcaggctcctgcttacctatcagcaacatcctcattttgtgaactcttctgttaacccccagtggaggatttggtacttcctgagaaaataatgtcacccctttgccctaattcatctccacttggtcaagaatagcaactgccataggtcggcaaattcatcttcagttcctggtcacccagggcaataatccgacccttaccccaaacccagaaaccacaaccccagggctcctctgccccctggatcccagttttctaacaatctctcttctttaccaggtgtctcccaggagtcttccaaggttctcaacaccaatgggaccagtgggtttctcccaggtggctacacctgcttcccccactctcagccctggcaggctgccctactagtgcaagggcggctactctgtgggggagtcctggtccaccccaaatgggtcctcactgccgcacactgtctaaaggaggggctcaaagtttacctaggcaagcacgccctagggcgtgtggaagctggtgagcaggtgagggaagttgtccactctatcccccaccctgaataccggagaagccccacccacctgaaccacgaccatgacatcatgcttctggagctgcagtccccggtccagctcacaggctacatccaaaccctgcccctttcccacaacaaccgcctaacccctggcaccacctgtcgggtgtctggctggggcaccaccaccagcccccagggtatgcacccacacaggtggcctgaggccccataggagtggctggggaaacaggggcagagatgggagggaaggtctgagtgaattaccccaaaactctacaatgtgccaacatccaacttcgctcagatgaggagtgtcgtcaagtctacccaggaaagatcactgacaacatgttgtgtgccggcacaaaagagggtggcaaagactcctgtgagggtgactctgggggccccctggtctgtaacagaacactgtatggcatcgtctcctggggagacttcccatgtgggcaacctgaccggcctggtgtctacacccgtgtctcaagatacgtcctgtggatccgtgaaacaatccgaaaatatgaaacccagcagcaaaaatggttgaagggcccacaataaaagttgagaaatgtaccggcttccatcctgtcaccatgacttcctcacatggtctgcttagcccttctctgctccttattcccagtgttccatttgaaccagtgatccatgtcctgaaaaatgctcaatctcagctaacattccatgtttcagaagcattcaggcactgccaggcttgcagtctcccagatgttgcatccctgaaacatctcaacaacctgaatgtcccaacccagacaatggcccaggtctctcaacttcatcagtgtggcttctatgagcccagatcaccacctgaacgttctgtctgtggcacattcttaaatatttccatcagcccatctcaacaatatatgtcctataaatggaccatccttgacaacatcctctaactcttcaagtatttattcaatgccagtatcctagaccttctattttttgcactcaagaaggctctagactcccatgatagttcatcctgaaaatattctcttatgcccacaatcttctgccctgacaacattctgtgtacctctgtgactcaccacagctaacattggatcctcagaatatttcattctcacactgttatgggtgtctcagaagtcccaacccaacctacatcccacattcttccaataccccacctctgccaacattccctctctgaatcaatggcaccctagtctctagagttatagggttcagtataccaaagggtcttcttgcctgaactttattgtctaccaaatattccgtcttgtatcccctccatgaacatccttggtcagtgtcccttgctgttacatctttgtgcatgaccctaaaatgtagtgcaaatccttgctttggacaagttataaaactcacagtctctgtgctttctcatctgtaaaatgggttcataattttttttaattgtaacattattacaagaataaatgtcaagcatttatcacta

SEQ ID NO: 58699 - DNA, 467 bp, Homo sapiens
  misc_feature (139)..(139): n is a, c, g, or t
  misc_feature (345)..(345): n is a, c, g, or t
  misc_feature (466)..(467): n is a, c, g, or t
cggcttggcttgcccttcctgtcccattgccctggcactggcgagctcctcctggacatactccagcagtgccttctccagctgccgccaggtcacactcccttgccctgccccttccctgtctgttgggctgtacttngtgcctgtgcttgagctaggatttgggttcttttcgtaaacacatcccagtcctgttgatgtcttaagtatctctaagaaggataaatgaggagtgatgggcctggggacagggttgaaaagggtcaaggcctgggtggcgcttccctggagaaaagagggccccacagaggcgggccatgcctggctgctgggacagggcaggancagaggtgggggctgcagagcccagcagactggggccacacctgctgtcccgatcctgctcaggacagatgccaccctgttctcatgaccaccagtgccctcctgagagccccagccacann

SEQ ID NO: 58700 - DNA, 426 bp, Homo sapiens
gcgtaaccctgagcatatcatctacctctctttgagtttgcttgtcaataaaatgaagagactttgaaatctgagacttcctggataagtactaaatacagattatgtcactgatgtctgcctctatttatttctcccttttaccctaatctctataagtctacctcagtcatcctgatcctattctacttctctgatgttgttgtcagataggtgtgatcatcctcatcagatcttttctgtattcttagagacagataactttatcaaagaccacagatttattagtatagcatgttaaagtcttctaaagagtctcattgatgctcttttcatctcagtacaatttttaaaactgctgaatgcaaggtactgagctgttggaagtgactgacagatgaatgtaacagattcatagagaaggaa

SEQ ID NO: 58701 - DNA, 314 bp, Homo sapiens
ggctggagttcaacaaggctcagtgaacagcacaggatggggaagttcaaagtcagggcgactcttctggtcttaacttcctagattttcctagatctgggtgcctctgtgtatatattaaccttcatgcatttttgcccccagcaattgtgtacagtcagctccaaaggcacagcttgtgtgctaacgtgcaaagcgaagtcaaaaccctgtgcttggcgctcccttctaactttctggcttgtccaagtctaaatattgacatcgctcctcagttgagatgtttgatactgctggggatggaaacggtgcag

SEQ ID NO: 58702 - DNA, 176 bp, Homo sapiens
  misc_feature (5)..(6): n is a, c, g, or t
  misc_feature (8)..(8): n is a, c, g, or t
  misc_feature (41)..(41): n is a, c, g, or t
  misc_feature (166)..(167): n is a, c, g, or t
  misc_feature (173)..(173): n is a, c, g, or t
atatnntnggaaatctgttcattgttgatagggctgacggnctataaggaattatcactccctaaaaggaaagaaacttgcagagcaattcagcatccaaggaaagactgacagctttgaaagagacctgataatgatgcaagtaggaacttgcatgtgcttgaannaagcantgt

SEQ ID NO: 58703 - DNA, 1909 bp, Homo sapiens
cgagacccccggcccggcactcgctctcctcctgtcacgaaagggtcgcggcctgtagccctgtgggcagccgtgccgcgatgaaccccagcgcccccagctaccacatggcctcgctgtatgtgggggacctgcaccccgacgtgactgaattgatgttccaagagaagtttagctcgacaggtccaccctcaccatccgggtctttagggactggctcacccacctcttcgtgggctacgtgtccgtgaacttcctgcagccggcagacgcggagcgtgctctggccaccatgaactttgatgttataaagggcaagccagtataagtcctgtggtctcagcgcgatctatcgctgcgcaaaagtggagtgggcaacgtattcgttaaaaaccaggacaaatccgttgagaaagcactgtgtgatgcattttctgcttttggtaacttcctttcgtgtaaggtagtttgtgatgaaaatggttctaagggctgtggatctgtacactttgagacacaggaagcagctgaaggagctattgaaaaaatggatgggatgctcctgaatggtctcaatgtatttgttggacggtttaggtctcctaaagaacaagaagcagaacttggagctagggcaaaagagtccaaagttggacctgcctcaagtgtaaaagtaataactgatgaaggtggaaaatccaaaggatttggatttgtaagctttgaaaggcatgaagatccacagacagctatggatgtgaatggaaaggagttcagtggaaatcaaacttacatttgtctagctccgaaaaaagtggaagagcagacagaacttaagtgcaaatttgaacagatgaagcaagatagaatcaccagataccagggtgctaacgtttgtgtgaaaaatcttgatgagagtattgatgatgaacgtctccagaaagaattttctccatttggtataatcaatagtgcaaatgttatgatggagggtggttgcagcaaaaggtttggctttgtatgtttctcctccccagaagaagtagctaaagcagttacagcaatgaacggtaaaattgtggccagcaagccattgcatgtagctttagctcagtgcaaagaacagcgcctggctcacttcactaaccaatacatgcagaagatggcaagtgtacgagctgtgccccaccctgtaatcaacccctaccagccagcaccttctacatgttacttcgtagcagctatcccacagacccagaaccgtgctgcatactatcctcctggccaaattgctcaactaagaccaagtcctccctgggctgttcagagtgtcagaccttatccattccaaatatgacctgtgctatccgctcagctgctcgtaaccaccactctgagaccagcttcttcacaggttccaccagtcatgtccacacagtatgttgctaactcatcaatacagacaattagtccatgtcctgtagctgctgctgctggctccactcctgcggtctacatcattccacagtacaaatatgcttcaggaattctcattcctcagcagcatcttaaagcacatccacaggttaccaggaagcagcttgctgttcatgtccaaggtcaaaaacttttgactgcttccatgttagcatctgcccctcttcagcagcagaagcagatattgggtgaaagactctttcctcttattcaagccacgcaccctactcttgctggtaaaatcactggcatgttattggagcttgataatttaaaacttcttcatatgcttgtgtctccggagtctctgaagctgtagttgtactacaagcctaccatgtgaaagaggctccagaaagcaattaacagtgctactgttgtaccaactgcttaaaattgatcagggaccacc

SEQ ID NO: 58704 - DNA, 272 bp, Homo sapiens
caatactcacggttcagtcgatcatgtcagatgtttggaggttgtcattttttcctatttgcaatttgtctctactatgccctgggcaacagaaaaatttctgtaccgaaatagtctttacaaatatttgtttaggttcccagatctgacttttatgtttatcttcattctctttgttcttaactttgacctgtgattggaatacattttctaatgtaatgctatctttgtaaataacctttataaataaacattatcttattaccagctca

SEQ ID NO: 58705 - DNA, 291 bp, Homo sapiens
tgatacattatgtgatcctggatgttagaagctttgcctaatgactaggatatgagttaacatggttaccttttttaaaagtctattatcaggtaacaatattaaaaattaaaataactcccatgctaatctgattcccacagttgagatgataaaacagtcacatagtatgctaaacacatgttttccagcaagtaagcagcacagaatgagagaaaaattggagggaaattttagggaacaggctggtgcatcagaaaaaaaatggaagtaaaaatttaaaggaagata

SEQ ID NO: 58706 - DNA, 112 bp, Homo sapiens
ctgtgatcaacgtctccccttttcctatccacctcgctcctccgggctctgataaccaccattttactctctactcctatgagttgaatatattttatagtcataaaatatt

SEQ ID NO: 58707 - DNA, 2447 bp, Homo sapiens
aagtgccttgaattccttggtaattatttccttttaagcgtgtaactcttattattgctaaactgctttttaagttaatggtagttgttgtccaaaggaagtctgatctgtgtttttgaaacctcaatgatcgtctgtttctaattaaggaattggatgaagacatgcatcagaaaattgcaagggagatgaacctctctgaaactgcttttatccgaaaactgcacccgacagacaactttgcacaaagttcctgctttggactgagatggtttacaccagcgagtgaggtcccactctgtggccatgccaccctggcttctgcagctgtgctgtttcacaaaataaaaaacatgaatagcacgctcacgtttgtcactctgagtggagaactaagggccagacgagcagaggacggcatcgtcctggacttgcctctttatccagcccacccccaggacttccatgaagtagaggacttgataaagactgccataggcaacacactggtccaggacatctgttattctccagatacccaaaagctcctcgtccgcctcagtgacgtttacaacaggtcgtttctggagaacctgaaagtgaacacggagaatctgctgcaagttgaaaacacagggaaggtgaaagggcttattcttacccttaaaggagagcctggtgggcagacccaagcatttgacttttactcaagatattttgcaccgtgggttggtgtggctgaagacccagtgacagggtctgcacacgctgttctcagcagctactggtcccagcatctggggaagaaagaaatgcatgcttttcagtgttcccaccgaggaggagagctgggaatttcccttcgtccagacggaagggttgacattagaggaggtgcagctgttgttttagagggcacactgacagcctagaggtggttatgctgtgacgctgctgtctctaaccaccaagtattttctgcttaaaaagaaatgtaaggggctgcctttagcaaatgtgcgtagtagtctacttaatcctcatgttaaaaatcgaaaaatgggccaggcgcagtggctcatgcctgtaatcgtagcactttgagaggccaaggtgggtggatcacctgaggtcaggggttcgacaccagcctggccaacatggtgaaacctcgtctctactacaaatacaaaaattagctgggtgtggtgccacatgcctgtaattccagctacttgggaggctgaggcatggagaatcgcttgaacccaggaggcagaagttgcagtgagcagagatcacaccactgcactccagcctgggcaacagagtaagactccatccacacacacacacacacacacaaaattgaaaagtgaagacattttaatggagatttaatagtgcttccagactaatgaactaatggagttttggctccactcatgagtgtatttgaaatgtaagtaaccagctacaaagaataatgtcacttcatttgattatgactaccaatcaagagaaggaggaatacatttctgaggagtgatactaaaccatttgagcttaaatgagtacctgattttgcagccattaaaatgagtcaataactatgtggaaatatagaaaaatattttataatataatactaagaaagaggacagtaggccataaagtgttagcagtgttatgctatgtctatataaataagcatgggccattaaaaatagcaaactgaaaacagttcatgtgtggggggcaagtttagaagtaattttaatgtatctaagaagtgatttcctttattgttgtactcaggtacgaagactaaaaatcaggatgaatccagaaaattaacacaaaaaagtatgtattaggctacttcctgtcatagtgaaattaaacactcaaagtaatgtaatctcagctgggcgtggcggctcatgcctgtaatcccagcactttggcaggacaaggcaggaggatcacttgaacctaggagttcgagaccagcctgggcaacacagcgagaacttgtctctattaaaaaaaaaaaaaggaatgtaatttcaatctttttcttgatatatggcttgagaatgataatgtaaaaggaattcttctcttacttcaataaaatgggttttaacataactttaaattcagttaaatatacaatattgaatacctatagttgactttgggatggggactttttcaagtcattaagagtgtttgtttaaggtgatctcattgatggtagttctcagccgtctcaaaaactgcaagctaatcagtcagacattctttaatgaccccaattttttcactttaattgttaccatgttttctatttttactgatttttgctaaagcatgtaagagtgaatttattatagcagtaatcttgtgtttctcctgatgtgcaataaatcaataattcacca

SEQ ID NO: 58708 - DNA, 440 bp, Homo sapiens
agagtttattcaaactggataattgattgtaattgcttagaaatttaccacaaaatcgcctctgttttctttgggattgtctcctaacttttcacttcttttgagggtctgcacacgctgttctcagcagctactggtcccagcatctggggaagaaagaaatgcatggtaggacagctctttaccaatttcttttttatttgcctaattcgaagctagtgttccttctcatatgtactatccccttgaaaatgtaatacaatgtcatgtatcacccatgtgaaaatgaaaggttttaaaattccttcacccttaaagatcctccaccccaaacagccttcacctctgcctcccccaacatacagagactgtacagacacagatacagtaactgcccaataagtgtttgttgaataaaatagctgtataactttggccca

SEQ ID NO: 58709 - DNA, 2584 bp, Homo sapiens
tacaaaggaggccgtctgcctcctttgtcctggatttgggagttgagcaccttcgtcgccattggctttcctcccccagctccagcctctctcatcttgggaatctgcgtcagaagtcactcgcagtcccgtcagcccagaagaagacgtaaagcaggctaccagcaattttgagaacttgcaaaaacagcttgcaaggaaaatgaagcttcctattttcatagcagatgcattcacagcaagagcatttcgtgggaatcctgctgctgtttgcctcctagaaaatgaattggatgaagacatgcatcagaaaattgcaagggagatgaacctctctgaaactgcttttatccgaaaactgcacccgacagacaactttgcacaaagttcctgctttggactgagatggtttacaccagcgagtgaggtcccactctgtggccatgccaccctggcttctgcagctgtgctgtttcacaaaataaaaaacatgaatagcacgctcacgtttgtcactctgagtggagaactaagggccagacgagcagaggacggcatcgtcctggacttgcctctttatccagcccacccccaggacttccatgaagtagaggacttgataaagactgccataggcaacacactggtccaggacatctgttattctccagatacccaaaagctcctcgtccgcctcagtgacgtttacaacaggtcgtttctggagaacctgaaagtgaacacggagaatctgctgcaagttgaaaacacagggaaggtgaaagggcttattcttacccttaaaggagagcctggtgggcagacccaagcatttgacttttactcaagatattttgcaccgtgggttggtgtggctgaagacccagtgacagggtctgcacacgctgttctcagcagctactggtcccagcatctggggaagaaagaaatgcatgcttttcagtgttcccaccgaggaggagagctgggaatttcccttcgtccagacggaagggttgacattagaggaggtgcagctgttgttttagagggcacactgacagcctagaggtggttatgctgtgacgctgctgtctctaaccaccaagtattttctgcttaaaaagaaatgtaaggggctgcctttagcaaatgtgcgtagtagtctacttaatcctcatgttaaaaatcgaaaaatgggccaggcgcagtggctcatgcctgtaatcgtagcactttgagaggccaaggtgggtggatcacctgaggtcaggggttcgacaccagcctggccaacatggtgaaacctcgtctctactacaaatacaaaaattagctgggtgtggtgccacatgcctgtaattccagctacttgggaggctgaggcatggagaatcgcttgaacccaggaggcagaagttgcagtgagcagagatcacaccactgcactccagcctgggcaacagagtaagactccatccacacacacacacacacacacaaaattgaaaagtgaagacattttaatggagatttaatagtgcttccagactaatgaactaatggagttttggctccactcatgagtgtatttgaaatgtaagtaaccagctacaaagaataatgtcacttcatttgattatgactaccaatcaagagaaggaggaatacatttctgaggagtgatactaaaccatttgagcttaaatgagtacctgattttgcagccattaaaatgagtcaataactatgtggaaatatagaaaaatattttataatataatactaagaaagaggacagtaggccataaagtgttagcagtgttatgctatgtctatataaataagcatgggccattaaaaatagcaaactgaaaacagttcatgtgtggggggcaagtttagaagtaattttaatgtatctaagaagtgatttcctttattgttgtactcaggtacgaagactaaaaatcaggatgaatccagaaaattaacacaaaaaagtatgtattaggctacttcctgtcatagtgaaattaaacactcaaagtaatgtaatctcagctgggcgtggcggctcatgcctgtaatcccagcactttggcaggacaaggcaggaggatcacttgaacctaggagttcgagaccagcctgggcaacacagcgagaacttgtctctattaaaaaaaaaaaaaggaatgtaatttcaatctttttcttgatatatggcttgagaatgataatgtaaaaggaattcttctcttacttcaataaaatgggttttaacataactttaaattcagttaaatatacaatattgaatacctatagttgactttgggatggggactttttcaagtcattaagagtgtttgtttaaggtgatctcattgatggtagttctcagccgtctcaaaaactgcaagctaatcagtcagacattctttaatgaccccaattttttcactttaattgttaccatgttttctatttttactgatttttgctaaagcatgtaagagtgaatttattatagcagtaatcttgtgtttctcctgatgtgcaataaatcaataattcacca

SEQ ID NO: 58710 - DNA, 2652 bp, Homo sapiens
tacaaaggaggccgtctgcctcctttgtcctggatttgggagttgagcaccttcgtcgccattggctttcctcccccagctccagcctctctcatcttgggaatctgcgtcagaagtcactcgcagtcccgtcagcccagaagaagacgtaaagcaggctaccagcaattttgagaacttgcaaaaacagcttgcaaggaaaatgaagcttcctattttcatagcagatgcattcacagcaagagcatttcgtgggaatcctgctgctgtttgcctcctagaaaatgaattggatgaagacatgcatcagaaaattgcaagggagatgaacctctctgaaactgcttttatccgaaaactgcacccgacagacaactttgcacaaagttcctgctttggactgagatggtttacaccagcgagtgaggtcccactctgtggccatgccaccctggcttctgcagctgtgctgtttcacaaaataaaaaacatgaatagcacgctcacgtttgtcactctgagtggagaactaagggccagacgagcagaggacggcatcgtcctggacttgcctctttatccagcccacccccaggacttccatgaagtagaggacttgataaagactgccataggcaacacactggtccaggacatctgttattctccagatacccaaaagctcctcgtccgcctcagtgacgtttacaacaggtcgtttctggagaacctgaaagtgaacacggagaatctgctgcaagttgaaaacacagggaaggtgaaagggcttattcttacccttaaaggagagcctggtgggcagacccaagcatttgacttttactcaagatattttgcaccgtgggttggtgtggctgaagacccagtgacagggtctgcacacgctgttctcagcagctactggtcccagcatctggggaagaaagaaatgcatgcttttcagtgttcccaccgaggaggagagctgggaatttcccttcgtccagacggaagggttgacattagaggaggtgcagctgttgttttagagggcacactgacagcctagaggtggttatgctgtgacgctgctgtctctaaccaccaagtattttctgcttaaaaagaaatgtaaggggctgcctttagcaaatgtgcgtagtagtctacttaatcctcatgttaaaaatcgaaaaatgggccaggcgcagtggctcatgcctgtaatcgtagcactttgagaggccaaggtgggtggatcacctgaggtcaggggttcgacaccagcctggccaacatggtgaaacctcgtctctactacaaatacaaaaattagctgggtgtggtgccacatgcctgtaattccagctacttgggaggctgaggcatggagaatcgcttgaacccaggaggcagaagttgcagtgagcagagatcacaccactgcactccagcctgggcaacagagtaagactccatccacacacacacacacacacacaaaattgaaaagtgaagacattttaatggagatttaatagtgcttccagactaatgaactaatggagttttggctccactcatgagtgtatttgaaatgtaagtaaccagctacaaagaataatgtcacttcatttgattatgactaccaatcaagagaaggaggaatacatttctgaggagtgatactaaaccatttgagcttaaatgagtacctgattttgcagccattaaaatgagtcaataactatgtggaaatatagaaaaatattttataatataatactaagaaagaggacagtaggccataaagtgttagcagtgttatgctatgtctatataaataagcatgggccattaaaaatagcaaactgaaaacagttcatgtgtggggggcaagtttagaagtaattttaatgtatctaagaagtgatttcctttattgttgtactcaggtacgaagactaaaaatcaggatgaatccagaaaattaacacaaaaaagtatgtattaggctacttcctgtcatagtgaaattaaacactcaaagtaatgtaatctcagctgggcgtggcggctcatgcctgtaatcccagcactttggcaggacaaggcaggaggatcacttgaacctaggagttcgagaccagcctgggcaacacagcgagaacttgtctctattaaaaaaaaaaaaaggaatgtaatttcaatctttttcttgatatatggcttgagaatgataatgtaaaaggaattcttctcttacttcaataaaatgggttttaacataactttaaattcagttaaatatacaatattgaatacctatagttgactttgggatggggactttttcaagtcattaagagtgtttgtttaaggtgatctcattgatggtagttctcagccgtctcaaaaactgcaagctaatcagtcagacattctttaatgaccccaattttttcactttaattgttaccatgttttctatttttactgatttttgctaaagcatgtaagagtgaatttattatagcagtaatcttgtgtttctcctgatgtgcaataaatcaataattcaccaaaagaaaacaaaaataacgaaaaaaacattgtgtgggagggaagggagcaggagaagagttataaaag

SEQ ID NO: 58711 - DNA, 2647 bp, Homo sapiens
tacagtgagccgagatcggtgccactgcactcccgcctgggcaacagagcaagactccatctcaaaaaatgaaaaaagaagttaggggattatatatctttaaatgtagtatctttgaataattgcttgactttgtatctgggaactgttctttgcgtctggacaccaagtaaaacattaactttttgatttccttttccaagaagaagacgtaaagcaggctaccagcaattttgagaacttgcaaaaacagcttgcaaggaaaatgaagcttcctattttcatagcagatgcattcacagcaagagcatttcgtgggaatcctgctgctgtttgcctcctagaaaatgaattggatgaagacatgcatcagaaaattgcaagggagatgaacctctctgaaactgcttttatccgaaaactgcacccgacagacaactttgcacaaagttcctgctttggactgagatggtttacaccagcgagtgaggtcccactctgtggccatgccaccctggcttctgcagctgtgctgtttcacaaaataaaaaacatgaatagcacgctcacgtttgtcactctgagtggagaactaagggccagacgagcagaggacggcatcgtcctggacttgcctctttatccagcccacccccaggacttccatgaagtagaggacttgataaagactgccataggcaacacactggtccaggacatctgttattctccagatacccaaaagctcctcgtccgcctcagtgacgtttacaacaggtcgtttctggagaacctgaaagtgaacacggagaatctgctgcaagttgaaaacacagggaaggtgaaagggcttattcttacccttaaaggagagcctggtgggcagacccaagcatttgacttttactcaagatattttgcaccgtgggttggtgtggctgaagacccagtgacagggtctgcacacgctgttctcagcagctactggtcccagcatctggggaagaaagaaatgcatgcttttcagtgttcccaccgaggaggagagctgggaatttcccttcgtccagacggaagggttgacattagaggaggtgcagctgttgttttagagggcacactgacagcctagaggtggttatgctgtgacgctgctgtctctaaccaccaagtattttctgcttaaaaagaaatgtaaggggctgcctttagcaaatgtgcgtagtagtctacttaatcctcatgttaaaaatcgaaaaatgggccaggcgcagtggctcatgcctgtaatcgtagcactttgagaggccaaggtgggtggatcacctgaggtcaggggttcgacaccagcctggccaacatggtgaaacctcgtctctactacaaatacaaaaattagctgggtgtggtgccacatgcctgtaattccagctacttgggaggctgaggcatggagaatcgcttgaacccaggaggcagaagttgcagtgagcagagatcacaccactgcactccagcctgggcaacagagtaagactccatccacacacacacacacacacacaaaattgaaaagtgaagacattttaatggagatttaatagtgcttccagactaatgaactaatggagttttggctccactcatgagtgtatttgaaatgtaagtaaccagctacaaagaataatgtcacttcatttgattatgactaccaatcaagagaaggaggaatacatttctgaggagtgatactaaaccatttgagcttaaatgagtacctgattttgcagccattaaaatgagtcaataactatgtggaaatatagaaaaatattttataatataatactaagaaagaggacagtaggccataaagtgttagcagtgttatgctatgtctatataaataagcatgggccattaaaaatagcaaactgaaaacagttcatgtgtggggggcaagtttagaagtaattttaatgtatctaagaagtgatttcctttattgttgtactcaggtacgaagactaaaaatcaggatgaatccagaaaattaacacaaaaaagtatgtattaggctacttcctgtcatagtgaaattaaacactcaaagtaatgtaatctcagctgggcgtggcggctcatgcctgtaatcccagcactttggcaggacaaggcaggaggatcacttgaacctaggagttcgagaccagcctgggcaacacagcgagaacttgtctctattaaaaaaaaaaaaaggaatgtaatttcaatctttttcttgatatatggcttgagaatgataatgtaaaaggaattcttctcttacttcaataaaatgggttttaacataactttaaattcagttaaatatacaatattgaatacctatagttgactttgggatggggactttttcaagtcattaagagtgtttgtttaaggtgatctcattgatggtagttctcagccgtctcaaaaactgcaagctaatcagtcagacattctttaatgaccccaattttttcactttaattgttaccatgttttctatttttactgatttttgctaaagcatgtaagagtgaatttattatagcagtaatcttgtgtttctcctgatgtgcaataaatcaataattcacca

SEQ ID NO: 58712 - DNA, 2589 bp, Homo sapiens
tacagtgagccgagatcggtgccactgcactcccgcctgggcaacagagcaagactccatctcaaaaaatgaaaaaagaagttaggggattatatatctttaaatgtagtatctttgaataattgcttgactttgtatctgggaactgttctttgcgtctggacaccaagtaaaacattaactttttgatttccttttccaagaagaagacgtaaagcaggctaccagcaattttgagaacttgcaaaaacagcttgcaaggaaaatgaagcttcctattttcatagcagatgcattcacagcaagagcatttcgtgggaatcctgctgctgtttgcctcctagaaaatgaattggatgaagacatgcatcagaaaattgcaagggagatgaacctctctgaaactgcttttatccgaaaactgcacccgacagacaactttgcacaaagttcctgctttggactgagatggtttacaccagcgagtgaggtcccactctgtggccatgccaccctggcttctgcagctgtgctgtttcacaaaataaaaaacatgaatagcacgctcacgtttgtcactctgagtggagaactaagggccagacgagcagaggacggcatcgtcctggacttgcctctttatccagcccacccccaggacttccatgaagtagaggacttgataaagactgccataggcaacacactggtccaggacatctgttattctccagatacccaaaagctcctcgtccgcctcagtgacgtttacaacaggtcgtttctggagaacctgaaagtgaacacggagaatctgctgcaagttgaaaacacagggaaggtgaaagggcttattcttacccttaaaggagagcctggtgggcagacccaagcatttgacttttactcaagatattttgcaccgtgggttggtgtggctgaagacccagtgacagggtctgcacacgctgttctcagcagctactggtcccagcatctggggaagaaagaaatgcatgcttttcagtgttcccaccgaggaggagagctgggaatttcccttcgtccagacggaagggttgacattagaggaggtgcagctgttgttttagagggcacactgacagcctagaggtggttatgctgtgacgctgctgtctctaaccaccaagtattttctgcttaaaaagaaatgtaaggggctgcctttagcaaatgtgcgtagtagtctacttaatcctcatgttaaaaatcgaaaaatgggccaggcgcagtggctcatgcctgtaatcgtagcactttgagaggccaaggtgggtggatcacctgaggtcaggggttcgacaccagcctggccaacatggtgaaacctcgtctctactacaaatacaaaaattagctgggtgtggtgccacatgcctgtaattccagctacttgggaggctgaggcatggagaatcgcttgaacccaggaggcagaagttgcagtgagcagagatcacaccactgcactccagcctgggcaacagagtaagactccatccacacacacacacacacacacataatggagttttggctccactcatgagtgtatttgaaatgtaagtaaccagctacaaagaataatgtcacttcatttgattatgactaccaatcaagagaaggaggaatacatttctgaggagtgatactaaaccatttgagcttaaatgagtacctgattttgcagccattaaaatgagtcaataactatgtggaaatatagaaaaatattttataatataatactaagaaagaggacagtaggccataaagtgttagcagtgttatgctatgtctatataaataagcatgggccattaaaaatagcaaactgaaaacagttcatgtgtggggggcaagtttagaagtaattttaatgtatctaagaagtgatttcctttattgttgtactcaggtacgaagactaaaaatcaggatgaatccagaaaattaacacaaaaaagtatgtattaggctacttcctgtcatagtgaaattaaacactcaaagtaatgtaatctcagctgggcgtggcggctcatgcctgtaatcccagcactttggcaggacaaggcaggaggatcacttgaacctaggagttcgagaccagcctgggcaacacagcgagaacttgtctctattaaaaaaaaaaaaaggaatgtaatttcaatctttttcttgatatatggcttgagaatgataatgtaaaaggaattcttctcttacttcaataaaatgggttttaacataactttaaattcagttaaatatacaatattgaatacctatagttgactttgggatggggactttttcaagtcattaagagtgtttgtttaaggtgatctcattgatggtagttctcagccgtctcaaaaactgcaagctaatcagtcagacattctttaatgaccccaattttttcactttaattgttaccatgttttctatttttactgatttttgctaaagcatgtaagagtgaatttattatagcagtaatcttgtgtttctcctgatgtgcaataaatcaataattcacca

SEQ ID NO: 58713 - DNA, 1357 bp, Homo sapiens
aatcccagcactttgggaggccgaggcgggtggatcacaaggtcaggagatcgagaccatcctggctaacatggtgaaactccatctctactaaaaatacaaaaaattagccgggcgcagtggcgggcgcctgtagtcccactacttgggaggctgaggcatggagaatcgcttgaacccaggaggcagaagttgcagtgagcagagatcacaccactgcactccagcctgggcaacagagtaagactccatccacacacacacacacacacacaaaattgaaaagtgaagacattttaatggagatttaatagtgcttccagactaatgaactaatggagttttggctccactcatgagtgtatttgaaatgtaagtaaccagctacaaagaataatgtcacttcatttgattatgactaccaatcaagagaaggaggaatacatttctgaggagtgatactaaaccatttgagcttaaatgagtacctgattttgcagccattaaaatgagtcaataactatgtggaaatatagaaaaatattttataatataatactaagaaagaggacagtaggccataaagtgttagcagtgttatgctatgtctatataaataagcatgggccattaaaaatagcaaactgaaaacagttcatgtgtggggggcaagtttagaagtaattttaatgtatctaagaagtgatttcctttattgttgtactcaggtacgaagactaaaaatcaggatgaatccagaaaattaacacaaaaaagtatgtattaggctacttcctgtcatagtgaaattaaacactcaaagtaatgtaatctcagctgggcgtggcggctcatgcctgtaatcccagcactttggcaggacaaggcaggaggatcacttgaacctaggagttcgagaccagcctgggcaacacagcgagaacttgtctctattaaaaaaaaaaaaaggaatgtaatttcaatctttttcttgatatatggcttgagaatgataatgtaaaaggaattcttctcttacttcaataaaatgggttttaacataactttaaattcagttaaatatacaatattgaatacctatagttgactttgggatggggactttttcaagtcattaagagtgtttgtttaaggtgatctcattgatggtagttctcagccgtctcaaaaactgcaagctaatcagtcagacattctttaatgaccccaattttttcactttaattgttaccatgttttctatttttactgatttttgctaaagcatgtaagagtgaatttattatagcagtaatcttgtgtttctcctgatgtgcaataaatcaataattcacca

SEQ ID NO: 58714 - DNA, 1504 bp, Homo sapiens
tacaaaggaggccgtctgcctcctttgtcctggatttgggagttgagcaccttcgtcgccattggctttcctcccccagctccagcctctctcatcttgggaatctgcgtcagaagtcactcgcagtcccgtcagcccagaagaagacgtaaagcaggctaccagcaattttgagaacttgcaaaaacagcttgcaaggaaaatgaagcttcctattttcatagcagatgcattcacagcaagagcatttcgtgggaatcctgctgctgtttgcctcctagaaaatgaattggatgaagacatgcatcagaaaattgcaagggagatgaacctctctgaaactgcttttatccgaaaactgcacccgacagacaactttgcacaaaagtaagactccatccacacacacacacacacacacaaaattgaaaagtgaagacattttaatggagatttaatagtgcttccagactaatgaactaatggagttttggctccactcatgagtgtatttgaaatgtaagtaaccagctacaaagaataatgtcacttcatttgattatgactaccaatcaagagaaggaggaatacatttctgaggagtgatactaaaccatttgagcttaaatgagtacctgattttgcagccattaaaatgagtcaataactatgtggaaatatagaaaaatattttataatataatactaagaaagaggacagtaggccataaagtgttagcagtgttatgctatgtctatataaataagcatgggccattaaaaatagcaaactgaaaacagttcatgtgtggggggcaagtttagaagtaattttaatgtatctaagaagtgatttcctttattgttgtactcaggtacgaagactaaaaatcaggatgaatccagaaaattaacacaaaaaagtatgtattaggctacttcctgtcatagtgaaattaaacactcaaagtaatgtaatctcagctgggcgtggcggctcatgcctgtaatcccagcactttggcaggacaaggcaggaggatcacttgaacctaggagttcgagaccagcctgggcaacacagcgagaacttgtctctattaaaaaaaaaaaaaggaatgtaatttcaatctttttcttgatatatggcttgagaatgataatgtaaaaggaattcttctcttacttcaataaaatgggttttaacataactttaaattcagttaaatatacaatattgaatacctatagttgactttgggatggggactttttcaagtcattaagagtgtttgtttaaggtgatctcattgatggtagttctcagccgtctcaaaaactgcaagctaatcagtcagacattctttaatgaccccaattttttcactttaattgttaccatgttttctatttttactgatttttgctaaagcatgtaagagtgaatttattatagcagtaatcttgtgtttctcctgatgtgcaataaatcaataattcacca

SEQ ID NO: 58715 - DNA, 2593 bp, Homo sapiens
tacagtgagccgagatcggtgccactgcactcccgcctgggcaacagagcaagactccatctcaaaaaatgaaaaaagaagttaggggattatatatctttaaatgtagtatctttgaataattgcttgactttgtatctgggaactgttctttgcgtctggacaccaagtaaaacattaactttttgatttccttttccaagaagaagacgtaaagcaggctaccagcaattttgagaacttgcaaaaacagcttgcaaggaaaatgaagcttcctattttcatagcagatgcattcacagcaagagcatttcgtgggaatcctgctgctgtttgcctcctagaaaatgaattggatgaagacatgcatcagaaaattgcaagggagatgaacctctctgaaactgcttttatccgaaaactgcacccgacagacaactttgcacaaagttcctgctttggactgagatggtttacaccagcgagtgaggtcccactctgtggccatgccaccctggcttctgcagctgtgctgtttcacaaaataaaaaacatgaatagcacgctcacgtttgtcactctgagtggagaactaagggccagacgagcagaggacggcatcgtcctggacttgcctctttatccagcccacccccaggacttccatgaagtagaggacttgataaagactgccataggcaacacactggtccaggacatctgttattctccagatacccaaaagctcctcgtccgcctcagtgacgtttacaacaggtcgtttctggagaacctgaaagtgaacacggagaatctgctgcaagttgaaaacacagggaaggtgaaagggcttattcttacccttaaaggagagcctggtgggcagacccaagcatttgacttttactcaagatattttgcaccgtgggttggtgtggctgaagacccagtgacagggtctgcacacgctgttctcagcagctactggtcccagcatctggggaagaaagaaatgcatgcttttcagtgttcccaccgaggaggagagctgggaatttcccttcgtccagacggaagggttgacattagaggaggtgcagctgttgttttagagggcacactgacagcctagaggtggttatgctgtgacgctgctgtctctaaccaccaagtattttctgcttaaaaagaaatgtaaggggctgcctttagcaaatgtgcgtagtagtctacttaatcctcatgttaaaaatcgaaaaatgggccaggcgcagtggctcatgcctgtaatcgtagcactttgagaggccaaggtgggtggatcacctgaggtcaggggttcgacaccagcctggccaacatggtgaaacctcgtctctactacaaatacaaaaattagctgggtgtggtgccacatgcctgtaattccagctacttgggaggctgaggcatggagaatcgcttgaacccaggaggcagaagttgcagtgagcagagatcacaccactgcactccagcctgggcaacagagtaagactccatccacacacacacacacacacacaaaattgaaaagtgaagacattttaatggagatttaatagtgcttccagactaatgaactaatggagttttggctccactcatgagtgtatttgaaatgtaagtaaccagctacaaagaataatgtcacttcatttgattatgactaccaatcaagagaaggaggaatacatttctgaggagtgatactaaaccatttgagcttaaatgagtacctgattttgcagccattaaaatgagtcaataactatgtggaaatatagaaaaatattttataatataatactaagaaagaggacagtaggccataaagtgttagcagtgttatgctatgtctatataaataagcatgggccattaaaaatagcaaactgaaaacagttcatgtgtggggggcaagtttagaagtaattttaatgtatctaagaagtgatttcctttattgttgtactcaggtacgaagactaaaaatcaggatgaatccagaaaattaacacaaaaaagtatgtattaggctacttcctgtcatactgtaatcccagcactttggcaggacaaggcaggaggatcacttgaacctaggagttcgagaccagcctgggcaacacagcgagaacttgtctctattaaaaaaaaaaaaaggaatgtaatttcaatctttttcttgatatatggcttgagaatgataatgtaaaaggaattcttctcttacttcaataaaatgggttttaacataactttaaattcagttaaatatacaatattgaatacctatagttgactttgggatggggactttttcaagtcattaagagtgtttgtttaaggtgatctcattgatggtagttctcagccgtctcaaaaactgcaagctaatcagtcagacattctttaatgaccccaattttttcactttaattgttaccatgttttctatttttactgatttttgctaaagcatgtaagagtgaatttattatagcagtaatcttgtgtttctcctgatgtgcaataaatcaataattcacca

SEQ ID NO: 58716 - DNA, 2344 bp, Homo sapiens
tacagtgagccgagatcggtgccactgcactcccgcctgggcaacagagcaagactccatctcaaaaaatgaaaaaagaagttaggggattatatatctttaaatgtagtatctttgaataattgcttgactttgtatctgggaactgttctttgcgtctggacaccaagtaaaacattaactttttgatttccttttccaagaagaagacgtaaagcaggctaccagcaattttgagaacttgcaaaaacagcttgcaaggaaaatgaagcttcctattttcatagcagatgcattcacagcaagagcatttcgtgggaatcctgctgctgtttgcctcctagaaaatgaattggatgaagacatgcatcagaaaattgcaagggagatgaacctctctgaaactgcttttatccgaaaactgcacccgacagacaactttgcacaaagttcctgctttggactgagatggtttacaccagcgagtgaggtcccactctgtggccatgccaccctggcttctgcagctgtgctgtttcacaaaataaaaaacatgaatagcacgctcacgtttgtcactctgagtggagaactaagggccagacgagcagaggacggcatcgtcctggacttgcctctttatccagcccacccccaggacttccatgaagtagaggacttgataaagactgccataggcaacacactggtccaggacatctgttattctccagatacccaaaagctcctcgtccgcctcagtgacgtttacaacaggtcgtttctggagaacctgaaagtgaacacggagaatctgctgcaagttgaaaacacagggaaggtgaaagggcttattcttacccttaaaggagagcctggtgggcagacccaagcatttgacttttactcaagatattttgcaccgtgggttggtgtggctgaagacccagtgacagggtctgcacacgctgttctcagcagctactggtcccagcatctggggaagaaagaaatgcatgcttttcagtgttcccaccgaggaggagagctgggaatttcccttcgtccagacggaagggttgacattagaggaggtgcagctgttgttttagagggcacactgacagcctagaggtggttatgctgtgacgctgctgtctctaaccaccaagtattttctgcttaaaaagaaatgtaaggggctgcctttagcaaatgtgcgtagtagtctacttaatcctcatgttaaaaatcgaaaaatgggccaggcgcagtggctcatgcctgtaatcgtagcactttgagaggccaaggtgggtggatcacctgaggtcaggggttcgacaccagcctggccaacatggtgaaacctcgtctctactacaaatacaaaaattagctgggtgtggtgccacatgcctgtaattccagctacttgggaggctgaggcatggagaatcgcttgaacccaggaggcagaagttgcagtgagcagagatcacaccactgcactccagcctgggcaacagagtaagactccatccacacacacacacacacacacaaaattgaaaagtgaagacattttaatggagatttaatagtgcttccagactaatgaactaatggagttttggctccactcatgagtgtatttgaaatgtaagtaaccagctacaaagaataatgtcacttcatttgattatgactaccaatcaagagaaggaggaatacatttctgaggagtgatactaaaccatttgagcttaaatgagtacctgattttgcagccattaaaatgagtcaataactatgtggaaatatagaaaaatattttataatataatactaagaaagaggacagtaggccataaagtgttagcagtgttatgctatgtctatataaataacctgggcaacacagcgagaacttgtctctattaaaaaaaaaaaaaggaatgtaatttcaatctttttcttgatatatggcttgagaatgataatgtaaaaggaattcttctcttacttcaataaaatgggttttaacataactttaaattcagttaaatatacaatattgaatacctatagttgactttgggatggggactttttcaagtcattaagagtgtttgtttaaggtgatctcattgatggtagttctcagccgtctcaaaaactgcaagctaatcagtcagacattctttaatgaccccaattttttcactttaattgttaccatgttttctatttttactgatttttgctaaagcatgtaagagtgaatttattatagcagtaatcttgtgtttctcctgatgtgcaataaatcaataattcacca

SEQ ID NO: 58717 - DNA, 1585 bp, Homo sapiens
tacagtgagccgagatcggtgccactgcactcccgcctgggcaacagagcaagactccatctcaaaaaatgaaaaaagaagttaggggattatatatctttaaatgtagtatctttgaataattgcttgactttgtatctgggaactgttctttgcgtctggacaccaagtaaaacattaactttttgatttccttttccaagaagaagacgtaaagcaggctaccagcaattttgagaacttgcaaaaacagcttgcaaggaaaatgaagcttcctattttcatagcagatgcattcacagcaagagcatttcgtgggaatcctgctgctgtttgcctcctagaaaatgaattggatgaagacatgcatcagaaaattgcaagggagatgaacctctctgaaactgcttttatccgaaaactgcacccgacagacaactttgcacaaagttcctgctttggactgagatggtttacaccagcgagtgaggtcccactctgtggccatgccaccctggcttctgcagctgtgctgtttcacaaaataaaaaacatgaatagcacgctcacgtttgtcactctgagtggagaactaagggccagacgagcagaggacggcatcgtcctggacttgcctctttatccagcccacccccaggacttccatgaagtagaggacttgataaagactgccataggcaacacactggtccaggacatctgttattctccagatacccaaaagctcctcgtccgcctcagtgacgtttacaacaggtcgtttctggagaacctgaaagtgaacacggagaatctgctgcaagttgaaaacacagggaaggtgaaagggcttattcttacccttaaaggagagcctggtgggcagacccaagcatttgacttttactcaagatattttgcaccgtgggttggtgtggctgaagacccagtgacaggtacgaagactaaaaatcaggatgaatccagaaaattaacacaaaaaagtatgtattaggctacttcctgtcatagtgaaattaaacactcaaagtaatgtaatctcagctgggcgtggcggctcatgcctgtaatcccagcactttggcaggacaaggcaggaggatcacttgaacctaggagttcgagaccagcctgggcaacacagcgagaacttgtctctattaaaaaaaaaaaaaggaatgtaatttcaatctttttcttgatatatggcttgagaatgataatgtaaaaggaattcttctcttacttcaataaaatgggttttaacataactttaaattcagttaaatatacaatattgaatacctatagttgactttgggatggggactttttcaagtcattaagagtgtttgtttaaggtgatctcattgatggtagttctcagccgtctcaaaaactgcaagctaatcagtcagacattctttaatgaccccaattttttcactttaattgttaccatgttttctatttttactgatttttgctaaagcatgtaagagtgaatttattatagcagtaatcttgtgtttctcctgatgtgcaataaatcaataattcacca

SEQ ID NO: 58718 - DNA, 1291 bp, Homo sapiens
tacagtgagccgagatcggtgccactgcactcccgcctgggcaacagagcaagactccatctcaaaaaatgaaaaaagaagttaggggattatatatctttaaatgtagtatctttgaataattgcttgactttgtatctgggaactgttctttgcgtctggacaccaagtaaaacattaactttttgatttccttttccaagaagaagacgtaaagcaggctaccagcaattttgagaacttgcaaaaacagcttgcaaggaaaatgaagcttcctattttcatagcagatgcattcacagcaagagcatttcgtgggaatcctgctgctgtttgcctcctagaaaatgaattggatgaagacatgcatcagaaaattgcaagggagatgaacctctctgaaactgcttttatccgaaaactgcacccgacagacaactttgcacaaagttcctgctttggactgagatggtttacaccagcgagtgaggtcccactctgtggccatgccaccctggcttctgcagctgtgctgtttcacaaaataaaaaacatgaatagcacgctcacgtttgtcactctgagtggagaactaagggccagacgagcagaggacggcatcgtcctggacttgcctctttatccagcccacccccaggacttccatgaagtagaggacttgataaagactgccataggcaacacactggtccaggacatctgttattctccagatacccaaaagctcctcgtccgcctcagtgacgtttacaacaggtcgtttctggagaacctgaaagtgaacacggagaatctgctgcaagttgaaaacacagggaaggtgaaagggcttattcttacccttaaaggagagcctggtgggcagacccaagcatttgacttttactcaagatattttgcaccgtgggttggtgtggctgaagacccagtgacagggtctgcacacgctgttctcagcagctactggtcccagcatctggggaagaaagaaatgcatggtaggacagctctttaccaatttcttttttatttgcctaattcgaagctagtgttccttctcatatgtactatccccttgaaaatgtaatacaatgtcatgtatcacccatgtgaaaatgaaaggttttaaaattccttcacccttaaagatcctccaccccaaacagccttcacctctgcctcccccaacatacagagactgtacagacacagatacagtaactgcccaataagtgtttgttgaataaaatagctgtataactttggccca

SEQ ID NO: 58719 - DNA, 1502 bp, Homo sapiens
tacagtgagccgagatcggtgccactgcactcccgcctgggcaacagagcaagactccatctcaaaaaatgaaaaaagaagttaggggattatatatctttaaatgtagtatctttgaataattgcttgactttgtatctgggaactgttctttgcgtctggacaccaagtaaaacattaactttttgatttccttttccaagaagaagacgtaaagcaggctaccagcaattttgagaacttgcaaaaacagcttgcaaggaaaatgaagcttcctattttcatagcagatgcattcacagcaagagcatttcgtgggaatcctgctgctgtttgcctcctagaaaatgaattggatgaagacatgcatcagaaaattgcaagggagatgaacctctctgaaactgcttttatccgaaaactgcacccgacagacaactttgcacaaagttcctgctttggactgagatggtttacaccagcgagtgaggtcccactctgtggccatgccaccctggcttctgcagctgtgctgtttcacaaaataaaaaacatgaatagcacgctcacgtttgtcactctgagtggagaactaagggccagacgagcagaggacggcatcgtcctggacttgcctctttatccagcccacccccaggacttccatgaagtagaggacttgataaagactgccataggcaacacactggtccaggacatctgttattctccagatacccaaaagctcctcgtccgcctcagtgacgtttacaacaggtcgtttctggagaacctgaaagtgaacacggagaatctgctgcaagttgaaaacacagggaaggtgaaagggcttattcttacccttaaaggagagcctggtgggcagacccaagcatttgacttttactcaagatattttgcaccgtgggttggtgtggctgaagacccagtgacaggtactttttacttgagcccaggggagggttaaacaatggaagaggaggatcacaaatagttatttaagtgcacttcctgtgacctttcaggtggcttgagttttgagctgccttgttcctctatctttccccatccctgccatcccttcactgaagtcttccatgaaaaacataaaatagagcaggtggataacagggttaaacctgagtgtcagacagcctgggtttacattcctagcttcctagcttttgaccttgggcaagtgacttgacttttaaaagtctcagttccctcctctataaattgtatataatacctcatagggctataaaagcacaatgcatgttaagggcttaatacagtgcctggcacctagtaagtgcccaataactactagctattatattgtattattatatctttttgagacatagtctcacttcatcacccaggcagaggttgtagtgagccgagattgtgccactgcactccagcctgggcgacagagcgagactccgtctcaaaaaaaaaaaaaaaaaaaagaa

SEQ ID NO: 58720 - DNA, 807 bp, Homo sapiens
tacaaaggaggccgtctgcctcctttgtcctggatttgggagttgagcaccttcgtcgccattggctttcctcccccagctccagcctctctcatcttgggaatctgcgtcagaagtcactcgcagtcccgtcagcccagaagaagacgtaaagcaggctaccagcaattttgagaacttgcaaaaacagcttgcaaggaaaatgaagcttcctattttcatagcagatgcattcacagcaagagcatttcgtgggaatcctgctgctgtttgcctcctagaaaatgaattggatgaagacatgcatcagaaaattgcaagggagatgaacctctctgaaactgcttttatccgaaaactgcacccgacagacaactttgcacaaagttcctgctttggactgagatggtttacaccagcgagtgaggtcccactctgtggccatgccaccctggcttctgcagctgtgctgtttcacaaaataagtaatgtgattttctttaatgaatctaacacttagcaaatggcttttttttttttaagttctcacacacactttttctgatggtccaaagtgactggtataaagactctgcagagtttacttcatgctattcataatgcagaaacaaaaccagcgaccttcaatagcactttggcctttctgagtatgtgcccagcatcattggaaagctgcgatcagaatgctattttattttatttttattttattttactttctggtctacaaagaatttgacaaccattttattttattttattattttttgagacagagtctcactg

SEQ ID NO: 58721 - DNA, 430 bp, Homo sapiens
gtcccagctactcaggaggctgacgcaagagaatggcgtgaacctgggaggcggagcttgcagtgtgccgagatagcaccactgtagtccagcctgggcgaaaagagcgagactccgtcaaaaaaaaaaaaaaaaaaagaaaaggaaagaaaagaaaatggtgttaagaaaataacattaagtggaactggatcaccctaaaagtcttcatctctgtcaccctcactcgaagcaggttgaaaaggaaggttgaggttggtcttgctgtatattaggatggcagaggcagaagaaaatccatgcaaaagtggacctgcagagttcttacctgtgtgtttaaaggtcaactgtacatttacaagttaaacagtactctgaatcccactgttaatgaagtaatttttcagggctctatctgctcgattatatc

SEQ ID NO: 58722 - DNA, 1784 bp, Homo sapiens
  misc_feature (78)..(78): n is a, c, g, or t
gcgcggcgcgccagcaacactgcacgcaggtggcaccggcggctcatgaaggagctgcaggacatcgcgcgccttagnaccgcttcatctccgtggagctggtggacgagagcctgttcgactggaacgtgaagctgcaccaggtggacaaggactcggtgctgtggcaggacatgaaggagaccaacaccgagttcatcctgctcaacctcaccttccccgacaacttccccttctcgccgcccttcatgcgggtgctcagcccgcgcctggagaacggctacgtgctggacggcggcgcatctgcatggagctgctcacgccgcgcggctggtccagcgcctacaccgtggaggccgtcatgcgccagttcgcagccagcctggtcaagggccagggacggatctgtagaaaagctggcaaatcaaaaaagtccttcagtcgcaaggaagctgaagctacctttaagagtttggtgaagacgcatgaaaaatatggttgggtcaccccgcccgtgttccgacggctgatgtctgccacgtgcagtagacgctcgagcgcctgtccacacacacaccagtaccctgacatctcctcaatgctgtgcatcctccacccgtttttactccagccagaactgcatcctgaatgcccaggagacgtttaagttatttatgaaaagatgtgtgtacagagaggaagagggagcaaatgccgttcggattatgtttcgattataaatgaatgatcacctcgaagtcactttagaacacatgttgagatggtgacatttcccagcctgcctgcccctctgcccaccccggtcacattgccctgagcttctttccatgacagcagctccgacgagccggcaggaaactcaatgcccctgctggctccatttccatgtaaatggcgccgttcatatttcacagggacgccgtgcatctccgccgtgcgtccccggcacgtgtttgctgtgctctgtatctctgtttttcttcctggaaggtcaacataacttgaaaatgtgtctttctgtggcccatggtccgctgtgatgacatttagacctcatttgtgctatgacctttggctcatgaaaacacaaatttaacattgccaggttctagtgatttaaaaccacaactgcccacttggtgaaaacgtgctctcgatgctgatttgtggtgtgctgctgtccacagataaaccagtgccattagatggaaggcagaggatactgcgaccacccctgacagacggtggcgtagacaccaggtgcgccctctggggctcagagcaacggatggtcagctgcgaacagtctcgtccgatgttaggaaatggtcctacggccgcgcctttgtgttcctgtcttctctccaccaccaaaagcaaaagatgatttcccattcactgcagtcatctgactcattttaatatctgtgctagtgacaatgaatgtcagaactgccaaaggataccaagtgatcatacgatgatttgcatgatcgggtctatttcacccaatagtcacttgtgtgtcccccgaaattgggatgggtgagcacccttgctgtggtgtaaacttcctgttatttaatctcccccacggtttcatttttctcttctgttaatacttagaactttctaagaaactccatgaaatgaggaaatactgtttctaataatatgaggaaagaagtaaaaatgttcattccaagtggcaagtcttattggacacattttaaataaaatcatgcatacctgaaaaaaaaaat

SEQ ID NO: 58723 - DNA, 296 bp, Homo sapiens
ttatttatctctaatcacaggaaatgaggacatttctcatctacaaattgcacatcccatcaggaaattgggccaaagatctctaagccttcagaagcggtcatccagtaacccacttggcaaagtttcaaaggtctgggaaagtagatgcgaggtcaagcagtgcgggaggggagccaactctgcaaacgctggccacggccagctggccaccagcagcttacccgaggaggggttgtccaagctacatactaaccccggttccctctccccaaacattgtcctctgccatctgt

SEQ ID NO: 58724 - DNA, 458 bp, Homo sapiens
gtgagtgctcagttgcgcagctgggtgtgggactgtgtgacggcaagaagcatccaagggtggacgtggccagggatgggaggagccatcggagaggtggtaaggacagcgaccgagttccccgagagaggcgagtcttagtaattcgggaattcagcccccacgactgtggtgagtgaggaggaagaatgcggaattgagagatggaaaatgaggcaggcactggccccagccctggaaagccgtcccttctcctgttctgaaagccgacttctcccacctggacgtgcaccccatctccccgggaggccccggagcctggctgcagtccgtctgtctgcctggctcgccgccatggctttgctcacccctctcatctttgccatgttatctctacacttaggatttgtggtttgtcttgtacactaataaacggcaactctattaggacatgaaca

SEQ ID NO: 58725 - DNA, 460 bp, Homo sapiens
ggggagggtggcgagcccagcgaggacgtggattccccacggcccttcccacataccccgttctttcatttggctgtttctgagttgtgtgctttataatcaactgacaatggtcctatgtcccttcctcttaaatttgggcagaatttgtgacttctttgtccaacaaaatatcgcagaagtgatgctgtaccagactgaaaaagagtggcagtttctagctgtggtatcttggatccaaagaatcaatgaccccatacaacagacccagtagagttcccaggaaacagccagcaccagccatgttggtaagatatcttgaaaatagatacttcagcccacttgagccaccacagctcacaccacctggagcacagtcaagccttttctgctgagccctgcccaaactgcagatttgtgaaccaaataaataattgcaattgttttaagccaaaaactt

SEQ ID NO: 58726 - DNA, 669 bp, Homo sapiens
ggggagggtggcgagcccagcgaggacgtggattccccacggcccttcccacataccccgttctttcatttggctgtttctgagttgtgtgctttataatcaactgacaatgcttggagcagaagagaggatggctgtggcaggcttggtgcatggtgttaaagctggctgtggagcatcctttttcagtctgcagtgtagggcatgagaaaacgcagctgacaacatgaagccatcacagtgtactcaggctccaggactgataacagcgtgtctagatggagtgagaaaaaaccaaccaataaaggcaggggcttatgggtcctatgtcccttcctcttaaatttgggcagaatttgtgacttctttgtccaacaaaatatcgcagaagtgatgctgtaccagactgaaaaagagtggcagtttctagctgtggtatcttggatccaaagaatcaatgaccccatacaacagacccagtagagttcccaggaaacagccagcaccagccatgttggtaagatatcttgaaaatagatacttcagcccacttgagccaccacagctcacaccacctggagcacagtcaagccttttctgctgagccctgcccaaactgcagatttgtgaaccaaataaataattgcaattgttttaagccaaaaactt

SEQ ID NO: 58727 - DNA, 751 bp, Homo sapiens
acggtgatgacagcatcacctgtgggttcagaatcagagacctccagcttctgtccccattttggggtaattggatggctgtattcatagagcagccggcccctgtttgctagctgaatgtcgtaacctgaatggctgtgatactggacatgcaaaaatcacatgtggctatgaccttcctgcaaaatgtgagtacaactgaatactggtggagtgcaatgtcatcatctcggctcactgcaacctctgcctcctgggttcaagcaattctcctgcctcagcctccctagtagctaggattataggtgcctgccaccacaccctgctaatttttgtatttttagtagagacgggatttcaccatgttggccaagctggtcttgagctcctgaccttacgtgatctgcccgccttggtctcccaaagtgctgagattacaggtgtgagcaagcacgcccagcccatgattctactttctgttgtatgagtctgattactttagataccatttatgaggggaattatacaatagttaccttatgtgactggcttatttctcttagcataatgtcttcaaggtttagccatattatagagtgtgataggaattcttcttttattaaggcgtgaataatatatctctatgtatgtatataccacatatttgtttatccatgtaatcttttgatgaaccattgggttactttcaacccttggtctgtgaatatggctgtaagtgaacatggatgtg

SEQ ID NO: 58728 - DNA, 495 bp, Homo sapiens
aagaacgtttattgaagatgaccttagaagagagacgcaaagaatacctaagagactatattcccctgaacagcattctatcatggaaggaggagatgaagggcaagggccaaaatgatgaagaaaatactcaggaaacatcccaggtgaagaaaagtttgactgaaaaagtttctctctatagaggtgacatcacattgctagaggtagatgctatagtcaatgccgcaaatgccagtcttcttggaggaggaggtgtggatggctgtattcatagagcagccggcccctgtttgctagctgaatgtcgtaacctgaatggctgtgatactggacatgcaaaaatcacatgtggctatgaccttcctgcaaaatgtgagtacaactgaatactgtttcaaaaccagatgagacatcttaacttgttttactccagtgtataactggaaaaggaaatggcagtggtggtatttaattaaatgtgcttgagttcag

SEQ ID NO: 58729 - DNA, 723 bp, Homo sapiens
aagaacgtttattgaagatgaccttagaagagagacgcaaagaatacctaagagactatattcccctgaacagcattctatcatggaaggaggagatgaagggcaagggccaaaatgatgaagaaaatactcaggaaacatcccaggtgaagaaaagtttgactgaaaaagtttctctctatagaggtgacatcacattgctagaggtagatgctatagtcaatgccgcaaatgccagtcttcttggaggaggaggtgtggatggctgtattcatagagcagccggcccctgtttgctagctgaatgtcgtaacctgaatggctgtgatactggacatgcaaaaatcacatgtggctatgaccttcctgcaaaatgtcctatgtcccttcctcttaaatttgggcagaatttgtgacttctttgtccaacaaaatatcgcagaagtgatgctgtaccagactgaaaaagagtggcagtttctagctgtggtatcttggatccaaagaatcaatgaccccatacaacagacccagtagagttcccaggaaacagccagcaccagccatgttggtaagatatcttgaaaatagatacttcagcccacttgagccaccacagctcacaccacctggagcacagtcaagccttttctgctgagccctgcccaaactgcagatttgtgaaccaaataaataattgcaattgttttaagccaaaaactt

SEQ ID NO: 58730 - DNA, 1003 bp, Homo sapiens
aagaacgtttattgaagatgaccttagaagagagacgcaaagaatacctaagagactatattcccctgaacagcattctatcatggaaggaggagatgaagggcaagggccaaaatgatgaagaaaatactcaggaaacatcccaggtgaagaaaagtttgactgaaaaagtttctctctatagaggtgacatcacattgctagaggtagatgctatagtcaatgccgcaaatgccagtcttcttggaggaggaggtgtggatggctgtattcatagagcagccggcccctgtttgctagctgaatgtcgtaacctgaatggctgtgatactggacatgcaaaaatcacatgtggctatgaccttcctgcaaaatcaaatttggatgcaagaaagctattgaaactgaatcttctcctacacctgaagagatctattacttcaatcactccaccgaaaaatctaccaaagattaaacacgctgttgtcagtcctggagcctgagtacactgagatggcttcatgttgtcagctgcgttttctcatgccctacactgcagactgaaaaaggatgctccacagccagctttaacaccatgcaccaagcctgccacaaccatcctctattctgctccaagctgctgagagacaggaaatggaggttctgagttttgaggcttgcaaggtttgtctgcactgcattcagcttgccagaccccaagaaagctggcatgctgcttcatatccaaaaagaaaaggagagtgccaatcagaattatacaccttttgaaaacttcaattaagttcaaagccttcctttgcctgaagaaattttaccagtttacatgactgaccaaacagaaagagctacgaattgccctttgtggaacctcctgggcgtaggacacgcacaccaattaaataaaattattttaaaccaacattcctatttgtgaaaacgttttgacactcaactacccgcattgtgagaacacttaactcaa

SEQ ID NO: 58731 - DNA, 763 bp, Homo sapiens
cagcctcctctggatcttttctggttccttcgctcctagaactgtgtctgatggcttatgaaggcaaatgacaaatgtttgccatatgcacatgtatgtgcatgaatgaatacatccaggttctgacttcctcggggcaacctctactttctcaatgcccctcttaagatgggggtgggggagggtcctcctagaactgaacatgatattccaggtgtgatctaatacatttaaatgtccaaaagctctttcttccctaaacgttcctttttaaaagctactgttctcaattaatgggtgtctcatcttcttaagtatattaataagaggtattttgatgtttccctccattctgtggattacctcttgattctctggattctttgtgattccgttttgttttaaggatgttctcaggtgtctggtgatccttgcttataagtccaaattaatgatgaggcactaaaatgctgattggaagctctctgtgcaggccttcctcacacccatgtcttcagatacccaaggcctttaatacccaagtccttccaggattctgcacatctcattagcttcatattccctctatttgaaaagttcatatggacccagctctgtcatcatcacatgttctatatccccaaaccttgtgacatctgcaaagaagtacagaagacctcaagagaagataagctagaatttatttatttttataccttttattcagtttttattaaagctttcctacctttccagattgaca

SEQ ID NO: 58732 - DNA, 499 bp, Homo sapiens
  misc_feature (20)..(20): n is a, c, g, or t
  misc_feature (383)..(383): n is a, c, g, or t
  misc_feature (412)..(412): n is a, c, g, or t
  misc_feature (423)..(423): n is a, c, g, or t
  misc_feature (446)..(446): n is a, c, g, or t
  misc_feature (475)..(475): n is a, c, g, or t
  misc_feature (490)..(490): n is a, c, g, or t
atggcggcgcctggtggcangccggctgtgcagttgtcggagatggcggggcttcagcacctcggccgtcctgggccgccggacacccccgctggcccgatgccaacagtgacatcgacttgagcaacctggagcggctggagaagtaccggagcttcgaccgctaccggcgccgagcagagcaggaggccaggccccgcactggtggcggacctaccgagagtatttcggggagaagacagatcccaaagagaagattgatattgggctgcctccacccaaagtctcccggacccaacagctactggaacggaaacaggccatccaggagcttcgggccaatgtggaagaggagcgggctgcccgcttccgcacagccagtnttcccgttggatgccgtgcgggccgagtnggagaggactnttggcccttaccacaagcagctnttgctgagtatttacggctttaacgagantttttccacggttgncaatttttt

SEQ ID NO: 58733 - DNA, 201 bp, Homo sapiens
cgcccagctaatttttgtatttttagtagagacggggtttcatcattttagtcaggctggtctcagactgctgacctcatgatccacacgccttggcctcccaaagtactgggattacaggcatgaaccaccacgcccatctgatttcccgttttctgcagggtaaagcctcagggccggcccattgctttcaggactttt

SEQ ID NO: 58734 - DNA, 1473 bp, Homo sapiens
gtcagcagtagcgccaggcccagtggctcaggccaggaggtcggaggtcaaactgcagtcaagaaccaagccaaggttgaatgccacactgaggcccagagtcaagtcaagatcagaaatcacacagaggccagaggtcacacagcctcaactgccccttccaccaggaggcaggagacatcaagagagtatttgtgccctcctcgggttttaccttccagccgagattctccctcctccccaacatttatctccatccagtcggccacaaggaagcctctagagactcccagctttaagggcaaccctgatgtctcagtgaaaagcacacaactggctcaggacataggccaggccctgctccaccagaaaggtgtccaagacaaaactgggaagaaggacatcacccagtgctctgtgcaacctgaacctgcccctccctcagccagtcccctgcccagagggtggcaaaagagtgttctggagctacagacggggccagggagctcacaacactatggagccatgagaaccgtgactgaacagtatgaggaggtggaccagtttgggaacacagtcctcatgtcttccaccacagtcaccgagcaggcagagccacccaggaacccaggctcccacctcgggctccacgcctcccccttgctgaggcagttcctgcacagcccagctgggttcagcagtgacctgacagaagctgagacggtgcaggtgtcctgcagctactcccagccagctgcccagtgaggcccaccgcctcccaccacacctgccacctgttcctggcctccactgccccaggactgaagtgggtacctgcctcctgtacactggagcaaggaccaagaggaaatggcatcttcagaggattactgtgggccatttccctttcgcagttctttcaataggcccagttcttccaaatggaaaaagaaaggtctggaagaggcccacagagttgcacaggcgtgggggtaggatgggggctcccagctgcttgtggaggatgtaatatatacagacacacacatgtttttcacacaggcctggcccacgcatcgacatgtgtgaatttgcacaccactgcctgaattggagccccccagagtgtccctctacccagagtttttatttctttaattagtctgagtgttcccagccatctgctccttaatccctggagaggaacagagccaactggacacagcgttggtctctgtttggaatcactgtgaggtctccagaaggacctggccgccagccccttcatcaccatctccatcattcagctggtcatctggtggcccaaaggtcacccaaagagtcagcaatcagcatgtccctagaagccaaatgcactgcctttctctgtccccatgactgtcccccactctgcaccccaaatgggaagcatacggtctgaataaatccaagttttattctctactctgtgca

SEQ ID NO: 58735 - DNA, 1465 bp, Homo sapiens
gtcagcagtagcgccaggcccagtggctcaggccaggaggtcggaggtcaaactgcagtcaagaaccaagccaaggttgaatgccacactgaggcccagagtcaagtcaagatcagaaatcacacagaggccagaggtcacacagcctcaactgccccttccaccaggaggcaggagacatcaagagagtatttgtgccctcctcgggttttaccttccagccgagattctccctcctccccaacatttatctccatccagtcggccacaaggaagcctctagagactcccagctttaagggcaaccctgatgtctcagtgaaaagcacacaactggctcaggacataggccaggccctgctccaccagaaaggtgtccaagacaaaactgggaagaaggacatcacccagtgctctgtgcaacctgaacctgcccctccctcagccagtcccctgcccagagggtggcaaaagagtgttctggagctacagacggggccagggagctcacaacactatggagccatgagaaccgtgactgaacagtatgaggaggtggaccagtttgggaacacagtcctcatgtcttccaccacagtcaccgagcaggcagagccacccaggaacccaggctcccacctcgggctccacgcctcccccttgctgaggcagttcctgcacagcccagctgggttcagcagtgacctgacagaagctgagacggtgcaggtgtcctgcagctactcccagccagctgcccagtgaggcccaccgcctcccaccacacctgccacctgttcctggcctccactgccccaggactgaagtgggtacctgcctcctgtacactggagcaaggaccaagaggaaatggcatcttcagaggattactgtgggccatttccctttcgcagttctttcaataggcccagttcttccaaatggaaaaagaaaggtctggaagaggcccacagagttgcacaggcgtgggggtaggatgggggctcccagctgcttgtggaggatgtaatatatacagacacacacatgtttttcacacaggcctggcccacgcatcgacatgtgtgaatttgcacaccactgcctgaattggagccccccagagtgtccctctacccagagtttttatttctttaattagtctgagtgttcccagccatctgctccttaatccctggagaggaacagagccaactggacacagcgttggtctctgtttggaatcactgtgaggtctccagaaggacctggccgccagccccttcatcaccatctccatcattcagctggtcatctggtggcccaaaggtcacccaaagagtcagcaatcagcatgtccctagaagccaaatgcactgcctttctctgtccccatgactgtcccccactctgcaccccaaatgggaagcatacggaaagaccaagtaccgggaccgagctcgat

SEQ ID NO: 58736 - DNA, 302 bp, Homo sapiens
aaagagaaagattgttcttcaagggcctctaaggacaaaagtgaatccattaacactctaggaagcagtgtgactactggaagaaagacattcaagaggtaaaatggattttagaaggtcacaggagccaattgtcagtgtttgtactcttcatcaaaattatttttaatgagctccctgacaactgcgcatcctgacagcacgggtgaagtggctcatctggggtcatgcccgtgcctgacactgccctaattagctgacactgctctgctttgctgaagcacagggaggtctctcgagaa

SEQ ID NO: 58737 - DNA, 151 bp, Homo sapiens
taacagagtatttgtccctagtcctgtatttcccttaattcctccctccagtcccctagctcccaactgtatttaactgcgctggggctgcgtagggttgctctgtcctggggggtggccagggactcatccagtgcttgtaaataaataa

SEQ ID NO: 58738 - DNA, 354 bp, Homo sapiens
tggatgagcttatattgggtctagcaaataaacaggctacaactgttaactgtcatagtaattagttaaatgctctggtcctttctgcagccaggaatttagatagcacttactaaatgggaggggaaaggaaattcctaaatttattttcatatcaaagttttaacttcttacagcctaacagaatgatgttctttaaaatatatatgttttaaagaaactacattatattctgagaaaaatttccttttaaggtgtgcagtacaggtttggcaacagattttggtgaagaatagaactggaataattaaaagtatgacttatttcaactgtgcacagagacccagaggataa

SEQ ID NO: 58739 - DNA, 163 bp, Homo sapiens
aggaccccagaacatgtcactctgtgtcctcaggtctctggatcccacccaatgtggctgaaatactgccttgccaatccccttctcagacttgccctcttctcttcctgcagccacctctctggacacacacacacacacacacacacacaggtgcacacac

SEQ ID NO: 58740 - DNA, 249 bp, Homo sapiens
gttcctgttgtctaaccccaccatcctcccaatctagacatgaaggccacataatccatgaagccctccaggactaccacatccagagaactctgcttgaatccctgtggcacttgctgcctgtgccatcttctcagcccttggtatcaactcctgctggagactaatcattagcttttagtggatatgtgtggaaagtccatctccccatcaaactgaggacagctcagggtagagatggtgccttta

SEQ ID NO: 58741 - DNA, 2198 bp, Homo sapiens
gagacatgtactgctaaagcaaggactttgatccttttttccctttgcatttttaccatggttggaattgtaacacagacacaaccttatgtcctgcttccaaaacataaataatggttgtaaagcgtcccacacgttgacccaaagtctcctttgaaacaggaaattgagacacgccggttgtgaaacctactgaagtgagcggcggcgccagggattcctgggaccccgacctctttgcagctcgcacagctaagggcgagggcgcccttcggcagaagcagcaaaccgccggcaagcccagcgaggagggctgccggggtctgggcttgggaattggctggcacccagcggaaagggacgtgagctgagcggcgggggagaagagtgcgcaggtcagagggcggcgcgcagcggcgctccgcgaggtccccacgccgggcgatatggggtgcctgctgtttctgctgctctgggcgctcctccaggcttggggaagcgctgaagtcccgcaaaggcttttccccctccgctgcctccagatctcgtccttcgccaatagcagctggacgcgcaccgacggcttggcgtggctgggggagctgcagacgcacagctggagcaacgactcggacaccgtccgctctctgaagccttggtcccagggcacgttcagcgaccagcagtgggagacgctgcagcatatatttcgggtttatcgaagcagcttcaccagggacgtgaaggaattcgccaaaatgctacgcttatcctatcccttggagctccaggtgtccgctggctgtgaggtgcaccctgggaacgcctcaaataacttcttccatgtagcatttcaaggaaaagatatcctgagtttccaaggaacttcttgggagccaacccaagaggccccactttgggtaaacttggccattcaagtgctcaaccaggacaagtggacgagggaaacagtgcagtggctccttaatggcacctgcccccaatttgtcagtggcctccttgagtcagggaagtcggaactgaagaagcaagtgaagcccaaggcctggctgtcccgtggccccagtcctggccctggccgtctgctgctggtgtgccatgtctcaggattctacccaaagcctgtatgggtgaagtggatgcggggtgagcaggagcagcagggcactcagccaggggacatcctgcccaatgctgacgagacatggtatctccgagcaaccctggatgtggtggctggggaggcagctggcctgtcctgtcgggtgaagcacagcagtctagagggccaggacatcgtcctctactggggggagctacacctccatgggcttgattgccttggcagtcctggcgtgcttgctgttcctcctcattgtgggctttacctcccggtttaagaggcaaacttcctatcagggcgtcctgtgactcgccttgccacatctgtgtctctggaacccaggacctctggacctcaggttcccaagacttcagtcctggtctgctcaggaattgaagatgtaaggaattgaagataggagagataccttgaaaaagtagagaacagtcatgaggcagctttcatcacacccttttaacatttatctaaaagaatttaaattctttttcaaaaattacactacaagtttataagcccaaatggctctgtgaaatcagaagtgcaaaggtgtgcaaacttgtatctgaagacctaccagggacaagcaggtaagagctgatgtgagtgtgtgtgatgggatctgtaaggaactggaacacacatgtcctatccaaaggaatcagctgcagctgcttgttgtcaagtataaagtcaggacctggcttggctttaaccgtttttcaagaaaactggaaatctggattttcagcgaacatgcctgattttaaaaggttgactcaagtttttacaaaatactatgtgggacacctcaaatacatacctactgactgatgacaaacccaggagtttgtgtgtcttttataaaaagtttgccctggatgtcatattggcagttggaggacacagtttctattgtaaatttggatttacgactgaagaaggacattttctctttaaaagaaagttaggttataagaaacagaggcgtctcacatttttacttggtgtaattaataaacgaagataaatcata

SEQ ID NO: 58742 - DNA, 2252 bp, Homo sapiens
gttttctacccaagaatgctacttcaggagatcagtcaaaaggttagggtgatggtgacggtggaaatatagaaaaaggaatttattcaagaggtattcaaaaagaagtgaaatagagatgagttggagatagattggataaaaagagtgagggagagggaggtgtcaggctgcagcccaggttctgagttgccaaagaggagtcttttcctccaggaaattgagacacgccggttgtgaaacctactgaagtgagcggcggcgccagggattcctgggaccccgacctctttgcagctcgcacagctaagggcgagggcgcccttcggcagaagcagcaaaccgccggcaagcccagcgaggagggctgccggggtctgggcttgggaattggctggcacccagcggaaagggacgtgagctgagcggcgggggagaagagtgcgcaggtcagagggcggcgcgcagcggcgctccgcgaggtccccacgccgggcgatatggggtgcctgctgtttctgctgctctgggcgctcctccaggcttggggaagcgctgaagtcccgcaaaggcttttccccctccgctgcctccagatctcgtccttcgccaatagcagctggacgcgcaccgacggcttggcgtggctgggggagctgcagacgcacagctggagcaacgactcggacaccgtccgctctctgaagccttggtcccagggcacgttcagcgaccagcagtgggagacgctgcagcatatatttcgggtttatcgaagcagcttcaccagggacgtgaaggaattcgccaaaatgctacgcttatcctatcccttggagctccaggtgtccgctggctgtgaggtgcaccctgggaacgcctcaaataacttcttccatgtagcatttcaaggaaaagatatcctgagtttccaaggaacttcttgggagccaacccaagaggccccactttgggtaaacttggccattcaagtgctcaaccaggacaagtggacgagggaaacagtgcagtggctccttaatggcacctgcccccaatttgtcagtggcctccttgagtcagggaagtcggaactgaagaagcaagtgaagcccaaggcctggctgtcccgtggccccagtcctggccctggccgtctgctgctggtgtgccatgtctcaggattctacccaaagcctgtatgggtgaagtggatgcggggtgagcaggagcagcagggcactcagccaggggacatcctgcccaatgctgacgagacatggtatctccgagcaaccctggatgtggtggctggggaggcagctggcctgtcctgtcgggtgaagcacagcagtctagagggccaggacatcgtcctctactggggggagctacacctccatgggcttgattgccttggcagtcctggcgtgcttgctgttcctcctcattgtgggctttacctcccggtttaagaggcaaacttcctatcagggcgtcctgtgactcgccttgccacatctgtgtctctggaacccaggacctctggacctcaggttcccaagacttcagtcctggtctgctcaggaattgaagatgtaaggaattgaagataggagagataccttgaaaaagtagagaacagtcatgaggcagctttcatcacacccttttaacatttatctaaaagaatttaaattctttttcaaaaattacactacaagtttataagcccaaatggctctgtgaaatcagaagtgcaaaggtgtgcaaacttgtatctgaagacctaccagggacaagcaggtaagagctgatgtgagtgtgtgtgatgggatctgtaaggaactggaacacacatgtcctatccaaaggaatcagctgcagctgcttgttgtcaagtataaagtcaggacctggcttggctttaaccgtttttcaagaaaactggaaatctggattttcagcgaacatgcctgattttaaaaggttgactcaagtttttacaaaatactatgtgggacacctcaaatacatacctactgactgatgacaaacccaggagtttgtgtgtcttttataaaaagtttgccctggatgtcatattggcagttggaggacacagtttctattgtaaatttggatttacgactgaagaaggacattttctctttaaaagaaagttaggttataagaaacagaggcgtctcacatttttacttggtgtaattaataaacgaagataaatcata

SEQ ID NO: 58743 - DNA, 1106 bp, Homo sapiens
gggctccaaacgggcttttccattccagggttctcatccctttgagcattcaaagaagaggaaggcccaggagggctggataaggggtgagggtatttattcatttcacagacatcaactgagcacctcttgggttctatgaattcaattaatgaacaactgggggtgaaaggtgtcaggcagttagttaggatccctgcttggtagggggatgttaattaatgcaatgcttgaaatagggggagctacacctccatgggcttgattgccttggcagtcctggcgtgcttgctgttcctcctcattgtgggctttacctcccggtttaagaggcaaacttcctatcagggcgtcctgtgactcgccttgccacatctgtgtctctggaacccaggacctctggacctcaggttcccaagacttcagtcctggtctgctcaggaattgaagatgtaaggaattgaagataggagagataccttgaaaaagtagagaacagtcatgaggcagctttcatcacacccttttaacatttatctaaaagaatttaaattctttttcaaaaattacactacaagtttataagcccaaatggctctgtgaaatcagaagtgcaaaggtgtgcaaacttgtatctgaagacctaccagggacaagcaggtaagagctgatgtgagtgtgtgtgatgggatctgtaaggaactggaacacacatgtcctatccaaaggaatcagctgcagctgcttgttgtcaagtataaagtcaggacctggcttggctttaaccgtttttcaagaaaactggaaatctggattttcagcgaacatgcctgattttaaaaggttgactcaagtttttacaaaatactatgtgggacacctcaaatacatacctactgactgatgacaaacccaggagtttgtgtgtcttttataaaaagtttgccctggatgtcatattggcagttggaggacacagtttctattgtaaatttggatttacgactgaagaaggacattttctctttaaaagaaagttaggttataagaaacagaggcgtctcacatttttacttggtgtaattaataaacgaagataaatcata

SEQ ID NO: 58744 - DNA, 2203 bp, Homo sapiens
  misc_feature (1534)..(1534): n is a, c, g, or t
  misc_feature (1543)..(1543): n is a, c, g, or t
  misc_feature (1550)..(1550): n is a, c, g, or t
  misc_feature (1563)..(1563): n is a, c, g, or t
  misc_feature (1568)..(1568): n is a, c, g, or t
  misc_feature (1584)..(1584): n is a, c, g, or t
  misc_feature (1595)..(1595): n is a, c, g, or t
  misc_feature (1602)..(1603): n is a, c, g, or t
  misc_feature (1630)..(1631): n is a, c, g, or t
  misc_feature (1643)..(1643): n is a, c, g, or t
  misc_feature (1652)..(1652): n is a, c, g, or t
  misc_feature (1674)..(1674): n is a, c, g, or t
  misc_feature (1682)..(1682): n is a, c, g, or t
  misc_feature (1689)..(1690): n is a, c, g, or t
  misc_feature (1696)..(1696): n is a, c, g, or t
  misc_feature (1698)..(1698): n is a, c, g, or t
  misc_feature (1705)..(1705): n is a, c, g, or t
  misc_feature (1709)..(1709): n is a, c, g, or t
  misc_feature (1712)..(1712): n is a, c, g, or t
  misc_feature (1734)..(1734): n is a, c, g, or t
  misc_feature (1737)..(1737): n is a, c, g, or t
gagacatgtactgctaaagcaaggactttgatccttttttccctttgcatttttaccatggttggaattgtaacacagacacaaccttatgtcctgcttccaaaacataaataatggttgtaaagcgtcccacacgttgacccaaagtctcctttgaaacaggaaattgagacacgccggttgtgaaacctactgaagtgagcggcggcgccagggattcctgggaccccgacctctttgcagctcgcacagctaagggcgagggcgcccttcggcagaagcagcaaaccgccggcaagcccagcgaggagggctgccggggtctgggcttgggaattggctggcacccagcggaaagggacgtgagctgagcggcgggggagaagagtgcgcaggtcagagggcggcgcgcagcggcgctccgcgaggtccccacgccgggcgatatggggtgcctgctgtttctgctgctctgggcgctcctccaggcttggggaagcgctgaagtcccgcaaaggcttttccccctccgctgcctccagatctcgtccttcgccaatagcagctggacgcgcaccgacggcttggcgtggctgggggagctgcagacgcacagctggagcaacgactcggacaccgtccgctctctgaagccttggtcccagggcacgttcagcgaccagcagtgggagacgctgcagcatatatttcgggtttatcgaagcagcttcaccagggacgtgaaggaattcgccaaaatgctacgcttatcctatcccttggagctccaggtgtccgctggctgtgaggtgcaccctgggaacgcctcaaataacttcttccatgtagcatttcaaggaaaagatatcctgagtttccaaggaacttcttgggagccaacccaagaggccccactttgggtaaacttggccattcaagtgctcaaccaggacaagtggacgagggaaacagtgcagtggctccttaatggcacctgcccccaatttgtcagtggcctccttgagtcagggaagtcggaactgaagaagcaagtgaagcccaaggcctggctgtcccgtggccccagtcctggccctggccgtctgctgctggtgtgccatgtctcaggattctacccaaagcctgtatgggtgaagtggatgcggggtgagcaggagcagcagggcactcagccaggggacatcctgcccaatgctgacgagacatggtatctccgagcaaccctggatgtggtggctggggaggcagctggcctgtcctgtcgggtgaagcacagcagtctagagggccaggacatcgtcctctactggggggagctacacctccatgggcttgattgccttggcagtcctggcgtgcttgctgttcctcctcattgtgggctttacctcccggtttaagaggcaaacttcctatcagggcgtcctgtgactcgccttgccacatctgtgtctctggaacccaggacctctggacctcaggttcccaagacttcagtcctggtctgctcacnccccccccnctgtccngccccccgccccnccccncgcccccccgcccccntcgcgcccccnccccccnnccgcccccccccccccctccccccccnnccccccccgccntcccccccncccccccccccccccccccccntccctccnccccacnngccccncncactccncagngcnccggccgcccccccccgtctcngangacctaccagggacaagcaggtaagagctgatgtgagtgtgtgtgatgggatctgtaaggaactggaacacacatgtcctatccaaaggaatcagctgcagctgcttgttgtcaagtataaagtcaggacctggcttggctttaaccgtttttcaagaaaactggaaatctggattttcagcgaacatgcctgattttaaaaggttgactcaagtttttacaaaatactatgtgggacacctcaaatacatacctactgactgatgacaaacccaggagtttgtgtgtcttttataaaaagtttgccctggatgtcatattggcagttggaggacacagtttctattgtaaatttggatttacgactgaagaaggacattttctctttaaaagaaagttaggttataagaaacagaggcgtctcacatttttacttggtgtaattaataaacgaagataaatcata

SEQ ID NO: 58745 - DNA, 2795 bp, Homo sapiens
gagacatgtactgctaaagcaaggactttgatccttttttccctttgcatttttaccatggttggaattgtaacacagacacaaccttatgtcctgcttccaaaacataaataatggttgtaaagcgtcccacacgttgacccaaagtctcctttgaaacaggaaattgagacacgccggttgtgaaacctactgaagtgagcggcggcgccagggattcctgggaccccgacctctttgcagctcgcacagctaagggcgagggcgcccttcggcagaagcagcaaaccgccggcaagcccagcgaggagggctgccggggtctgggcttgggaattggctggcacccagcggaaagggacgtgagctgagcggcgggggagaagagtgcgcaggtcagagggcggcgcgcagcggcgctccgcgaggtccccacgccgggcgatatggggtgcctgctgtttctgctgctctgggcgctcctccaggcttggggaagcgctgaagtcccgcaaaggcttttccccctccgctgcctccagatctcgtccttcgccaatagcagctggacgcgcaccgacggcttggcgtggctgggggagctgcagacgcacagctggagcaacgactcggacaccgtccgctctctgaagccttggtcccagggcacgttcagcgaccagcagtgggagacgctgcagcatatatttcgggtttatcgaagcagcttcaccagggacgtgaaggaattcgccaaaatgctacgcttatcctatcccttggagctccaggtgtccgctggctgtgaggtgcaccctgggaacgcctcaaataacttcttccatgtagcatttcaaggaaaagatatcctgagtttccaaggaacttcttgggagccaacccaagaggccccactttgggtaaacttggccattcaagtgctcaaccaggacaagtggacgagggaaacagtgcagtggctccttaatggcacctgcccccaatttgtcagtggcctccttgagtcagggaagtcggaactgaagaagcaagtgaagcccaaggcctggctgtcccgtggccccagtcctggccctggccgtctgctgctggtgtgccatgtctcaggattctacccaaagcctgtatgggtgaagtggatgcggggtgagcaggagcagcagggcactcagccaggggacatcctgcccaatgctgacgagacatggtatctccgagcaaccctggatgtggtggctggggaggcagctggcctgtcctgtcgggtgaagcacagcagtctagagggccaggacatcgtcctctactggggggagctacacctccatgggcttgattgccttggcagtcctggcgtgcttgctgttcctcctcattgtgggctttacctcccggtttaagaggcaaacttcctatcagggcgtcctgtgactcgccttgccacatctgtgtctctggaacccaggacctctggacctcaggttcccaagacttcagtcctggtctgctcaggaattgaagatgtaaggaattgaagataggagagataccttgaaaaagtagagaacagtcatgaggcagctttcatcacacccttttaacatttatctaaaagaatttaaattctttttcaaaaattacactacaagtttataagcccaaatggctctgtgaaatcagaagtgcaaaggtgtgcaaacttgtatctgaagacctaccagggacaagcaggtaagagctgatgtgagtgtgtgtgatgggatctgtaaggaactggaacacacatgtcctatccaaaggaatcagctgcagctgcttgttgtcaagtataaagtcaggacctggcttggctttaaccgtttttcaagaaaactggaaatctggattttcagcgaacatgcctgattttaaaaggttgactcaagtttttacaaaatactatgtgggacacctcaaatacatacctactgactgatgacaaacccaggagtttgtgtgtcttttataaaaagtttgccctggatgtcatattggcagttggaggacacagtttctattgtaaatttggatttacgactgaagaaggacattttctctttaaaagaaagttaggttataagaaacagaggcgtctcacatttttacttggtgtaattaataaacgaagataaatcatagtgtatgtgtattatgttgaaaaaaactactctgagtaaggatatttctctcaaatggtcatcactttttttccttggaggaagattgtcatgaaggcatcccttccttcccaaaacgacaacggcaacaacaacagtctcctttacttacagctattaaaagagacaatgtagggaaagggccaacaccacttgggcaagcatgagctgcagcgattgatggtgatggtagcccagccatgctgtgttcttatcttagagaggacagagcaggaaacttacaggggtagcagacctttctgatgccaaagaaataaggaggccaaaatcatgtttgcctagctgggaggtaaatctcttggcagtcagggtccctgaacacccagaaaaaataagtgagacttaacggttggagagtgtttgcttgagaaaagtaacatttcacactctctatactagacttgcacatatgaatttaggatgtgcgtgaagattctgctagcttcaacatatcccaaagcacttggatatgcctataatccaagtgctttgggaggctgagataggaggattgtttaaggccaggcatttgaaatc

SEQ ID NO: 58746 - DNA, 290 bp, Homo sapiens
ctgaatttgggatgcccaggcactgaaaacaagatggggaatctaaacttatgaggaatagaaattggggttttaagtggaggaggaaataagaagcacctggtaccctcacacatgcctagaccaggggattggatatatgtagagaggggtcctgtgctgagagacagcctatgttcctccagagcaggtgggagctacacctccatgggcttgattgccttggcagtcctggcgtgcttgctgttcctcctcattgtgggctttacctcccggtttaagaggcaaac

SEQ ID NO: 58747 - DNA, 433 bp, Homo sapiens
cctatagcaatgtatgcacacattgcttagcactgtaccatagagtactgatatgttacaagaatgttcatctcagaaatatgccttatgttaaaatagaatgaaaacagctgtatcttgtaccttctcagccaaagagctatgatcatttcactgtacttttctcagtgtgaatggcacgcccaatgtgtttgtttactctgcttctcttctatgccattacccatttatccatggtcaggttaccatttcctcccacctgaaatactgtgataaccttctaactgtctttcctactattccaccttccaaaaccacggcctgttctgcaatcgtaattatatagttgtaaacaatcacacctgatcatgttacctgcttgctgaaaacccagctgccatttattgctataaggtatggatctcagtcctcg

SEQ ID NO: 58748 - DNA, 318 bp, Homo sapiens
ccaggtgcaatctcggctcactgcgacctctgcctccgcgtagctgggactccagctgtgcaccacccagtcagccccacgcccaccctgccaggcgtgtgcacggatcagcgtcactttacagatgaggaaactgagtctttgggaagctgacaaggtgcctgacacaggccagggcagggcccaccctcatgggctgtgctgcagcctctgcctcgtgggtcacggcaccccatctacgaggagcccctcaaggatgcgccgtcgagtccccggggcccttggcatgtccctggcagagaaggcagctcagggtgt

SEQ ID NO: 58749 - DNA, 127 bp, Homo sapiens
attttaccctagagggcagcatggtgccgtggagcagtgcgagccagtgaaggacctggcagttaggactacattcttaggcacaccttttcccgtcctgctggcccacttcccttctccaatacct

SEQ ID NO: 58750 - DNA, 348 bp, Homo sapiens
taacaaaatgatttgcttgtgtttgtgtgagtggcttgtttgctctggaccagacagaaggctaaactgtcattaaattatgcttagaatgagaagaactggttaatgtatccaatagcaatagttaatatactggttgtaatgaggatgatatccaattatctattctaaccaaagaaaatgacagaaaaaaaccatcattctttagtcttaagaattgtgttttaagaagtttgaaaaacccaaacattggcccatatgccttctatgttaacctagtctagaaacattttgatatgcaagggggttaatattaatgaaaaatataggaagataaagttttatata

SEQ ID NO: 58751 - DNA, 468 bp, Homo sapiens
atcctcactcccttcaacccgagcacacgtggcccttgtctgagcttccctggaccccatatcgcttctcagcttgggtccctttctctgttccctgggtgttgcccacacccaccatctcccctgtacttcagctcactcctgtcaggctcccacccctctgctccacggaaaccctcctgctcaggcggctgaggcctgggggcctgcaagttcccaaaccctggggccaccagacaaacccaaagtgagtgagattctacagaataactggcctcagctcttcagaggtgatgaggaaacactgaggaccgtcacaggctggtggggagtaaggagacaggaggacgaggtcacgttagtgccatcttggattggttcctgctccaggacaaggactttaggacaactgacagaacttcaataagctgtgcagattaattagcagtgtttatgtcaatattcaaa

SEQ ID NO: 58752 - DNA, 252 bp, Homo sapiens
tcacgtaaacctctgaaaagaaaactgctgttgatttggactctggataccattacccagctcacgctccttgctgtgacgactcatttggactcatacacctgcccagggcatccatgtacataatcctgtgaatcaaaggcaggagagcacccacatggacactcgggtctgtggcatccccaccaaatgatgactcatcaccagcttgaagacctctgctttttctgctcggcaaggagaaacgtggct

SEQ ID NO: 58753 - DNA, 235 bp, Homo sapiens
tggtaaattctcagatgggtggacaaaatatgatgatgctgattgccttgctttgaatgggacactggtaagcctccaatagtggggttagagttcaatataggtgttttcttgaagcctagagtcaagtaatggagaggtaagagcaatttgattgggtttgaaagaaggtgatgtccaaaataagtcacttgtttgaagttttgtgttgagtgatggtgaactcaaagatctt

SEQ ID NO: 58754 - DNA, 338 bp, Homo sapiens
gaaggagcggggaaccagtttctcactctcctcccacttgctattgtcagaagagcgagatttcagggcagcagagagcatcaggagatcaaaagaagacactgctgggtggtcccttagcaagttttagcttctttgcctgctgggagagtattccttgggcacagtgccaagtgtctctaagaaactagtcatgcctgatcttaagggctcgcggattctgggtggtggatttccttaggcttgtctgagcctgccagtgctctcctctgtcgctctgatttccattcacgctgagcagtctgcactcccttggacagacccactggcattttggg

SEQ ID NO: 58755 - DNA, 393 bp, Homo sapiens
gtgggtgtgggtctcactatgttgcccaggctagattcaaactcccaggctccagtgatcctctgagtagttgggactgcaggcatgcaccactgcccccagctttttcctgtcttgttctgattagaattaaatcacaggttttttgtttttgttttttatctttccataagtacagttaaagtaagattctcagggcagctcctgagttatcgtccctttttgctaaaatagatatttttagccaagagtttatgagtaaagaagctattcctactggccaagcgcagtggctcacgcctgtaatcccagcactttgggaggccaaggcaggcagatcacctgaggtcaggagtttgagaccagcctggccaacatggtgaaacctcgtct

SEQ ID NO: 58756 - DNA, 303 bp, Homo sapiens
catattgggggcccaatataaagcaaagctggaagcagggatgatccatgtatttgtggggatgggatatggacagggaaatagtgttccaactccatgctgagtgttgttttgaattgtaatgtgaagttgccaccataccagggctatgactgtgtacgatgtctcacccttgtaggctagtagctttgcagtgggaaaagatgacagggccacttgtccagggcattcaggtaataaagtccctgagctccaagttgctagatctaaggaagtattttttccttcatgtcaaagatgggg

SEQ ID NO: 58757 - DNA, 385 bp, Homo sapiens
aagggctcagtaaatgatgttctgccctatagactggccaggagctaaaggatattccaagagccagtcactgacctgacctctcttctgccagtctgaaagagactctattttagggaggaagcttgctttcatttcctagcaaacattctgggcctcagacaaagagctttaaaggttagaaaccttataaaatgatgccttgctcttgtgagaggagcctacctagagtccagcttcagttcttgagctaaatacatttgttttatccaaccacctactcaagctcagcatagggggcattccaggtaaattgatgataacagctctacctctagtgactttaaaatctcattgagttctgtaggccagggttaattaaaag

SEQ ID NO: 58758 - DNA, 771 bp, Homo sapiens
  misc_feature (26)..(26): n is a, c, g, or t
ccgggctgcaggaattcggcacgagnactggtggacagattctagtgctgagaagaaacacgtttggtttggagagtccatggatggtggttttcagtttagctacggcaatcctgaacttcctgaagatgtccttgatgtgcagctggcattccttcgacttctctccagccgagcttcccagaacatcacatatcactgcaaaaatagcattgcatacatggatcaggccagtggaaatgtaaagaaggccctgaagctgatggggtcaaatgaaggtgaattcaaggctgaaggaaatagcaaattcacctacacagttctggaggatggttgcacgaaacacactggggaatggagcaaaacagtctttgaatatcgaacacgcaaggctgtgagactacctattgtagatattgcaccctatgacattggtggtcctgatcaagaatttggtgtggacgttggccctgtttgctttttataaaccaaactctatctgaaatcccaacaaaaaaaatttaactccatatgtgttcctcttgttctaatcttgtcaaccagtgcaagtgaccgacaaaattccagttatttatttccaaaatgtttggaaacagtataatttgacaaagaaaaatgatacttctctttttttgctgttccaccaaatacaattcaaatgctttttgttttatttttttaccaattccaatttcaaaatgtctcaatggtgctataataaataaacttcaacactctttatgataacaa

SEQ ID NO: 58759 - DNA, 288 bp, Homo sapiens
cgtccagaggatcccctctctccaaacacactggggaatggagcaaaacagtctttgaatatcgaacacgcaaggctgtgagactacctattgtagatattgcaccctatgacattggtggtcctgatcaagaatttggtgtggacgttggccctgtttgctttttataaaccaaactctatctgaaatcccaacaaaaaaaatttaactccatatgtgttcctcttgttctaatcttgtcaaccagtgtgccagtgtggagagaggggatcctcagagtcacctcgc

SEQ ID NO: 58760 - DNA, 2188 bp, Homo sapiens
tttcagaatactgtataaaattaaatagaatattgtaatagtttaaggttttgcatatattgggttaaatatttctgaaaagcaaaattatttcaagttttcaaatatcttgacatggaacactgcctttgctaggagtcatttctagaaattacttaaaataggagacaagcatcaatcatagggatttcagctttagaactattggaacaaatctaggttagacaaccagcttatattattaagcaagattacatataataatcatctttttttaaaggagagacttttgcaaatattatacagcaatcaaaaggtcttagcttagtgtatcatccttattagaaaccaagatgttgcattttatttcagtgctttctgtagtcatagctaactcttttacctcagcaatttcaatcaaaaagcttctctatcattctatacataaaatgcagacacattagcagtcaacattatgaatgcctttacaggtaaacaaacaaaatcactttattactggattttataaccaattcccattcttttttgtgactattcaggagaatactgggttgaccctaaccaaggatgcaaattggatgctatcaaggtattctgtaatatggaaactggggaaacatgcataagtgccaatcctttgaatgttccacggaaacactggtggacagattctagtgctgagaagaaacacgtttggtttggagagtccatggatggtggttttcaggtaggaaaggatatacctttttttaaataagtcacctctatatcctttgtattcttcctatatgttcatcacaaagcaaagttactaggttggtacaaacataattgcagtttttgctactgaaagtgatggcatgcaataaaaatattttcacacataaaatactcgtacataaaatatataaacagcccatattacaatatgcatacacatactacatgaatccctcgcgtgcagttacaactgaaatgtttgatctgttttatttgttccctattacagtttagctacggcaatcctgaacttcctgaagatgtccttgatgtgcagctggcattccttcgacttctctccagccgagcttcccagaacatcacatatcactgcaaaaatagcattgcatacatggatcaggccagtggaaatgtaaagaaggccctgaagctgatggggtcaaatgaaggtgaattcaaggctgaaggaaatagcaaattcacctacacagttctggaggatggttgcacgggtaggaaacatttttctcaatataggtcataaagcagtcagcattttagtttaatcatgcaaattattttgaatagaataaataaaattaataggatgaaataaagatagcatttggtatgaattacatacattgcatctactgattcattgcagggaatgttaaatgcaacaaaatggatcttagcctccagatgaaaaccagttgaaataaaagcatttaaaatttaaatccataatgcaaactttatcagataattgggatagttactatatgttttgaataatacctgtcacattaactcagtttgaaatatctgttttttaaaattttaaaggttaacttcaaatctctcatttgttattgttatttgtgaacaaagggaaaactcacttctaatattagcgaatttcattgtgagagacctatcctctttttaataaaccatttataaacctgttagcaatggccggaaccaggcctcctgaggatgcactggtctatagcaattgccctgctgcatttactaagaatccttacaaggcatttgtttaagaatattgtttatcaactaagaagattacagctttgaagtagagcaggtctcatatacatgaataataacatggcacgatgaatgcttctttagagtaaaaaggttttctttaacttgttaagtcagagttgtctaagtaattgtaatgtcatgatcatgtacattttgtccttttttacagaaacacactggggaatggagcaaaacagtctttgaatatcgaacacgcaaggctgtgagactacctattgtagatattgcaccctatgacattggtggtcctgatcaagaatttggtgtggacgttggccctgtttgctttttataaaccaaactctatctgaaatcccaacaaaaa

SEQ ID NO: 58761 - DNA, 324 bp, Homo sapiens
tcggtaccttcgacggtgtctgatcttagttatttctgtcttcactagcttttgaatttgtttgctcttgctctcaaggtattctgtaatatggaaactggggaaacatgcataagtgccaatcctttgaatgttccacggaaacactggtggacagattctagtgctgagaagaaacacgtttggtttggagagtccatggatggtggttttcagtttagctacggcaatcctgaacttcctgaagatgtccttgatgtgcagctggcattccttcgacttctctccagccgagcttcccgtcagaacggggtaccgacgctc

SEQ ID NO: 58762 - DNA, 259 bp, Homo sapiens
  misc_feature (40)..(40): n is a, c, g, or t
gttcgcaacggtcgctctacgacggatcccggccccccgntggattgagaaacacactggggaatggagcaaaacagtctttgaatatcgaacacgcaaggctgtgagactacctattgtagatattgcaccctatgacattggtggtcctgatcaagaatttggtgtggacgttggccctgtttgctttttataaaccaaactctatctgaaatcccaacaaaaaagatttgcgccagtatagtcacacgatttccgg

SEQ ID NO: 58763 - DNA, 226 bp, Homo sapiens
  misc_feature (40)..(40): n is a, c, g, or t
gttcgcaacggtcgctctacgacggatcccggccccccgntggattgagaaacacactggggaatggagcaaaacagtctttgaatatcgaacacgcaaggctgtgagactacctattgtagatattgcaccctatgacattggtggtcctgatcaagaatttggtgtggacgttggccctgtttgctttttataaaccaaactctatctgaaatcccaacaaaaa

SEQ ID NO: 58764 - DNA, 2406 bp, Homo sapiens
tgagatggagcttgctctgtcacccaggctggagtgcagtggcacgatcacagctcactgcaacttccgccacctgggttcaagcaattttcctgcttcaacctcccgagtagttgagattacaggcacgtgccaccacacctgactgatttttgtatttttagtagagacagggtttcaccatgttggccaggctggtcttgaactcctgacctcaagtgatccacccacctcagtctaccaaagtgctgggattacaggttgtgagccactgcacccggcctctgtctgacttttaaatgatggagtatcccagaggtcaggctttagagctcttctttcttccatctacagagtgctcatttctttggtgatctcattcagtctcacggctttgaatgttatatgctgataagtcccaactttctctgtctcgcctaaacttcccctaatagcagaacctgatatcaaagtgcctatttgacatctccacttagatatctaataagcatctttaatgtaaaatttccaaaactgagctcctacaattccctcccacacttgttcagttttccccatctaagctaatggcaactccatccctccagttgctttggccaaaacttttgagttgtctttgactgctttttttctcccttcttacattgtgctcatcctttctttcaggcaaattctgtttggtataccttcaaatatatctagaattctatacttctcactacccctcattcccattatctttgaaacacactccaatgaggtttttacccccactattccaccaaaaacactcttgtgaaagtcaccagatgatggttcttcaggctatcatctgtctcctgaattattttaagagcctccctaactggtctccttgttccagcccctgctcccttcactctattctcaatacaacagtcagagggatcttataaaaccgtaagtcagatcatataattctgtgtgaaaccctccaatgttatcccacttcagagtaaaagttaaagggtttattttgatctctaaatattttgatccctatgatctagtctcttcttacccaaagtatgggcctcataccagcagaactggcattctctgggagcttgttagaaatgtagaatctctggtcctaagattttctaaatcagaatctgcattttcatcagctctcttggcaattcatatgtttgagaaggactgatgtagtcctctactgcctctcctgctgctatgtgctgctctagtcacactgtcctcctggctatttcgataagatggaaactctcctgcctcagggcttttgcacctactgctccctctgtctaggataatcttccccagaaaactgcatgccagttgccttatttccttcaggtctttattgaagtcactttctcattaaacactttctggcccatcctgtctaaaactgcatccccaaacccttcctatcccttttctccacttttttctttttttaaactatagttcttatcaacatagtatatgttttgcttatttatcctgtttattgtctgactcaacattgacaaagaaaaatgatacttctctttttttgctgttccaccaaatacaattcaaatgctttttgttttatttttttaccaattccaatttcaaaatgtctcaatggtgctataataaataaacttcaacactctttatgataacaacactgtgttatattctttgaatcctagcccatctgcagagcaatgactgtgctcaccagtaaaagataacctttctttctgaaatagtcaaatacgaaattagaaaagccctccctattttaactacctcaactggtcagaaacacagattgtattctatgagtcccagaagatgaaaaaaattttatacgttgataaaacttataaatttcattgattaatctcctggaagattggtttaaaaagaaaagtgtaatgcaagaatttaaagaaatatttttaaagccacaattattttaatattggatatcaactgcttgtaaaggtgctcctcttttttcttgtcattgctggtcaagattactaatatttgggaaggctttaaagacgcatgttatggtgctaatgtactttcacttttaaactctagatcagaattgttgacttgcattcagaacataaatgcacaaaatctgtacatgtctcccatcagaaagattcattggcatgccacaggggattctcctccttcatcctgtaaaggtcaacaataaaaaccaaattatggggctgcttttgtcacactagcatagagaatgtgttgaaatttaactttgtaagcttgtatgtggttgttgatcttttttttccttacagacacccataataaaatatcatattaaaattc

SEQ ID NO: 58765 - DNA, 266 bp, Homo sapiens
  misc_feature (11)..(12): n is a, c, g, or t
atagaaaaccnnttttacaatttatttcctgttgttaatctttaaaaatgaggttctagctaagtgcagggtttcagtggtgaaattttgaccatgtgaacacataaataaatatttgttgacaaagaaaaatgatacttctctttttttgctgttccaccaaatacaattcaaatgctttttgttttatttttttaccaattccaatttcaaaatgtctcaatggtgctataataaataaacttcaacactctttatgataacaa

SEQ ID NO: 58766 - DNA, 327 bp, Homo sapiens
ctcgtgccgctcgtgccgaattcggcacgagggttatggtgctaatgtactttcacttttaaactctagatcagaattgttgacttgcattcagaacataaatgcacaaaatctgtacatgtctcccatcagaaagattcattggcatgccacaggggattctcctccttcatcctgtaaaggtcaacaataaaaaccaaattatggggctgcttttgtcacactagcatagagaatgtgttgaaatttaactttgtaagcttgtatgtggttgttgatcttttttttccttacagacacccataataaaatatcatattaaaattc

SEQ ID NO: 58767 - DNA, 315 bp, Homo sapiens
tggccggccccagatttctagttatggtgctaatgtactttcacttttaaactctagatcagaattgttgacttgcattcagaacataaatgcacaaaatctgtacatgtctcccatcagaaagattcattggcatgccacaggggattctcctccttcatcctgtaaaggtcaacaataaaaaccaaattatggggctgcttttgtcacactagcatagagaatgtgttgaaatttaactttgtaagcttgtatgtggttgttgatcttttttttccttacagacacccataataaaatatcatattaaaattc

SEQ ID NO: 58768 - DNA, 252 bp, Homo sapiens
  misc_feature (234)..(234): n is a, c, g, or t
tcaaaatcatacaaatagtgtatgtagtaattttttattatttcattttaaatcacctaacaactgacttctttactcgcaggcatgcccggaagtccaggaggaccaggaagtgatgggaaaccagggcctcccgtatgtacatttttaaaatctcattttaaaaggccagttaaaatggaatgtatatgttggcctcccaaaatgctgggattacaggcgtgaccaccacgnccagcctggattcacttt

SEQ ID NO: 58769 - DNA, 327 bp, Homo sapiens
  misc_feature (196)..(196): n is a, c, g, or t
  misc_feature (274)..(274): n is a, c, g, or t
  misc_feature (297)..(297): n is a, c, g, or t
caatcaccttggagcctttcggaggcaagggtgatgctggtgcccctggtgaacgtggacctcctggattggcaggggccccaggacttagaggtggagctggtccccctggtcccgaaggaggaaaggtgctgctggtcctccaggagaaaatggaaaacctggggaaccaggtccaaagggtgatgccggtgcncctggagctccaggaggcaagggtgatgctggtgcccctggtgaacgtggacctcctggattggcaggggccccaggncttagaggtggagctggtccccnttggtcccgaaaggctccaagggtttgggc

SEQ ID NO: 58770 - DNA, 5031 bp, Homo sapiens
accccagaaaactacgatagcccttatgaaacttaagggtcgaaggtggatttagcagtaaactaagagtagagtgcttagttgaacagggccctgaagcgcgtacacaccgcccgtcaccctcctcaagtatacttcaaaggacatttaactaaaacccctacgcatttatatagaggagacaagtcgtaacatggtaagtgtactggaaagtgcacttggacgaactggctgagttttatgacgggcccggtgctgaagggcagggaacaacttgatggtgctactttgaactgcttttcttttctcctttttgcacaaagagtctcatgtctgatatttagacatgatgagctttgtgcaaaaggggagctggctacttctcgctctgcttcatcccactattattttggcacaacaggaagctgttgaaggaggatgttcccatcttggtcagtcctatgcggatagagatgtctggaagccagaaccatgccaaatatgtgtctgtgactcaggatccgttctctgcgatgacataatatgtgacgatcaagaattagactgccccaacccagaaattccatttggagaatgttgtgcagtttgcccacagcctccaactgctcctactcgccctcctaatggtcaaggacctcaaggccccaagggagatccaggccctcctggtattcctgggagaaatggtgaccctggtattccaggacaaccagggtcccctggttctcctggcccccctggaatctgtgaatcatgccctactggtcctcagaactattctccccagtatgattcatatgatgtcaagtctggagtagcagtaggaggactcgcaggctatcctggaccagctggccccccaggccctcccggtccccctggtacatctggtcatcctggttcccctggatctccaggataccaaggaccccctggtgaacctgggcaagctggtccttcaggccctccaggacctcctggtgctataggtccatctggtcctgctggaaaagatggagaatcaggtagacccggacgacctggagagcgaggattgcctggacctccaggtatcaaaggtccagctgggatacctggattccctggtatgaaaggacacagaggcttcgatggacgaaatggagaaaagggtgaaacaggtgctcctggattaaagggtgaaaatggtcttccaggcgaaaatggagctcctggacccatgggtccaagaggggctcctggtgagcgaggacggccaggacttcctggggctgcaggtgctcggggtaatgacggtgctcgaggcagtgatggtcaaccaggccctcctggtcctcctggaactgccggattccctggatcccctggtgctaagggtgaagttggacctgcagggtctcctggttcaaatggtgcccctggacaaagaggagaacctggacctcagggacacgctggtgctcaaggtcctcctggccctcctgggattaatggtagtcctggtggtaaaggcgaaatgggtcccgctggcattcctggagctcctggactgatgggagcccggggtcctccaggaccagccggtgctaatggtgctcctggactgcgaggtggtgcaggtgagcctggtaagaatggtgccaaaggagagcccggaccacgtggtgaacgcggtgaggctggtattccaggtgttccaggagctaaaggcgaagatggcaaggatggatcacctggagaacctggtgcaaatgggcttccaggagctgcaggagaaaggggtgcccctgggttccgaggacctgctggaccaaatggcatcccaggagaaaagggtcctgctggagagcgtggtgctccaggccctgcagggcccagaggagctgctggagaacctggcagagatggcgtccctggaggtccaggaatgaggggcatgcccggaagtccaggaggaccaggaagtgatgggaaaccagggcctcccggaagtcaaggagaaagtggtcgaccaggtcctcctgggccatctggtccccgaggtcagcctggtgtcatgggcttccccggtcctaaaggaaatgatggtgctcctggtaagaatggagaacgaggtggccctggaggacctggccctcagggtcctcctggaaagaatggtgaaactggacctcaaggacccccagggcctactgggcctggtggtgacaaaggagacacaggaccccctggtccacaaggattacaaggcttgcctggtacaggtggtcctccaggagaaaatggaaaacctggggaaccaggtccaaagggtgatgccggtgcacctggagctccaggaggcaagggtgatgctggtgcccctggtgaacgtggacctcctggattggcaggggccccaggacttagaggtggagctggtccccctggtcccgaaggaggaaagggtgctgctggtcctcctgggccacctggtgctgctggtactcctggtctgcaaggaatgcctggagaaagaggaggtcttggaagtcctggtccaaagggtgacaagggtgaaccaggcggtccaggtgctgatggtgtcccagggaaagatggcccaaggggtcctactggtcctattggtcctcctggcccagctggccagcctggagataagggtgaaggtggtgcccccggacttccaggtatagctggacctcgtggtagccctggtgagagaggtgaaactggccctccaggacctgctggtttccctggtgctcctggacagaatggtgaacctggtggtaaaggagaaagaggggctccgggtgagaaaggtgaaggaggccctcctggagttgcaggaccccctggaggttctggacctgctggtcctcctggtccccaaggtgtcaaaggtgaacgtggcagtcctggtggacctggtgctgctggcttccctggtgctcgtggtcttcctggtcctcctggtagtaatggtaacccaggacccccaggtcccagcggttctccaggcaaggatgggcccccaggtcctgcgggtaacactggtgctcctggcagccctggagtgtctggaccaaaaggtgatgctggccaaccaggagagaagggatcgcctggtgcccagggcccaccaggagctccaggcccacttgggattgctgggatcactggagcacggggtcttgcaggaccaccaggcatgccaggtcctaggggaagccctggccctcagggtgtcaagggtgaaagtgggaaaccaggagctaacggtctcagtggagaacgtggtccccctggaccccagggtcttcctggtctggctggtacagctggtgaacctggaagagatggaaaccctggatcagatggtcttccaggccgagatggatctcctggtggcaagggtgatcgtggtgaaaatggctctcctggtgcccctggcgctcctggtcatccaggcccacctggtcctgtcggtccagctggaaagagtggtgacagaggagaaagtggccctgctggccctgctggtgctcccggtcctgctggttcccgaggtgctcctggtcctcaaggcccacgtggtgacaaaggtgaaacaggtgaacgtggagctgctggcatcaaaggacatcgaggattccctggtaatccaggtgccccaggttctccaggccctgctggtcagcagggtgcaatcggcagtccaggacctgcaggccccagaggacctgttggacccagtggacctcctggcaaagatggaaccagtggacatccaggtcccattggaccaccagggcctcgaggtaacagaggtgaaagaggatctgagggctccccaggccacccagggcaaccaggccctcctggacctcctggtgcccctggtccttgctgtggtggtgttggagccgctgccattgctgggattggaggtgaaaaagctggcggttttgccccgtattatggagatgaaccaatggatttcaaaatcaacaccgatgagattatgacttcactcaagtctgttaatggacaaatagaaagcctcattagtcctgatggttctcgtaaaaaccccgctagaaactgcagagacctgaaattctgccatcctgaactcaagagtggagaatactgggttgaccctaaccaaggatgcaaattggatgctatcaaggtattctgtaatatggaaactggggaaacatgcataagtgccaatcctttgaatgttccacggaaacactggtggacagattctagtgctgagaagaaacacgtttggtttggagagtccatggatggtggttttcagtttagctacggcaatcctgaacttcctgaagatgtccttgatgtgcagctggcattccttcgacttctctccagccgagcttcccagaacatcacatatcactgcaaaaatagcattgcatacatggatcaggccagtggaaatgtaaagaaggccctgaagctgatggggtcaaatgaaggtgaattcaaggctgaaggaaatagcaaattcacctacacagttctggaggatggttgcacgaaacacactggggaatggagcaaaacagtctttgaatatcgaacacgcaaggctgtgagactacctattgtagatattgcaccctatgacattggtggtcctgatcaagaatttggtgtggacgttggccctgtttgctttttataaaccaaactctatctgaaatcccaacaaaaaaaatttaactccatatgtgttcctcttgttctaatcttgtcaaccagtgcaagtgaccgacaaaattccagttatttatttccaaaatgtttggaaacagtataatttgacaaagaaaaatgatacttctctttttttgctgttccaccaaatacaattcaaatgctttttgttttatttttttaccaattccaatttcaaaatgtctcaatggtgctataataaataaacttcaacactctttatgataacaa

SEQ ID NO: 58771 - DNA, 4887 bp, Homo sapiens
accccagaaaactacgatagcccttatgaaacttaagggtcgaaggtggatttagcagtaaactaagagtagagtgcttagttgaacagggccctgaagcgcgtacacaccgcccgtcaccctcctcaagtatacttcaaaggacatttaactaaaacccctacgcatttatatagaggagacaagtcgtaacatggtaagtgtactggaaagtgcacttggacgaactggctgagttttatgacgggcccggtgctgaagggcagggaacaacttgatggtgctactttgaactgcttttcttttctcctttttgcacaaagagtctcatgtctgatatttagacatgatgagctttgtgcaaaaggggagctggctacttctcgctctgcttcatcccactattattttggcacaacaggaagctgttgaaggaggatgttcccatcttggtcagtcctatgcggatagagatgtctggaagccagaaccatgccaaatatgtgtctgtgactcaggatccgttctctgcgatgacataatatgtgacgatcaagaattagactgccccaacccagaaattccatttggagaatgttgtgcagtttgcccacagcctccaactgctcctactcgccctcctaatggtcaaggacctcaaggccccaagggagatccaggccctcctggtattcctgggagaaatggtgaccctggtattccaggacaaccagggtcccctggttctcctggcccccctggaatctgtgaatcatgccctactggtcctcagaactattctccccagtatgattcatatgatgtcaagtctggagtagcagtaggaggactcgcaggctatcctggaccagctggccccccaggccctcccggtccccctggtacatctggtcatcctggttcccctggatctccaggataccaaggaccccctggtgaacctgggcaagctggtccttcaggccctccaggacctcctggtgctataggtccatctggtcctgctggaaaagatggagaatcaggtagacccggacgacctggagagcgaggattgcctggacctccaggtatcaaaggtccagctgggatacctggattccctggtatgaaaggacacagaggcttcgatggacgaaatggagaaaagggtgaaacaggtgctcctggattaaagggtgaaaatggtcttccaggcgaaaatggagctcctggacccatgggtccaagaggggctcctggtgagcgaggacggccaggacttcctggggctgcaggtgctcggggtaatgacggtgctcgaggcagtgatggtcaaccaggccctcctggtcctcctggaactgccggattccctggatcccctggtgctaagggtgaagttggacctgcagggtctcctggttcaaatggtgcccctggacaaagaggagaacctggacctcagggacacgctggtgctcaaggtcctcctggccctcctgggattaatggtagtcctggtggtaaaggcgaaatgggtcccgctggcattcctggagctcctggactgatgggagcccggggtcctccaggaccagccggtgctaatggtgctcctggactgcgaggtggtgcaggtgagcctggtaagaatggtgccaaaggagagcccggaccacgtggtgaacgcggtgaggctggtattccaggtgttccaggagctaaaggcgaagatggcaaggatggatcacctggagaacctggtgcaaatgggcttccaggagctgcaggagaaaggggtgcccctgggttccgaggacctgctggaccaaatggcatcccaggagaaaagggtcctgctggagagcgtggtgctccaggccctgcagggcccagaggagctgctggagaacctggcagagatggcgtccctggaggtccaggaatgaggggcatgcccggaagtccaggaggaccaggaagtgatgggaaaccagggcctcccggaagtcaaggagaaagtggtcgaccaggtcctcctgggccatctggtccccgaggtcagcctggtgtcatgggcttccccggtcctaaaggaaatgatggtgctcctggtaagaatggagaacgaggtggccctggaggacctggccctcagggtcctcctggaaagaatggtgaaactggacctcaaggacccccagggcctactgggcctggtggtgacaaaggagacacaggaccccctggtccacaaggattacaaggcttgcctggtacaggtggtcctccaggagaaaatggaaaacctggggaaccaggtgctgctggtcctcctgggccacctggtgctgctggtactcctggtctgcaaggaatgcctggagaaagaggaggtcttggaagtcctggtccaaagggtgacaagggtgaaccaggcggtccaggtgctgatggtgtcccagggaaagatggcccaaggggtcctactggtcctattggtcctcctggcccagctggccagcctggagataagggtgaaggtggtgcccccggacttccaggtatagctggacctcgtggtagccctggtgagagaggtgaaactggccctccaggacctgctggtttccctggtgctcctggacagaatggtgaacctggtggtaaaggagaaagaggggctccgggtgagaaaggtgaaggaggccctcctggagttgcaggaccccctggaggttctggacctgctggtcctcctggtccccaaggtgtcaaaggtgaacgtggcagtcctggtggacctggtgctgctggcttccctggtgctcgtggtcttcctggtcctcctggtagtaatggtaacccaggacccccaggtcccagcggttctccaggcaaggatgggcccccaggtcctgcgggtaacactggtgctcctggcagccctggagtgtctggaccaaaaggtgatgctggccaaccaggagagaagggatcgcctggtgcccagggcccaccaggagctccaggcccacttgggattgctgggatcactggagcacggggtcttgcaggaccaccaggcatgccaggtcctaggggaagccctggccctcagggtgtcaagggtgaaagtgggaaaccaggagctaacggtctcagtggagaacgtggtccccctggaccccagggtcttcctggtctggctggtacagctggtgaacctggaagagatggaaaccctggatcagatggtcttccaggccgagatggatctcctggtggcaagggtgatcgtggtgaaaatggctctcctggtgcccctggcgctcctggtcatccaggcccacctggtcctgtcggtccagctggaaagagtggtgacagaggagaaagtggccctgctggccctgctggtgctcccggtcctgctggttcccgaggtgctcctggtcctcaaggcccacgtggtgacaaaggtgaaacaggtgaacgtggagctgctggcatcaaaggacatcgaggattccctggtaatccaggtgccccaggttctccaggccctgctggtcagcagggtgcaatcggcagtccaggacctgcaggccccagaggacctgttggacccagtggacctcctggcaaagatggaaccagtggacatccaggtcccattggaccaccagggcctcgaggtaacagaggtgaaagaggatctgagggctccccaggccacccagggcaaccaggccctcctggacctcctggtgcccctggtccttgctgtggtggtgttggagccgctgccattgctgggattggaggtgaaaaagctggcggttttgccccgtattatggagatgaaccaatggatttcaaaatcaacaccgatgagattatgacttcactcaagtctgttaatggacaaatagaaagcctcattagtcctgatggttctcgtaaaaaccccgctagaaactgcagagacctgaaattctgccatcctgaactcaagagtggagaatactgggttgaccctaaccaaggatgcaaattggatgctatcaaggtattctgtaatatggaaactggggaaacatgcataagtgccaatcctttgaatgttccacggaaacactggtggacagattctagtgctgagaagaaacacgtttggtttggagagtccatggatggtggttttcagtttagctacggcaatcctgaacttcctgaagatgtccttgatgtgcagctggcattccttcgacttctctccagccgagcttcccagaacatcacatatcactgcaaaaatagcattgcatacatggatcaggccagtggaaatgtaaagaaggccctgaagctgatggggtcaaatgaaggtgaattcaaggctgaaggaaatagcaaattcacctacacagttctggaggatggttgcacgaaacacactggggaatggagcaaaacagtctttgaatatcgaacacgcaaggctgtgagactacctattgtagatattgcaccctatgacattggtggtcctgatcaagaatttggtgtggacgttggccctgtttgctttttataaaccaaactctatctgaaatcccaacaaaaaaaatttaactccatatgtgttcctcttgttctaatcttgtcaaccagtgcaagtgaccgacaaaattccagttatttatttccaaaatgtttggaaacagtataatttgacaaagaaaaatgatacttctctttttttgctgttccaccaaatacaattcaaatgctttttgttttatttttttaccaattccaatttcaaaatgtctcaatggtgctataataaataaacttcaacactctttatgataacaa

SEQ ID NO: 58772 - DNA, 3911 bp, Homo sapiens
accccagaaaactacgatagcccttatgaaacttaagggtcgaaggtggatttagcagtaaactaagagtagagtgcttagttgaacagggccctgaagcgcgtacacaccgcccgtcaccctcctcaagtatacttcaaaggacatttaactaaaacccctacgcatttatatagaggagacaagtcgtaacatggtaagtgtactggaaagtgcacttggacgaactggctgagttttatgacgggcccggtgctgaagggcagggaacaacttgatggtgctactttgaactgcttttcttttctcctttttgcacaaagagtctcatgtctgatatttagacatgatgagctttgtgcaaaaggggagctggctacttctcgctctgcttcatcccactattattttggcacaacaggaagctgttgaaggaggatgttcccatcttggtcagtcctatgcggatagagatgtctggaagccagaaccatgccaaatatgtgtctgtgactcaggatccgttctctgcgatgacataatatgtgacgatcaagaattagactgccccaacccagaaattccatttggagaatgttgtgcagtttgcccacagcctccaactgctcctactcgccctcctaatggtcaaggacctcaaggccccaagggagatccaggccctcctggtattcctgggagaaatggtgaccctggtattccaggacaaccagggtcccctggttctcctggcccccctggaatctgtgaatcatgccctactggtcctcagaactattctccccagtatgattcatatgatgtcaagtctggagtagcagtaggaggactcgcaggctatcctggaccagctggccccccaggccctcccggtccccctggtacatctggtcatcctggttcccctggatctccaggataccaaggaccccctggtgaacctgggcaagctggtccttcaggccctccaggacctcctggtgctataggtccatctggtcctgctggaaaagatggagaatcaggtagacccggacgacctggagagcgaggattgcctggacctccaggtatcaaaggtccagctgggatacctggattccctggtatgaaaggacacagaggcttcgatggacgaaatggagaaaagggtgaaacaggtgctcctggattaaagggtgaaaatggtcttccaggcgaaaatggagctcctggacccatgggtccaagaggggctcctggtgagcgaggacggccaggacttcctggggctgcaggtgctcggggtaatgacggtgctcgaggcagtgatggtcaaccaggccctcctggtcctcctggaactgccggattccctggatcccctggtgctaagggtgaagttggacctgcagggtctcctggttcaaatggtgcccctggacaaagaggagaacctggacctcagggacacgctggtgctcaaggtcctcctggccctcctgggattaatggtagtcctggtggtaaaggcgaaatgggtcccgctggcattcctggagctcctggactgatgggagcccggggtcctccaggaccagccggtgctaatggtgctcctggactgcgaggtggtgcaggtgagcctggtaagaatggtgccaaaggagagcccggaccacgtggtgaacgcggtgaggctggtattccaggtgttccaggagctaaaggcgaagatggcaaggatggatcacctggagaacctggtgcaaatgggcttccaggagctgcaggagaaaggggtgcccctgggttccgaggacctgctggaccaaatggcatcccaggagaaaagggtcctgctggagagcgtggtgctccaggccctgcagggcccagaggagctgctggagaacctggcagagatggcgtccctggaggtccaggaatgaggggcatgcccggaagtccaggaggaccaggaagtgatgggaaaccagggcctcccggaagtcaaggagaaagtggtcgaccaggtcctcctgggccatctggtccccgaggtcagcctggtgtcatgggcttccccggtcctaaaggaaatgatggtgctcctggtaagaatggagaacgaggtggccctggaggacctggccctcagggtcctcctggaaagaatggtgaaactggacctcaaggacccccagggcctactgggcctggtggtgacaaaggagacacaggaccccctggtccacaaggattacaaggcttgcctggtacaggtggtcctccaggagaaaatggaaaacctggggaaccaggtccaaagggtgatgccggtgcacctggagctccaggaggcaagggtgatgctggtgcccctggtgaacgtggacctcctggattggcaggggccccaggacttagaggtggagctggtccccctggtcccgaaggaggaaagggtgctgctggtcctcctgggccacctggtgctgctggtactcctggtctgcaaggaatgcctggagaaagaggaggtcttggaagtcctggtccaaagggtgacaagggtgaaccaggcggtccaggtgctgatggtgtcccagggaaagatggcccaaggggtcctactggtcctattggtcctcctggcccagctggccagcctggagataagggtgaaggtggtgcccccggacttccaggtatagctggacctcgtggtagccctggtgagagaggtgaaactggccctccaggacctgctggtttccctggtgctcctctcctggtgcccctggtccttgctgtggtggtgttggagccgctgccattgctgggattggaggtgaaaaagctggcggttttgccccgtattatggagatgaaccaatggatttcaaaatcaacaccgatgagattatgacttcactcaagtctgttaatggacaaatagaaagcctcattagtcctgatggttctcgtaaaaaccccgctagaaactgcagagacctgaaattctgccatcctgaactcaagagtggagaatactgggttgaccctaaccaaggatgcaaattggatgctatcaaggtattctgtaatatggaaactggggaaacatgcataagtgccaatcctttgaatgttccacggaaacactggtggacagattctagtgctgagaagaaacacgtttggtttggagagtccatggatggtggttttcagtttagctacggcaatcctgaacttcctgaagatgtccttgatgtgcagctggcattccttcgacttctctccagccgagcttcccagaacatcacatatcactgcaaaaatagcattgcatacatggatcaggccagtggaaatgtaaagaaggccctgaagctgatggggtcaaatgaaggtgaattcaaggctgaaggaaatagcaaattcacctacacagttctggaggatggttgcacgaaacacactggggaatggagcaaaacagtctttgaatatcgaacacgcaaggctgtgagactacctattgtagatattgcaccctatgacattggtggtcctgatcaagaatttggtgtggacgttggccctgtttgctttttataaaccaaactctatctgaaatcccaacaaaaaaaatttaactccatatgtgttcctcttgttctaatcttgtcaaccagtgcaagtgaccgacaaaattccagttatttatttccaaaatgtttggaaacagtataatttgacaaagaaaaatgatacttctctttttttgctgttccaccaaatacaattcaaatgctttttgttttatttttttaccaattccaatttcaaaatgtctcaatggtgctataataaataaacttcaacactctttatgataacaa

SEQ ID NO: 58773 - DNA, 868 bp, Homo sapiens
gcaggctggtacggccggagttttaggatcaaggatgcaaattggatgctatcaaggtattctgtaatatggaaactggggaaacatgcataagtgccaatcctttgaatgttccacggaaacactggtggacagattctagtgctgagaagaaacacgtttggtttggagagtccatggatggtggttttcagtttagctacggcaatcctgaacttcctgaagatgtccttgatgtgcagctggcattccttcgacttctctccagccgagcttcccagaacatcacatatcactgcaaaaatagcattgcatacatggatcaggccagtggaaatgtaaagaaggccctgaagctgatggggtcaaatgaaggtgaattcaaggctgaaggaaatagcaaattcacctacacagttctggaggatggttgcacgaaacacactggggaatggagcaaaacagtctttgaatatcgaacacgcaaggctgtgagactacctattgtagatattgcaccctatgacattggtggtcctgatcaagaatttggtgtggacgttggccctgtttgctttttataaaccaaactctatctgaaatcccaacaaaaaaaatttaactccatatgtgttcctcttgttctaatcttgtcaaccagtgcaagtgaccgacaaaattccagttatttatttccaaaatgtttggaaacagtataatttgacaaagaaaaatgatacttctctttttttgctgttccaccaaatacaattcaaatgctttttgttttatttttttaccaattccaatttcaaaatgtctcaatggtgctataataaataaacttcaacactctttatgataacaa

SEQ ID NO: 58774 - DNA, 5313 bp, Homo sapiens
accccagaaaactacgatagcccttatgaaacttaagggtcgaaggtggatttagcagtaaactaagagtagagtgcttagttgaacagggccctgaagcgcgtacacaccgcccgtcaccctcctcaagtatacttcaaaggacatttaactaaaacccctacgcatttatatagaggagacaagtcgtaacatggtaagtgtactggaaagtgcacttggacgaactggctgagttttatgacgggcccggtgctgaagggcagggaacaacttgatggtgctactttgaactgcttttcttttctcctttttgcacaaagagtctcatgtctgatatttagacatgatgagctttgtgcaaaaggggagctggctacttctcgctctgcttcatcccactattattttggcacaacaggaagctgttgaaggaggatgttcccatcttggtcagtcctatgcggatagagatgtctggaagccagaaccatgccaaatatgtgtctgtgactcaggatccgttctctgcgatgacataatatgtgacgatcaagaattagactgccccaacccagaaattccatttggagaatgttgtgcagtttgcccacagcctccaactgctcctactcgccctcctaatggtcaaggacctcaaggccccaagggagatccaggccctcctggtattcctgggagaaatggtgaccctggtattccaggacaaccagggtcccctggttctcctggcccccctggaatctgtgaatcatgccctactggtcctcagaactattctccccagtatgattcatatgatgtcaagtctggagtagcagtaggaggactcgcaggctatcctggaccagctggccccccaggccctcccggtccccctggtacatctggtcatcctggttcccctggatctccaggataccaaggaccccctggtgaacctgggcaagctggtccttcaggccctccaggacctcctggtgctataggtccatctggtcctgctggaaaagatggagaatcaggtagacccggacgacctggagagcgaggattgcctggacctccaggtatcaaaggtccagctgggatacctggattccctggtatgaaaggacacagaggcttcgatggacgaaatggagaaaagggtgaaacaggtgctcctggattaaagggtgaaaatggtcttccaggcgaaaatggagctcctggacccatgggtccaagaggggctcctggtgagcgaggacggccaggacttcctggggctgcaggtgctcggggtaatgacggtgctcgaggcagtgatggtcaaccaggccctcctggtcctcctggaactgccggattccctggatcccctggtgctaagggtgaagttggacctgcagggtctcctggttcaaatggtgcccctggacaaagaggagaacctggacctcagggacacgctggtgctcaaggtcctcctggccctcctgggattaatggtagtcctggtggtaaaggcgaaatgggtcccgctggcattcctggagctcctggactgatgggagcccggggtcctccaggaccagccggtgctaatggtgctcctggactgcgaggtggtgcaggtgagcctggtaagaatggtgccaaaggagagcccggaccacgtggtgaacgcggtgaggctggtattccaggtgttccaggagctaaaggcgaagatggcaaggatggatcacctggagaacctggtgcaaatgggcttccaggagctgcaggagaaaggggtgcccctgggttccgaggacctgctggaccaaatggcatcccaggagaaaagggtcctgctggagagcgtggtgctccaggccctgcagggcccagaggagctgctggagaacctggcagagatggcgtccctggaggtccaggaatgaggggcatgcccggaagtccaggaggaccaggaagtgatgggaaaccagggcctcccggaagtcaaggagaaagtggtcgaccaggtcctcctgggccatctggtccccgaggtcagcctggtgtcatgggcttccccggtcctaaaggaaatgatggtgctcctggtaagaatggagaacgaggtggccctggaggacctggccctcagggtcctcctggaaagaatggtgaaactggacctcaaggacccccagggcctactgggcctggtggtgacaaaggagacacaggaccccctggtccacaaggattacaaggcttgcctggtacaggtggtcctccaggagaaaatggaaaacctggggaaccaggtccaaagggtgatgccggtgcacctggagctccaggaggcaagggtgatgctggtgcccctggtgaacgtggacctcctggattggcaggggccccaggacttagaggtggagctggtccccctggtcccgaaggaggaaagggtgctgctggtcctcctgggccacctggtgctgctggtactcctggtctgcaaggaatgcctggagaaagaggaggtcttggaagtcctggtccaaagggtgacaagggtgaaccaggcggtccaggtgctgatggtgtcccagggaaagatggcccaaggggtcctactggtcctattggtcctcctggcccagctggccagcctggagataagggtgaaggtggtgcccccggacttccaggtatagctggacctcgtggtagccctggtgagagaggtgaaactggccctccaggacctgctggtttccctggtgctcctggacagaatggtgaacctggtggtaaaggagaaagaggggctccgggtgagaaaggtgaaggaggccctcctggagttgcaggaccccctggaggttctggacctgctggtcctcctggtccccaaggtgtcaaaggtgaacgtggcagtcctggtggacctggtgctgctggcttccctggtgctcgtggtcttcctggtcctcctggtagtaatggtaacccaggacccccaggtcccagcggttctccaggcaaggatgggcccccaggtcctgcgggtaacactggtgctcctggcagccctggagtgtctggaccaaaaggtgatgctggccaaccaggagagaagggatcgcctggtgcccagggcccaccaggagctccaggcccacttgggattgctgggatcactggagcacggggtcttgcaggaccaccaggcatgccaggtcctaggggaagccctggccctcagggtgtcaagggtgaaagtgggaaaccaggagctaacggtctcagtggagaacgtggtccccctggaccccagggtcttcctggtctggctggtacagctggtgaacctggaagagatggaaaccctggatcagatggtcttccaggccgagatggatctcctggtggcaagggtgatcgtggtgaaaatggctctcctggtgcccctggcgctcctggtcatccaggcccacctggtcctgtcggtccagctggaaagagtggtgacagaggagaaagtggccctgctggccctgctggtgctcccggtcctgctggttcccgaggtgctcctggtcctcaaggcccacgtggtgacaaaggtgaaacaggtgaacgtggagctgctggcatcaaaggacatcgaggattccctggtaatccaggtgccccaggttctccaggccctgctggtcagcagggtgcaatcggcagtccaggacctgcaggccccagaggacctgttggacccagtggacctcctggcaaagatggaaccagtggacatccaggtcccattggaccaccagggcctcgaggtaacagaggtgaaagaggatctgagggctccccaggccacccagggcaaccaggccctcctggacctcctggtgcccctggtccttgctgtggtggtgttggagccgctgccattgctgggattggaggtgaaaaagctggcggttttgccccgtattatggagatgaaccaatggatttcaaaatcaacaccgatgagattatgacttcactcaagtctgttaatggacaaatagaaagcctcattagtcctgatggttctcgtaaaaaccccgctagaaactgcagagacctgaaattctgccatcctgaactcaagagtggagaatactgggttgaccctaaccaaggatgcaaattggatgctatcaaggtattctgtaatatggaaactggggaaacatgcataagtgccaatcctttgaatgttccacggaaacactggtggacagattctagtgctgagaagaaacacgtttggtttggagagtccatggatggtggttttcaggtaggaaaggatatacctttttttaaataagtcacctctatatcctttgtattcttcctatatgttcatcacaaagcaaagttactaggttggtacaaacataattgcagtttttgctactgaaagtgatggcatgcaataaaaatattttcacacataaaatactcgtacataaaatatataaacagcccatattacaatatgcatacacatactacatgaatccctcgcgtgcagttacaactgaaatgtttgatctgttttatttgttccctattacagtttagctacggcaatcctgaacttcctgaagatgtccttgatgtgcagctggcattccttcgacttctctccagccgagcttcccagaacatcacatatcactgcaaaaatagcattgcatacatggatcaggccagtggaaatgtaaagaaggccctgaagctgatggggtcaaatgaaggtgaattcaaggctgaaggaaatagcaaattcacctacacagttctggaggatggttgcacgaaacacactggggaatggagcaaaacagtctttgaatatcgaacacgcaaggctgtgagactacctattgtagatattgcaccctatgacattggtggtcctgatcaagaatttggtgtggacgttggccctgtttgctttttataaaccaaactctatctgaaatcccaacaaaaaaaatttaactccatatgtgttcctcttgttctaatcttgtcaaccagtgcaagtgaccgacaaaattccagttatttatttccaaaatgtttggaaacagtataatttgacaaagaaaaatgatacttctctttttttgctgttccaccaaatacaattcaaatgctttttgttttatttttttaccaattccaatttcaaaatgtctcaatggtgctataataaataaacttcaacactctttatgataacaa

SEQ ID NO: 58775 - DNA, 5700 bp, Homo sapiens
accccagaaaactacgatagcccttatgaaacttaagggtcgaaggtggatttagcagtaaactaagagtagagtgcttagttgaacagggccctgaagcgcgtacacaccgcccgtcaccctcctcaagtatacttcaaaggacatttaactaaaacccctacgcatttatatagaggagacaagtcgtaacatggtaagtgtactggaaagtgcacttggacgaactggctgagttttatgacgggcccggtgctgaagggcagggaacaacttgatggtgctactttgaactgcttttcttttctcctttttgcacaaagagtctcatgtctgatatttagacatgatgagctttgtgcaaaaggggagctggctacttctcgctctgcttcatcccactattattttggcacaacaggaagctgttgaaggaggatgttcccatcttggtcagtcctatgcggatagagatgtctggaagccagaaccatgccaaatatgtgtctgtgactcaggatccgttctctgcgatgacataatatgtgacgatcaagaattagactgccccaacccagaaattccatttggagaatgttgtgcagtttgcccacagcctccaactgctcctactcgccctcctaatggtcaaggacctcaaggccccaagggagatccaggccctcctggtattcctgggagaaatggtgaccctggtattccaggacaaccagggtcccctggttctcctggcccccctggaatctgtgaatcatgccctactggtcctcagaactattctccccagtatgattcatatgatgtcaagtctggagtagcagtaggaggactcgcaggctatcctggaccagctggccccccaggccctcccggtccccctggtacatctggtcatcctggttcccctggatctccaggataccaaggaccccctggtgaacctgggcaagctggtccttcaggccctccaggacctcctggtgctataggtccatctggtcctgctggaaaagatggagaatcaggtagacccggacgacctggagagcgaggattgcctggacctccaggtatcaaaggtccagctgggatacctggattccctggtatgaaaggacacagaggcttcgatggacgaaatggagaaaagggtgaaacaggtgctcctggattaaagggtgaaaatggtcttccaggcgaaaatggagctcctggacccatgggtccaagaggggctcctggtgagcgaggacggccaggacttcctggggctgcaggtgctcggggtaatgacggtgctcgaggcagtgatggtcaaccaggccctcctggtcctcctggaactgccggattccctggatcccctggtgctaagggtgaagttggacctgcagggtctcctggttcaaatggtgcccctggacaaagaggagaacctggacctcagggacacgctggtgctcaaggtcctcctggccctcctgggattaatggtagtcctggtggtaaaggcgaaatgggtcccgctggcattcctggagctcctggactgatgggagcccggggtcctccaggaccagccggtgctaatggtgctcctggactgcgaggtggtgcaggtgagcctggtaagaatggtgccaaaggagagcccggaccacgtggtgaacgcggtgaggctggtattccaggtgttccaggagctaaaggcgaagatggcaaggatggatcacctggagaacctggtgcaaatgggcttccaggagctgcaggagaaaggggtgcccctgggttccgaggacctgctggaccaaatggcatcccaggagaaaagggtcctgctggagagcgtggtgctccaggccctgcagggcccagaggagctgctggagaacctggcagagatggcgtccctggaggtccaggaatgaggggcatgcccggaagtccaggaggaccaggaagtgatgggaaaccagggcctcccggaagtcaaggagaaagtggtcgaccaggtcctcctgggccatctggtccccgaggtcagcctggtgtcatgggcttccccggtcctaaaggaaatgatggtgctcctggtaagaatggagaacgaggtggccctggaggacctggccctcagggtcctcctggaaagaatggtgaaactggacctcaaggacccccagggcctactgggcctggtggtgacaaaggagacacaggaccccctggtccacaaggattacaaggcttgcctggtacaggtggtcctccaggagaaaatggaaaacctggggaaccaggtccaaagggtgatgccggtgcacctggagctccaggaggcaagggtgatgctggtgcccctggtgaacgtggacctcctggattggcaggggccccaggacttagaggtggagctggtccccctggtcccgaaggaggaaagggtgctgctggtcctcctgggccacctggtgctgctggtactcctggtctgcaaggaatgcctggagaaagaggaggtcttggaagtcctggtccaaagggtgacaagggtgaaccaggcggtccaggtgctgatggtgtcccagggaaagatggcccaaggggtcctactggtcctattggtcctcctggcccagctggccagcctggagataagggtgaaggtggtgcccccggacttccaggtatagctggacctcgtggtagccctggtgagagaggtgaaactggccctccaggacctgctggtttccctggtgctcctggacagaatggtgaacctggtggtaaaggagaaagaggggctccgggtgagaaaggtgaaggaggccctcctggagttgcaggaccccctggaggttctggacctgctggtcctcctggtccccaaggtgtcaaaggtgaacgtggcagtcctggtggacctggtgctgctggcttccctggtgctcgtggtcttcctggtcctcctggtagtaatggtaacccaggacccccaggtcccagcggttctccaggcaaggatgggcccccaggtcctgcgggtaacactggtgctcctggcagccctggagtgtctggaccaaaaggtgatgctggccaaccaggagagaagggatcgcctggtgcccagggcccaccaggagctccaggcccacttgggattgctgggatcactggagcacggggtcttgcaggaccaccaggcatgccaggtcctaggggaagccctggccctcagggtgtcaagggtgaaagtgggaaaccaggagctaacggtctcagtggagaacgtggtccccctggaccccagggtcttcctggtctggctggtacagctggtgaacctggaagagatggaaaccctggatcagatggtcttccaggccgagatggatctcctggtggcaagggtgatcgtggtgaaaatggctctcctggtgcccctggcgctcctggtcatccaggcccacctggtcctgtcggtccagctggaaagagtggtgacagaggagaaagtggccctgctggccctgctggtgctcccggtcctgctggttcccgaggtgctcctggtcctcaaggcccacgtggtgacaaaggtgaaacaggtgaacgtggagctgctggcatcaaaggacatcgaggattccctggtaatccaggtgccccaggttctccaggccctgctggtcagcagggtgcaatcggcagtccaggacctgcaggccccagaggacctgttggacccagtggacctcctggcaaagatggaaccagtggacatccaggtcccattggaccaccagggcctcgaggtaacagaggtgaaagaggatctgagggctccccaggccacccagggcaaccaggccctcctggacctcctggtgcccctggtccttgctgtggtggtgttggagccgctgccattgctgggattggaggtgaaaaagctggcggttttgccccgtattatggagatgaaccaatggatttcaaaatcaacaccgatgagattatgacttcactcaagtctgttaatggacaaatagaaagcctcattagtcctgatggttctcgtaaaaaccccgctagaaactgcagagacctgaaattctgccatcctgaactcaagagtggagaatactgggttgaccctaaccaaggatgcaaattggatgctatcaaggtattctgtaatatggaaactggggaaacatgcataagtgccaatcctttgaatgttccacggaaacactggtggacagattctagtgctgagaagaaacacgtttggtttggagagtccatggatggtggttttcagtttagctacggcaatcctgaacttcctgaagatgtccttgatgtgcagctggcattccttcgacttctctccagccgagcttcccagaacatcacatatcactgcaaaaatagcattgcatacatggatcaggccagtggaaatgtaaagaaggccctgaagctgatggggtcaaatgaaggtgaattcaaggctgaaggaaatagcaaattcacctacacagttctggaggatggttgcacgaaacacactggggaatggagcaaaacagtctttgaatatcgaacacgcaaggctgtgagactacctattgtagatattgcaccctatgacattggtggtcctgatcaagaatttggtgtggacgttggccctgtttgctttttataaaccaaactctatctgaaatcccaacaaaaaaaatttaactccatatgtgttcctcttgttctaatcttgtcaaccagtgcaagtgaccgacaaaattccagttatttatttccaaaatgtttggaaacagtataatttgacaaagaaaaatgatacttctctttttttgctgttccaccaaatacaattcaaatgctttttgttttatttttttaccaattccaatttcaaaatgtctcaatggtgctagagaaccccacggttataaaaacccgctaaaatccggaaacccgggccccggaggggaaaggatgtgctcaccagtaaaagataacctttctttctgaaatagtcaaatacgaaattagaaaagccctccctattttaactacctcaactggtcagaaacacagattgtattctatgagtcccagaagatgaaaaaaattttatacgttgataaaacttataaatttcattgattaatctcctggaagattggtttaaaaagaaaagtgtaatgcaagaatttaaagaaatatttttaaagccacaattattttaatattggatatcaactgcttgtaaaggtgctcctcttttttcttgtcattgctggtcaagattactaatatttgggaaggctttaaagacgcatgttatggtgctaatgtactttcacttttaaactctagatcagaattgttgacttgcattcagaacataaatgcacaaaatctgtacatgtctcccatcagaaagattcattggcatgccacaggggattctcctccttcatcctgtaaaggtcaacaataaaaaccaaattatggggctgcttttgtcacactagcatagagaatgtgttgaaatttaactttgtaagcttgtatgtggttgttgatcttttttttccttacagacacccataataaaatatcatattaaaattc

SEQ ID NO: 58776 - DNA, 6151 bp, Homo sapiens
  misc_feature (5741)..(5741): n is a, c, g, or t
accccagaaaactacgatagcccttatgaaacttaagggtcgaaggtggatttagcagtaaactaagagtagagtgcttagttgaacagggccctgaagcgcgtacacaccgcccgtcaccctcctcaagtatacttcaaaggacatttaactaaaacccctacgcatttatatagaggagacaagtcgtaacatggtaagtgtactggaaagtgcacttggacgaactggctgagttttatgacgggcccggtgctgaagggcagggaacaacttgatggtgctactttgaactgcttttcttttctcctttttgcacaaagagtctcatgtctgatatttagacatgatgagctttgtgcaaaaggggagctggctacttctcgctctgcttcatcccactattattttggcacaacaggaagctgttgaaggaggatgttcccatcttggtcagtcctatgcggatagagatgtctggaagccagaaccatgccaaatatgtgtctgtgactcaggatccgttctctgcgatgacataatatgtgacgatcaagaattagactgccccaacccagaaattccatttggagaatgttgtgcagtttgcccacagcctccaactgctcctactcgccctcctaatggtcaaggacctcaaggccccaagggagatccaggccctcctggtattcctgggagaaatggtgaccctggtattccaggacaaccagggtcccctggttctcctggcccccctggaatctgtgaatcatgccctactggtcctcagaactattctccccagtatgattcatatgatgtcaagtctggagtagcagtaggaggactcgcaggctatcctggaccagctggccccccaggccctcccggtccccctggtacatctggtcatcctggttcccctggatctccaggataccaaggaccccctggtgaacctgggcaagctggtccttcaggccctccaggacctcctggtgctataggtccatctggtcctgctggaaaagatggagaatcaggtagacccggacgacctggagagcgaggattgcctggacctccaggtatcaaaggtccagctgggatacctggattccctggtatgaaaggacacagaggcttcgatggacgaaatggagaaaagggtgaaacaggtgctcctggattaaagggtgaaaatggtcttccaggcgaaaatggagctcctggacccatgggtccaagaggggctcctggtgagcgaggacggccaggacttcctggggctgcaggtgctcggggtaatgacggtgctcgaggcagtgatggtcaaccaggccctcctggtcctcctggaactgccggattccctggatcccctggtgctaagggtgaagttggacctgcagggtctcctggttcaaatggtgcccctggacaaagaggagaacctggacctcagggacacgctggtgctcaaggtcctcctggccctcctgggattaatggtagtcctggtggtaaaggcgaaatgggtcccgctggcattcctggagctcctggactgatgggagcccggggtcctccaggaccagccggtgctaatggtgctcctggactgcgaggtggtgcaggtgagcctggtaagaatggtgccaaaggagagcccggaccacgtggtgaacgcggtgaggctggtattccaggtgttccaggagctaaaggcgaagatggcaaggatggatcacctggagaacctggtgcaaatgggcttccaggagctgcaggagaaaggggtgcccctgggttccgaggacctgctggaccaaatggcatcccaggagaaaagggtcctgctggagagcgtggtgctccaggccctgcagggcccagaggagctgctggagaacctggcagagatggcgtccctggaggtccaggaatgaggggcatgcccggaagtccaggaggaccaggaagtgatgggaaaccagggcctcccggaagtcaaggagaaagtggtcgaccaggtcctcctgggccatctggtccccgaggtcagcctggtgtcatgggcttccccggtcctaaaggaaatgatggtgctcctggtaagaatggagaacgaggtggccctggaggacctggccctcagggtcctcctggaaagaatggtgaaactggacctcaaggacccccagggcctactgggcctggtggtgacaaaggagacacaggaccccctggtccacaaggattacaaggcttgcctggtacaggtggtcctccaggagaaaatggaaaacctggggaaccaggtccaaagggtgatgccggtgcacctggagctccaggaggcaagggtgatgctggtgcccctggtgaacgtggacctcctggattggcaggggccccaggacttagaggtggagctggtccccctggtcccgaaggaggaaagggtgctgctggtcctcctgggccacctggtgctgctggtactcctggtctgcaaggaatgcctggagaaagaggaggtcttggaagtcctggtccaaagggtgacaagggtgaaccaggcggtccaggtgctgatggtgtcccagggaaagatggcccaaggggtcctactggtcctattggtcctcctggcccagctggccagcctggagataagggtgaaggtggtgcccccggacttccaggtatagctggacctcgtggtagccctggtgagagaggtgaaactggccctccaggacctgctggtttccctggtgctcctggacagaatggtgaacctggtggtaaaggagaaagaggggctccgggtgagaaaggtgaaggaggccctcctggagttgcaggaccccctggaggttctggacctgctggtcctcctggtccccaaggtgtcaaaggtgaacgtggcagtcctggtggacctggtgctgctggcttccctggtgctcgtggtcttcctggtcctcctggtagtaatggtaacccaggacccccaggtcccagcggttctccaggcaaggatgggcccccaggtcctgcgggtaacactggtgctcctggcagccctggagtgtctggaccaaaaggtgatgctggccaaccaggagagaagggatcgcctggtgcccagggcccaccaggagctccaggcccacttgggattgctgggatcactggagcacggggtcttgcaggaccaccaggcatgccaggtcctaggggaagccctggccctcagggtgtcaagggtgaaagtgggaaaccaggagctaacggtctcagtggagaacgtggtccccctggaccccagggtcttcctggtctggctggtacagctggtgaacctggaagagatggaaaccctggatcagatggtcttccaggccgagatggatctcctggtggcaagggtgatcgtggtgaaaatggctctcctggtgcccctggcgctcctggtcatccaggcccacctggtcctgtcggtccagctggaaagagtggtgacagaggagaaagtggccctgctggccctgctggtgctcccggtcctgctggttcccgaggtgctcctggtcctcaaggcccacgtggtgacaaaggtgaaacaggtgaacgtggagctgctggcatcaaaggacatcgaggattccctggtaatccaggtgccccaggttctccaggccctgctggtcagcagggtgcaatcggcagtccaggacctgcaggccccagaggacctgttggacccagtggacctcctggcaaagatggaaccagtggacatccaggtcccattggaccaccagggcctcgaggtaacagaggtgaaagaggatctgagggctccccaggccacccagggcaaccaggccctcctggacctcctggtgcccctggtccttgctgtggtggtgttggagccgctgccattgctgggattggaggtgaaaaagctggcggttttgccccgtattatggagatgaaccaatggatttcaaaatcaacaccgatgagattatgacttcactcaagtctgttaatggacaaatagaaagcctcattagtcctgatggttctcgtaaaaaccccgctagaaactgcagagacctgaaattctgccatcctgaactcaagagtggagaatactgggttgaccctaaccaaggatgcaaattggatgctatcaaggtattctgtaatatggaaactggggaaacatgcataagtgccaatcctttgaatgttccacggaaacactggtggacagattctagtgctgagaagaaacacgtttggtttggagagtccatggatggtggttttcagtttagctacggcaatcctgaacttcctgaagatgtccttgatgtgcagctggcattccttcgacttctctccagccgagcttcccagaacatcacatatcactgcaaaaatagcattgcatacatggatcaggccagtggaaatgtaaagaaggccctgaagctgatggggtcaaatgaaggtgaattcaaggctgaaggaaatagcaaattcacctacacagttctggaggatggttgcacgaaacacactggggaatggagcaaaacagtctttgaatatcgaacacgcaaggctgtgagactacctattgtagatattgcaccctatgacattggtggtcctgatcaagaatttggtgtggacgttggccctgtttgctttttataaaccaaactctatctgaaatcccaacaaaaaaaatttaactccatatgtgttcctcttgttctaatcttgtcaaccagtgcaagtgaccgacaaaattccagttatttatttccaaaatgtttggaaacagtataatttgacaaagaaaaatgatacttctctttttttgctgttccaccaaatacaattcaaatgctttttgttttatttttttaccaattccaatttcaaaatgtctcaatggtgctataataaataaacttcaacactctttatgataacaacactgtgttatattctttgaatcctagcccatctgcagagcaatgactgtgctcaccagtaaaagataacctttctttctgaaatagtcaaatacgaaattagaaaagccctccctattttaactacctcaactggtcagaaacacagattgtattctatgagtcccagaagatgaaaaaaattttatacgttgataaaacttataaatttcattgattaatctcctggaagattggtttaaaaagaaaagtgtaatgcaagaatttaaagaaatatttttaaagccacaattattttaatattggatatcaactgcttgtaaaggtgctcctcttttttcttgtcattgctggtcaagattactaatatttgggaaggctttaaagacgcatgttatggtgctaatgtactttcacttttaaactctagatcagaattgttgacttgcattcagaacataaatgcacaaaatctgtacatgtctcccatcagaaagattcattggcatgccacaggggattctcctccttcatcctgtaaaggtcaacaataaaaaccaaattatggggctgcttttgtcacactagcatagagaatgtgttgaaatttaactttgtaagcttgtatgtggttgttgatcttttttttccttacagacacccataataaaatatcatattaaaattcaaaaaaaaaaaaaaaaaaaaanaaaaaaaaaaaaaaaaataaaaaaaaaaaaaaaaaaaaagaaaaaaaaacaacaacaaaaaaaaaaaggggggggcgcccacaaaaaatccccccggggggcgccccttaaaggtccccccctttttttttacaaaaaggggccccccataaggaggtctcaatcaaacatgagccgcaccgggggcccgtgatataaacaccaccgcgagaaggcggaaacactcgctgcacgtgggcgacttaggagaagaagcgcccacatctagggggggggcacacaacaaggggcaaaaacaccacgaagaaatatactacggccatcaggcgaagagcataaaacggcaggtgtataggtgcgcaccggcttccaagtactgcccgacaaaaagctgcgcccacgggcgacga

SEQ ID NO: 58777 - DNA, 765 bp, Homo sapiens
tcggtatgaacagggaacacgttgtagcagcgaacgagtgcagcgaagaaacacgtttggcttgggagagtccatggaatggtggtctcagtttagctacggcaatcctgaacttcctgaagatgtccttgatgtgcagctggcattccttcgacttctctccagccgagcttcccagaacatcacatatcactgcaaaaatagcattgcatacatggatcaggccagtggaaatgtaaagaaggccctgaagctgatggggtcaaatgaaggtgaattcaaggctgaaggaaatagcaaattcacctacacagttctggaggatggttgcacgaaacacactggggaatggagcaaaacagtctttgaatatcgaacacgcaaggctgtgagactacctattgtagatattgcaccctatgacattggtggtcctgatcaagaatttggtgtggacgttggccctgtttgctttttataaaccaaactctatctgaaatcccaacaaaaaaaatttaactccatatgtgttcctcttgttctaatcttgtcaaccagtgcaagtgaccgacaaaattccagttatttatttccaaaatgtttggaaacagtataatttgacaaagaaaaatgatacttctctttttttgctgttccaccaaatacaattcaaatgctttttgttttatttttttaccaattccaatttcaaaatgtctcaatggtgctataataaataaacttcaacactctttatgataacaa

SEQ ID NO: 58778 - DNA, 725 bp, Homo sapiens
gagctcggtacccttaggataccccattatgtgatggatggtgcttttcagtttagctacggcaatcctgaacttcctgaagatgtccttgatgtgcagctggcattccttcgacttctctccagccgagcttcccagaacatcacatatcactgcaaaaatagcattgcatacatggatcaggccagtggaaatgtaaagaaggccctgaagctgatggggtcaaatgaaggtgaattcaaggctgaaggaaatagcaaattcacctacacagttctggaggatggttgcacgaaacacactggggaatggagcaaaacagtctttgaatatcgaacacgcaaggctgtgagactacctattgtagatattgcaccctatgacattggtggtcctgatcaagaatttggtgtggacgttggccctgtttgctttttataaaccaaactctatctgaaatcccaacaaaaaaaatttaactccatatgtgttcctcttgttctaatcttgtcaaccagtgcaagtgaccgacaaaattccagttatttatttccaaaatgtttggaaacagtataatttgacaaagaaaaatgatacttctctttttttgctgttccaccaaatacaattcaaatgctttttgttttatttttttaccaattccaatttcaaaatgtctcaatggtgctataataaataaacttcaacactctttatgataacaa

SEQ ID NO: 58779 - DNA, 6457 bp, Homo sapiens
accccagaaaactacgatagcccttatgaaacttaagggtcgaaggtggatttagcagtaaactaagagtagagtgcttagttgaacagggccctgaagcgcgtacacaccgcccgtcaccctcctcaagtatacttcaaaggacatttaactaaaacccctacgcatttatatagaggagacaagtcgtaacatggtaagtgtactggaaagtgcacttggacgaactggctgagttttatgacgggcccggtgctgaagggcagggaacaacttgatggtgctactttgaactgcttttcttttctcctttttgcacaaagagtctcatgtctgatatttagacatgatgagctttgtgcaaaaggggagctggctacttctcgctctgcttcatcccactattattttggcacaacaggaagctgttgaaggaggatgttcccatcttggtcagtcctatgcggatagagatgtctggaagccagaaccatgccaaatatgtgtctgtgactcaggatccgttctctgcgatgacataatatgtgacgatcaagaattagactgccccaacccagaaattccatttggagaatgttgtgcagtttgcccacagcctccaactgctcctactcgccctcctaatggtcaaggacctcaaggccccaagggagatccaggccctcctggtattcctgggagaaatggtgaccctggtattccaggacaaccagggtcccctggttctcctggcccccctggaatctgtgaatcatgccctactggtcctcagaactattctccccagtatgattcatatgatgtcaagtctggagtagcagtaggaggactcgcaggctatcctggaccagctggccccccaggccctcccggtccccctggtacatctggtcatcctggttcccctggatctccaggataccaaggaccccctggtgaacctgggcaagctggtccttcaggccctccaggacctcctggtgctataggtccatctggtcctgctggaaaagatggagaatcaggtagacccggacgacctggagagcgaggattgcctggacctccaggtatcaaaggtccagctgggatacctggattccctggtatgaaaggacacagaggcttcgatggacgaaatggagaaaagggtgaaacaggtgctcctggattaaagggtgaaaatggtcttccaggcgaaaatggagctcctggacccatgggtccaagaggggctcctggtgagcgaggacggccaggacttcctggggctgcaggtgctcggggtaatgacggtgctcgaggcagtgatggtcaaccaggccctcctggtcctcctggaactgccggattccctggatcccctggtgctaagggtgaagttggacctgcagggtctcctggttcaaatggtgcccctggacaaagaggagaacctggacctcagggacacgctggtgctcaaggtcctcctggccctcctgggattaatggtagtcctggtggtaaaggcgaaatgggtcccgctggcattcctggagctcctggactgatgggagcccggggtcctccaggaccagccggtgctaatggtgctcctggactgcgaggtggtgcaggtgagcctggtaagaatggtgccaaaggagagcccggaccacgtggtgaacgcggtgaggctggtattccaggtgttccaggagctaaaggcgaagatggcaaggatggatcacctggagaacctggtgcaaatgggcttccaggagctgcaggagaaaggggtgcccctgggttccgaggacctgctggaccaaatggcatcccaggagaaaagggtcctgctggagagcgtggtgctccaggccctgcagggcccagaggagctgctggagaacctggcagagatggcgtccctggaggtccaggaatgaggggcatgcccggaagtccaggaggaccaggaagtgatgggaaaccagggcctcccggaagtcaaggagaaagtggtcgaccaggtcctcctgggccatctggtccccgaggtcagcctggtgtcatgggcttccccggtcctaaaggaaatgatggtgctcctggtaagaatggagaacgaggtggccctggaggacctggccctcagggtcctcctggaaagaatggtgaaactggacctcaaggacccccagggcctactgggcctggtggtgacaaaggagacacaggaccccctggtccacaaggattacaaggcttgcctggtacaggtggtcctccaggagaaaatggaaaacctggggaaccaggtccaaagggtgatgccggtgcacctggagctccaggaggcaagggtgatgctggtgcccctggtgaacgtggacctcctggattggcaggggccccaggacttagaggtggagctggtccccctggtcccgaaggaggaaagggtgctgctggtcctcctgggccacctggtgctgctggtactcctggtctgcaaggaatgcctggagaaagaggaggtcttggaagtcctggtccaaagggtgacaagggtgaaccaggcggtccaggtgctgatggtgtcccagggaaagatggcccaaggggtcctactggtcctattggtcctcctggcccagctggccagcctggagataagggtgaaggtggtgcccccggacttccaggtatagctggacctcgtggtagccctggtgagagaggtgaaactggccctccaggacctgctggtttccctggtgctcctggacagaatggtgaacctggtggtaaaggagaaagaggggctccgggtgagaaaggtgaaggaggccctcctggagttgcaggaccccctggaggttctggacctgctggtcctcctggtccccaaggtgtcaaaggtgaacgtggcagtcctggtggacctggtgctgctggcttccctggtgctcgtggtcttcctggtcctcctggtagtaatggtaacccaggacccccaggtcccagcggttctccaggcaaggatgggcccccaggtcctgcgggtaacactggtgctcctggcagccctggagtgtctggaccaaaaggtgatgctggccaaccaggagagaagggatcgcctggtgcccagggcccaccaggagctccaggcccacttgggattgctgggatcactggagcacggggtcttgcaggaccaccaggcatgccaggtcctaggggaagccctggccctcagggtgtcaagggtgaaagtgggaaaccaggagctaacggtctcagtggagaacgtggtccccctggaccccagggtcttcctggtctggctggtacagctggtgaacctggaagagatggaaaccctggatcagatggtcttccaggccgagatggatctcctggtggcaagggtgatcgtggtgaaaatggctctcctggtgcccctggcgctcctggtcatccaggcccacctggtcctgtcggtccagctggaaagagtggtgacagaggagaaagtggccctgctggccctgctggtgctcccggtcctgctggttcccgaggtgctcctggtcctcaaggcccacgtggtgacaaaggtgaaacaggtgaacgtggagctgctggcatcaaaggacatcgaggattccctggtaatccaggtgccccaggttctccaggccctgctggtcagcagggtgcaatcggcagtccaggacctgcaggccccagaggacctgttggacccagtggacctcctggcaaagatggaaccagtggacatccaggtcccattggaccaccagggcctcgaggtaacagaggtgaaagaggatctgagggctccccaggccacccagggcaaccaggccctcctggacctcctggtgcccctggtccttgctgtggtggtgttggagccgctgccattgctgggattggaggtgaaaaagctggcggttttgccccgtattatggagatgaaccaatggatttcaaaatcaacaccgatgagattatgacttcactcaagtctgttaatggacaaatagaaagcctcattagtcctgatggttctcgtaaaaaccccgctagaaactgcagagacctgaaattctgccatcctgaactcaagagtggagaatactgggttgaccctaaccaaggatgcaaattggatgctatcaaggtattctgtaatatggaaactggggaaacatgcataagtgccaatcctttgaatgttccacggaaacactggtggacagattctagtgctgagaagaaacacgtttggtttggagagtccatggatggtggttttcagtttagctacggcaatcctgaacttcctgaagatgtccttgatgtgcagctggcattccttcgacttctctccagccgagcttcccagaacatcacatatcactgcaaaaatagcattgcatacatggatcaggccagtggaaatgtaaagaaggccctgaagctgatggggtcaaatgaaggtgaattcaaggctgaaggaaatagcaaattcacctacacagttctggaggatggttgcacgggtaggaaacatttttctcaatataggtcataaagcagtcagcattttagtttaatcatgcaaattattttgaatagaataaataaaattaataggatgaaataaagatagcatttggtatgaattacatacattgcatctactgattcattgcagggaatgttaaatgcaacaaaatggatcttagcctccagatgaaaaccagttgaaataaaagcatttaaaatttaaatccataatgcaaactttatcagataattgggatagttactatatgttttgaataatacctgtcacattaactcagtttgaaatatctgttttttaaaattttaaaggttaacttcaaatctctcatttgttattgttatttgtgaacaaagggaaaactcacttctaatattagcgaatttcattgtgagagacctatcctctttttaataaaccatttataaacctgttagcaatggccggaaccaggcctcctgaggatgcactggtctatagcaattgccctgctgcatttactaagaatccttacaaggcatttgtttaagaatattgtttatcaactaagaagattacagctttgaagtagagcaggtctcatatacatgaataataacatggcacgatgaatgcttctttagagtaaaaaggttttctttaacttgttaagtcagagttgtctaagtaattgtaatgtcatgatcatgtacattttgtccttttttacagaaacacactggggaatggagcaaaacagtctttgaatatcgaacacgcaaggctgtgagactacctattgtagatattgcaccctatgacattggtggtcctgatcaagaatttggtgtggacgttggccctgtttgctttttataaaccaaactctatctgaaatcccaacaaaaaaaatttaactccatatgtgttcctcttgttctaatcttgtcaaccagtgcaagtgaccgacaaaattccagttatttatttccaaaatgtttggaaacagtataatttgacaaagaaaaatgatacttctctttttttgctgttccaccaaatacaattcaaatgctttttgttttatttttttaccaattccaatttcaaaatgtctcaatggtgctataataaataaacttcaacactctttatgataacaacactgtgttatattctttgaatcctagcccatctgcagagcaatgactgtgctcaccagtaaaagataacctttctttctgaaatagtcaaatacgaaattagaaaagccctccctattttaactacctcaactggtcagaaacacagattgtattctatgagtcccagaagatgaaaaaaattttatacgttgataaaacttataaatttcattgattaatctcctggaagattggtttaaaaagaaaagtgtaatgcaagaatttaaagaaatatttttaaagccacaattattttaatattggatatcaactgcttgtaaaggtgctcctcttttttcttgtcattgctggtcaagattactaatatttgggaaggctttaaagacgcatgttatggtgctaatgtactttcacttttaaactctagatcagaattgttgacttgcattcagaacataaatgcacaaaatctgtacatgtctcccatcagaaagattcattggcatgccacaggggattctcctccttcatcctgtaaaggtcaacaataaaaaccaaattatggggctgcttttgtcacactagcatagagaatgtgttgaaatttaactttgtaagcttgtatgtggttgttgatcttttttttccttacagacacccataataaaatatcatattaaaattc

SEQ ID NO: 58780 - DNA, 5361 bp, Homo sapiens
accccagaaaactacgatagcccttatgaaacttaagggtcgaaggtggatttagcagtaaactaagagtagagtgcttagttgaacagggccctgaagcgcgtacacaccgcccgtcaccctcctcaagtatacttcaaaggacatttaactaaaacccctacgcatttatatagaggagacaagtcgtaacatggtaagtgtactggaaagtgcacttggacgaactggctgagttttatgacgggcccggtgctgaagggcagggaacaacttgatggtgctactttgaactgcttttcttttctcctttttgcacaaagagtctcatgtctgatatttagacatgatgagctttgtgcaaaaggggagctggctacttctcgctctgcttcatcccactattattttggcacaacaggaagctgttgaaggaggatgttcccatcttggtcagtcctatgcggatagagatgtctggaagccagaaccatgccaaatatgtgtctgtgactcaggatccgttctctgcgatgacataatatgtgacgatcaagaattagactgccccaacccagaaattccatttggagaatgttgtgcagtttgcccacagcctccaactgctcctactcgccctcctaatggtcaaggacctcaaggccccaagggagatccaggccctcctggtattcctgggagaaatggtgaccctggtattccaggacaaccagggtcccctggttctcctggcccccctggaatctgtgaatcatgccctactggtcctcagaactattctccccagtatgattcatatgatgtcaagtctggagtagcagtaggaggactcgcaggctatcctggaccagctggccccccaggccctcccggtccccctggtacatctggtcatcctggttcccctggatctccaggataccaaggaccccctggtgaacctgggcaagctggtccttcaggccctccaggacctcctggtgctataggtccatctggtcctgctggaaaagatggagaatcaggtagacccggacgacctggagagcgaggattgcctggacctccaggtatcaaaggtccagctgggatacctggattccctggtatgaaaggacacagaggcttcgatggacgaaatggagaaaagggtgaaacaggtgctcctggattaaagggtgaaaatggtcttccaggcgaaaatggagctcctggacccatgggtccaagaggggctcctggtgagcgaggacggccaggacttcctggggctgcaggtgctcggggtaatgacggtgctcgaggcagtgatggtcaaccaggccctcctggtcctcctggaactgccggattccctggatcccctggtgctaagggtgaagttggacctgcagggtctcctggttcaaatggtgcccctggacaaagaggagaacctggacctcagggacacgctggtgctcaaggtcctcctggccctcctgggattaatggtagtcctggtggtaaaggcgaaatgggtcccgctggcattcctggagctcctggactgatgggagcccggggtcctccaggaccagccggtgctaatggtgctcctggactgcgaggtggtgcaggtgagcctggtaagaatggtgccaaaggagagcccggaccacgtggtgaacgcggtgaggctggtattccaggtgttccaggagctaaaggcgaagatggcaaggatggatcacctggagaacctggtgcaaatgggcttccaggagctgcaggagaaaggggtgcccctgggttccgaggacctgctggaccaaatggcatcccaggagaaaagggtcctgctggagagcgtggtgctccaggccctgcagggcccagaggagctgctggagaacctggcagagatggcgtccctggaggtccaggaatgaggggcatgcccggaagtccaggaggaccaggaagtgatgggaaaccagggcctcccggaagtcaaggagaaagtggtcgaccaggtcctcctgggccatctggtccccgaggtcagcctggtgtcatgggcttccccggtcctaaaggaaatgatggtgctcctggtaagaatggagaacgaggtggccctggaggacctggccctcagggtcctcctggaaagaatggtgaaactggacctcaaggacccccagggcctactgggcctggtggtgacaaaggagacacaggaccccctggtccacaaggattacaaggcttgcctggtacaggtggtcctccaggagaaaatggaaaacctggggaaccaggtccaaagggtgatgccggtgcacctggagctccaggaggcaagggtgatgctggtgcccctggtgaacgtggacctcctggattggcaggggccccaggacttagaggtggagctggtccccctggtcccgaaggaggaaagggtgctgctggtcctcctgggccacctggtgctgctggtactcctggtctgcaaggaatgcctggagaaagaggaggtcttggaagtcctggtccaaagggtgacaagggtgaaccaggcggtccaggtgctgatggtgtcccagggaaagatggcccaaggggtcctactggtcctattggtcctcctggcccagctggccagcctggagataagggtgaaggtggtgcccccggacttccaggtatagctggacctcgtggtagccctggtgagagaggtgaaactggccctccaggacctgctggtttccctggtgctcctggacagaatggtgaacctggtggtaaaggagaaagaggggctccgggtgagaaaggtgaaggaggccctcctggagttgcaggaccccctggaggttctggacctgctggtcctcctggtccccaaggtgtcaaaggtgaacgtggcagtcctggtggacctggtgctgctggcttccctggtgctcgtggtcttcctggtcctcctggtagtaatggtaacccaggacccccaggtcccagcggttctccaggcaaggatgggcccccaggtcctgcgggtaacactggtgctcctggcagccctggagtgtctggaccaaaaggtgatgctggccaaccaggagagaagggatcgcctggtgcccagggcccaccaggagctccaggcccacttgggattgctgggatcactggagcacggggtcttgcaggaccaccaggcatgccaggtcctaggggaagccctggccctcagggtgtcaagggtgaaagtgggaaaccaggagctaacggtctcagtggagaacgtggtccccctggaccccagggtcttcctggtctggctggtacagctggtgaacctggaagagatggaaaccctggatcagatggtcttccaggccgagatggatctcctggtggcaagggtgatcgtggtgaaaatggctctcctggtgcccctggcgctcctggtcatccaggcccacctggtcctgtcggtccagctggaaagagtggtgacagaggagaaagtggccctgctggccctgctggtgctcccggtcctgctggttcccgaggtgctcctggtcctcaaggcccacgtggtgacaaaggtgaaacaggtgaacgtggagctgctggcatcaaaggacatcgaggattccctggtaatccaggtgccccaggttctccaggccctgctggtcagcagggtgcaatcggcagtccaggacctgcaggccccagaggacctgttggacccagtggacctcctggcaaagatggaaccagtggacatccaggtcccattggaccaccagggcctcgaggtaacagaggtgaaagaggatctgagggctccccaggccacccagggcaaccaggccctcctggacctcctggtgcccctggtccttgctgtggtggtgttggagccgctgccattgctgggattggaggtgaaaaagctggcggttttgccccgtattatggagatgaaccaatggatttcaaaatcaacaccgatgagattatgacttcactcaagtctgttaatggacaaatagaaagcctcattagtcctgatggttctcgtaaaaaccccgctagaaactgcagagacctgaaattctgccatcctgaactcaagagtggagaatactgggttgaccctaaccaaggatgcaaattggatgctatcaaggtattctgtaatatggaaactggggaaacatgcataagtgccaatcctttgaatgttccacggaaacactggtggacagattctagtgctgagaagaaacacgtttggtttggagagtccatggatggtggttttcagtttagctacggcaatcctgaacttcctgaagatgtccttgatgtgcagctggcattccttcgacttctctccagccgagcttcccagaacatcacatatcactgcaaaaatagcattgcatacatggatcaggccagtggaaatgtaaagaaggccctgaagctgatggggtcaaatgaaggtgaattcaaggctgaaggaaatagcaaattcacctacacagttctggaggatggttgcacgaaacacactggggaatggagcaaaacagtctttgaatatcgaacacgcaaggctgtgagactacctattgtagatattgcaccctatgacattggtggtcctgatcaagaatttggtgtggacgttggccctgtttgctttttataaaccaaactctatctgaaatcccaacaaaaaaaatttaactccatatgtgttcctcttgttctaatcttgtcaaccagtgcaagtgaccgacaaaattccagttatttatttccaaaatgtttggaaacagtataatttgacaaagaaaaatgatacttctctttttttgctgttccaccaaatacaattcaaatgctttttgttttatttttttaccaattccaatttcaaaatgtctcaatggtgctataataaataaacttcaacactctttatgataacaacactgtgttatattctttgaatcctagcccatctgcagagcaatgactgtgctcaccagtaaaagataacctttctttctgaaatagtcaaatacgaaattagaaaagccctccctattttaactacctcaactggtcagaaacacagattgtattctatgagtcccagaagatgaaaaaaattttatacgttgataaaacttataaatttcattgattaatctcctggaagattggtttaaaaagaggagcacctttacaagcagctgatatccaatattaaaataattgtggcgtcgaccggttgttaatttagtagtagtaggccgc

SEQ ID NO: 58781 - DNA, 5638 bp, Homo sapiens
accccagaaaactacgatagcccttatgaaacttaagggtcgaaggtggatttagcagtaaactaagagtagagtgcttagttgaacagggccctgaagcgcgtacacaccgcccgtcaccctcctcaagtatacttcaaaggacatttaactaaaacccctacgcatttatatagaggagacaagtcgtaacatggtaagtgtactggaaagtgcacttggacgaactggctgagttttatgacgggcccggtgctgaagggcagggaacaacttgatggtgctactttgaactgcttttcttttctcctttttgcacaaagagtctcatgtctgatatttagacatgatgagctttgtgcaaaaggggagctggctacttctcgctctgcttcatcccactattattttggcacaacaggaagctgttgaaggaggatgttcccatcttggtcagtcctatgcggatagagatgtctggaagccagaaccatgccaaatatgtgtctgtgactcaggatccgttctctgcgatgacataatatgtgacgatcaagaattagactgccccaacccagaaattccatttggagaatgttgtgcagtttgcccacagcctccaactgctcctactcgccctcctaatggtcaaggacctcaaggccccaagggagatccaggccctcctggtattcctgggagaaatggtgaccctggtattccaggacaaccagggtcccctggttctcctggcccccctggaatctgtgaatcatgccctactggtcctcagaactattctccccagtatgattcatatgatgtcaagtctggagtagcagtaggaggactcgcaggctatcctggaccagctggccccccaggccctcccggtccccctggtacatctggtcatcctggttcccctggatctccaggataccaaggaccccctggtgaacctgggcaagctggtccttcaggccctccaggacctcctggtgctataggtccatctggtcctgctggaaaagatggagaatcaggtagacccggacgacctggagagcgaggattgcctggacctccaggtatcaaaggtccagctgggatacctggattccctggtatgaaaggacacagaggcttcgatggacgaaatggagaaaagggtgaaacaggtgctcctggattaaagggtgaaaatggtcttccaggcgaaaatggagctcctggacccatgggtccaagaggggctcctggtgagcgaggacggccaggacttcctggggctgcaggtgctcggggtaatgacggtgctcgaggcagtgatggtcaaccaggccctcctggtcctcctggaactgccggattccctggatcccctggtgctaagggtgaagttggacctgcagggtctcctggttcaaatggtgcccctggacaaagaggagaacctggacctcagggacacgctggtgctcaaggtcctcctggccctcctgggattaatggtagtcctggtggtaaaggcgaaatgggtcccgctggcattcctggagctcctggactgatgggagcccggggtcctccaggaccagccggtgctaatggtgctcctggactgcgaggtggtgcaggtgagcctggtaagaatggtgccaaaggagagcccggaccacgtggtgaacgcggtgaggctggtattccaggtgttccaggagctaaaggcgaagatggcaaggatggatcacctggagaacctggtgcaaatgggcttccaggagctgcaggagaaaggggtgcccctgggttccgaggacctgctggaccaaatggcatcccaggagaaaagggtcctgctggagagcgtggtgctccaggccctgcagggcccagaggagctgctggagaacctggcagagatggcgtccctggaggtccaggaatgaggggcatgcccggaagtccaggaggaccaggaagtgatgggaaaccagggcctcccggaagtcaaggagaaagtggtcgaccaggtcctcctgggccatctggtccccgaggtcagcctggtgtcatgggcttccccggtcctaaaggaaatgatggtgctcctggtaagaatggagaacgaggtggccctggaggacctggccctcagggtcctcctggaaagaatggtgaaactggacctcaaggacccccagggcctactgggcctggtggtgacaaaggagacacaggaccccctggtccacaaggattacaaggcttgcctggtacaggtggtcctccaggagaaaatggaaaacctggggaaccaggtccaaagggtgatgccggtgcacctggagctccaggaggcaagggtgatgctggtgcccctggtgaacgtggacctcctggattggcaggggccccaggacttagaggtggagctggtccccctggtcccgaaggaggaaagggtgctgctggtcctcctgggccacctggtgctgctggtactcctggtctgcaaggaatgcctggagaaagaggaggtcttggaagtcctggtccaaagggtgacaagggtgaaccaggcggtccaggtgctgatggtgtcccagggaaagatggcccaaggggtcctactggtcctattggtcctcctggcccagctggccagcctggagataagggtgaaggtggtgcccccggacttccaggtatagctggacctcgtggtagccctggtgagagaggtgaaactggccctccaggacctgctggtttccctggtgctcctggacagaatggtgaacctggtggtaaaggagaaagaggggctccgggtgagaaaggtgaaggaggccctcctggagttgcaggaccccctggaggttctggacctgctggtcctcctggtccccaaggtgtcaaaggtgaacgtggcagtcctggtggacctggtgctgctggcttccctggtgctcgtggtcttcctggtcctcctggtagtaatggtaacccaggacccccaggtcccagcggttctccaggcaaggatgggcccccaggtcctgcgggtaacactggtgctcctggcagccctggagtgtctggaccaaaaggtgatgctggccaaccaggagagaagggatcgcctggtgcccagggcccaccaggagctccaggcccacttgggattgctgggatcactggagcacggggtcttgcaggaccaccaggcatgccaggtcctaggggaagccctggccctcagggtgtcaagggtgaaagtgggaaaccaggagctaacggtctcagtggagaacgtggtccccctggaccccagggtcttcctggtctggctggtacagctggtgaacctggaagagatggaaaccctggatcagatggtcttccaggccgagatggatctcctggtggcaagggtgatcgtggtgaaaatggctctcctggtgcccctggcgctcctggtcatccaggcccacctggtcctgtcggtccagctggaaagagtggtgacagaggagaaagtggccctgctggccctgctggtgctcccggtcctgctggttcccgaggtgctcctggtcctcaaggcccacgtggtgacaaaggtgaaacaggtgaacgtggagctgctggcatcaaaggacatcgaggattccctggtaatccaggtgccccaggttctccaggccctgctggtcagcagggtgcaatcggcagtccaggacctgcaggccccagaggacctgttggacccagtggacctcctggcaaagatggaaccagtggacatccaggtcccattggaccaccagggcctcgaggtaacagaggtgaaagaggatctgagggctccccaggccacccagggcaaccaggccctcctggacctcctggtgcccctggtccttgctgtggtggtgttggagccgctgccattgctgggattggaggtgaaaaagctggcggttttgccccgtattatggagatgaaccaatggatttcaaaatcaacaccgatgagattatgacttcactcaagtctgttaatggacaaatagaaagcctcattagtcctgatggttctcgtaaaaaccccgctagaaactgcagagacctgaaattctgccatcctgaactcaagagtggagaatactgggttgaccctaaccaaggatgcaaattggatgctatcaaggtattctgtaatatggaaactggggaaacatgcataagtgccaatcctttgaatgttccacggaaacactggtggacagattctagtgctgagaagaaacacgtttggtttggagagtccatggatggtggttttcagtttagctacggcaatcctgaacttcctgaagatgtccttgatgtgcagctggcattccttcgacttctctccagccgagcttcccagaacatcacatatcactgcaaaaatagcattgcatacatggatcaggccagtggaaatgtaaagaaggccctgaagctgatggggtcaaatgaaggtgaattcaaggctgaaggaaatagcaaattcacctacacagttctggaggatggttgcacgaaacacactggggaatggagcaaaacagtctttgaatatcgaacacgcaaggctgtgagactacctattgtagatattgcaccctatgacattggtggtcctgatcaagaatttggtgtggacgttggccctgtttgctttttataaaccaaactctatctgaaatcccaacaaaaaaaatttaactccatatgtgttcctcttgttctaatcttgtcaaccagtgcaagtgaccgacaaaattccagttatttatttccaaaatgtttggaaacagtataatttgacaaagaaaaatgatacttctctttttttgctgttccaccaaatacaattcaaatgctttttgttttatttttttaccaattccaatttcaaaatgtctcaatggtgctataataaataaacttcaacactctttatgataacaaaaaaaaataaaaaaaaaaaaaaaaaaaaagaaaaaattttggggcgccgccgcgcccccaagaaaaagaaatttaacagaaacacagcagttgtgtggcgcacgcgcgcccacaagaggagaaagaaaaaagtgaccaaaaaggtggtccccagaagagaacccgcggacacacacagcggcggggagatatcccccaaaaacaacgaccccccgggggaaccacacacagcgtgtttgacagacaaacccccagaagagagagtctataggcagcccaaaacggggaacctcatacaacagggggacgtcacaagagagcagtgcaagataaacaaatatcaccccgccgacacgggggggagacgcgagcgcggagaagtacatacgtagcagagcctgacagagcacatcgaagaacaaacgcacagagaccagaacggaaagaaaggcatgcgcaaacgacgaccgcaaagaaagagatgaagcgcagcgagcaaggcagcgaagaacagaacacagcaagcagcacagactgaacggaatgcagaagtcaggacacgagagagctaccaacccacacagcacagcggaacgaaagaaaaaca

SEQ ID NO: 58782 - DNA, 1260 bp, Homo sapiens
  misc_feature (26)..(26): n is a, c, g, or t
ccgggctgcaggaattcggcacgagntcaggccagtggaaatgtaaagaaggccctgaagctgatggggtcaaatgaaggtgaattcaaggctgaaggaaatagcaaattcacctacacagttctggaggatggttgcacgaaacacactggggaatggagcaaaacagtctttgaatatcgaacacgcaaggctgtgagactacctattgtagatattgcaccctatgacattggtggtcctgatcaagaatttggtgtggacgttggccctgtttgctttttataaaccaaactctatctgaaatcccaacaaaaaaaatttaactccatatgtgttcctcttgttctaatcttgtcaaccagtgcaagtgaccgacaaaattccagttatttatttccaaaatgtttggaaacagtataatttgacaaagaaaaatgatacttctctttttttgctgttccaccaaatacaattcaaatgctttttgttttatttttttaccaattccaatttcaaaatgtctcaatggtgctataataaataaacttcaacactctttatgataacaacactgtgttatattctttgaatcctagcccatctgcagagcaatgactgtgctcaccagtaaaagataacctttctttctgaaatagtcaaatacgaaattagaaaagccctccctattttaactacctcaactggtcagaaacacagattgtattctatgagtcccagaagatgaaaaaaattttatacgttgataaaacttataaatttcattgattaatctcctggaagattggtttaaaaagaaaagtgtaatgcaagaatttaaagaaatatttttaaagccacaattattttaatattggatatcaactgcttgtaaaggtgctcctcttttttcttgtcattgctggtcaagattactaatatttgggaaggctttaaagacgcatgttatggtgctaatgtactttcacttttaaactctagatcagaattgttgacttgcattcagaacataaatgcacaaaatctgtacatgtctcccatcagaaagattcattggcatgccacaggggattctcctccttcatcctgtaaaggtcaacaataaaaaccaaattatggggctgcttttgtcacactagcatagagaatgtgttgaaatttaactttgtaagcttgtatgtggttgttgatcttttttttccttacagacacccataataaaatatcatattaaaattc

SEQ ID NO: 58783 - DNA, 1273 bp, Homo sapiens
ttagacatgatacgactcgagttcggtaccctcgataagtcaggccagtggaaatgtaaagaaggccctgaagctgatggggtcaaatgaaggtgaattcaaggctgaaggaaatagcaaattcacctacacagttctggaggatggttgcacgaaacacactggggaatggagcaaaacagtctttgaatatcgaacacgcaaggctgtgagactacctattgtagatattgcaccctatgacattggtggtcctgatcaagaatttggtgtggacgttggccctgtttgctttttataaaccaaactctatctgaaatcccaacaaaaaaaatttaactccatatgtgttcctcttgttctaatcttgtcaaccagtgcaagtgaccgacaaaattccagttatttatttccaaaatgtttggaaacagtataatttgacaaagaaaaatgatacttctctttttttgctgttccaccaaatacaattcaaatgctttttgttttatttttttaccaattccaatttcaaaatgtctcaatggtgctataataaataaacttcaacactctttatgataacaacactgtgttatattctttgaatcctagcccatctgcagagcaatgactgtgctcaccagtaaaagataacctttctttctgaaatagtcaaatacgaaattagaaaagccctccctattttaactacctcaactggtcagaaacacagattgtattctatgagtcccagaagatgaaaaaaattttatacgttgataaaacttataaatttcattgattaatctcctggaagattggtttaaaaagaaaagtgtaatgcaagaatttaaagaaatatttttaaagccacaattattttaatattggatatcaactgcttgtaaaggtgctcctcttttttcttgtcattgctggtcaagattactaatatttgggaaggctttaaagacgcatgttatggtgctaatgtactttcacttttaaactctagatcagaattgttgacttgcattcagaacataaatgcacaaaatctgtacatgtctcccatcagaaagattcattggcatgccacaggggattctcctccttcatcctgtaaaggtcaacaataaaaaccaaattatggggctgcttttgtcacactagcatagagaatgtgttgaaatttaactttgtaagcttgtatgtggttgttgatcttttttttccttacagacacccataataaaatatcatattaaaattc

SEQ ID NO: 58784 - DNA, 5769 bp, Homo sapiens
accccagaaaactacgatagcccttatgaaacttaagggtcgaaggtggatttagcagtaaactaagagtagagtgcttagttgaacagggccctgaagcgcgtacacaccgcccgtcaccctcctcaagtatacttcaaaggacatttaactaaaacccctacgcatttatatagaggagacaagtcgtaacatggtaagtgtactggaaagtgcacttggacgaactggctgagttttatgacgggcccggtgctgaagggcagggaacaacttgatggtgctactttgaactgcttttcttttctcctttttgcacaaagagtctcatgtctgatatttagacatgatgagctttgtgcaaaaggggagctggctacttctcgctctgcttcatcccactattattttggcacaacaggaagctgttgaaggaggatgttcccatcttggtcagtcctatgcggatagagatgtctggaagccagaaccatgccaaatatgtgtctgtgactcaggatccgttctctgcgatgacataatatgtgacgatcaagaattagactgccccaacccagaaattccatttggagaatgttgtgcagtttgcccacagcctccaactgctcctactcgccctcctaatggtcaaggacctcaaggccccaagggagatccaggccctcctggtattcctgggagaaatggtgaccctggtattccaggacaaccagggtcccctggttctcctggcccccctggaatctgtgaatcatgccctactggtcctcagaactattctccccagtatgattcatatgatgtcaagtctggagtagcagtaggaggactcgcaggctatcctggaccagctggccccccaggccctcccggtccccctggtacatctggtcatcctggttcccctggatctccaggataccaaggaccccctggtgaacctgggcaagctggtccttcaggccctccaggacctcctggtgctataggtccatctggtcctgctggaaaagatggagaatcaggtagacccggacgacctggagagcgaggattgcctggacctccaggtatcaaaggtccagctgggatacctggattccctggtatgaaaggacacagaggcttcgatggacgaaatggagaaaagggtgaaacaggtgctcctggattaaagggtgaaaatggtcttccaggcgaaaatggagctcctggacccatgggtccaagaggggctcctggtgagcgaggacggccaggacttcctggggctgcaggtgctcggggtaatgacggtgctcgaggcagtgatggtcaaccaggccctcctggtcctcctggaactgccggattccctggatcccctggtgctaagggtgaagttggacctgcagggtctcctggttcaaatggtgcccctggacaaagaggagaacctggacctcagggacacgctggtgctcaaggtcctcctggccctcctgggattaatggtagtcctggtggtaaaggcgaaatgggtcccgctggcattcctggagctcctggactgatgggagcccggggtcctccaggaccagccggtgctaatggtgctcctggactgcgaggtggtgcaggtgagcctggtaagaatggtgccaaaggagagcccggaccacgtggtgaacgcggtgaggctggtattccaggtgttccaggagctaaaggcgaagatggcaaggatggatcacctggagaacctggtgcaaatgggcttccaggagctgcaggagaaaggggtgcccctgggttccgaggacctgctggaccaaatggcatcccaggagaaaagggtcctgctggagagcgtggtgctccaggccctgcagggcccagaggagctgctggagaacctggcagagatggcgtccctggaggtccaggaatgaggggcatgcccggaagtccaggaggaccaggaagtgatgggaaaccagggcctcccggaagtcaaggagaaagtggtcgaccaggtcctcctgggccatctggtccccgaggtcagcctggtgtcatgggcttccccggtcctaaaggaaatgatggtgctcctggtaagaatggagaacgaggtggccctggaggacctggccctcagggtcctcctggaaagaatggtgaaactggacctcaaggacccccagggcctactgggcctggtggtgacaaaggagacacaggaccccctggtccacaaggattacaaggcttgcctggtacaggtggtcctccaggagaaaatggaaaacctggggaaccaggtccaaagggtgatgccggtgcacctggagctccaggaggcaagggtgatgctggtgcccctggtgaacgtggacctcctggattggcaggggccccaggacttagaggtggagctggtccccctggtcccgaaggaggaaagggtgctgctggtcctcctgggccacctggtgctgctggtactcctggtctgcaaggaatgcctggagaaagaggaggtcttggaagtcctggtccaaagggtgacaagggtgaaccaggcggtccaggtgctgatggtgtcccagggaaagatggcccaaggggtcctactggtcctattggtcctcctggcccagctggccagcctggagataagggtgaaggtggtgcccccggacttccaggtatagctggacctcgtggtagccctggtgagagaggtgaaactggccctccaggacctgctggtttccctggtgctcctggacagaatggtgaacctggtggtaaaggagaaagaggggctccgggtgagaaaggtgaaggaggccctcctggagttgcaggaccccctggaggttctggacctgctggtcctcctggtccccaaggtgtcaaaggtgaacgtggcagtcctggtggacctggtgctgctggcttccctggtgctcgtggtcttcctggtcctcctggtagtaatggtaacccaggacccccaggtcccagcggttctccaggcaaggatgggcccccaggtcctgcgggtaacactggtgctcctggcagccctggagtgtctggaccaaaaggtgatgctggccaaccaggagagaagggatcgcctggtgcccagggcccaccaggagctccaggcccacttgggattgctgggatcactggagcacggggtcttgcaggaccaccaggcatgccaggtcctaggggaagccctggccctcagggtgtcaagggtgaaagtgggaaaccaggagctaacggtctcagtggagaacgtggtccccctggaccccagggtcttcctggtctggctggtacagctggtgaacctggaagagatggaaaccctggatcagatggtcttccaggccgagatggatctcctggtggcaagggtgatcgtggtgaaaatggctctcctggtgcccctggcgctcctggtcatccaggcccacctggtcctgtcggtccagctggaaagagtggtgacagaggagaaagtggccctgctggccctgctggtgctcccggtcctgctggttcccgaggtgctcctggtcctcaaggcccacgtggtgacaaaggtgaaacaggtgaacgtggagctgctggcatcaaaggacatcgaggattccctggtaatccaggtgccccaggttctccaggccctgctggtcagcagggtgcaatcggcagtccaggacctgcaggccccagaggacctgttggacccagtggacctcctggcaaagatggaaccagtggacatccaggtcccattggaccaccagggcctcgaggtaacagaggtgaaagaggatctgagggctccccaggccacccagggcaaccaggccctcctggacctcctggtgcccctggtccttgctgtggtggtgttggagccgctgccattgctgggattggaggtgaaaaagctggcggttttgccccgtattatggagatgaaccaatggatttcaaaatcaacaccgatgagattatgacttcactcaagtctgttaatggacaaatagaaagcctcattagtcctgatggttctcgtaaaaaccccgctagaaactgcagagacctgaaattctgccatcctgaactcaagagtggagaatactgggttgaccctaaccaaggatgcaaattggatgctatcaaggtattctgtaatatggaaactggggaaacatgcataagtgccaatcctttgaatgttccacggaaacactggtggacagattctagtgctgagaagaaacacgtttggtttggagagtccatggatggtggttttcagtttagctacggcaatcctgaacttcctgaagatgtccttgatgtgcagctggcattccttcgacttctctccagccgagcttcccagaacatcacatatcactgcaaaaatagcattgcatacatggatcaggccagtggaaatgtaaagaaggccctgaagctgatggggtcaaatgaaggtgaattcaaggctgaaggaaatagcaaattcacctacacagttctggaggatggttgcacgggtaggaaacatttttctcaatataggtcataaagcagtcagcattttagtttaatcatgcaaattattttgaatagaataaataaaattaataggatgaaataaagatagcatttggtatgaattacatacattgcatctactgattcattgcagggaatgttaaatgcaacaaaatggatcttagcctccagatgaaaaccagttgaaataaaagcatttaaaatttaaatccataatgcaaactttatcagataattgggatagttactatatgttttgaataatacctgtcacattaactcagtttgaaatatctgttttttaaaattttaaaggttaacttcaaatctctcatttgttattgttatttgtgaacaaagggaaaactcacttctaatattagcgaatttcattgtgagagacctatcctctttttaataaaccatttataaacctgttagcaatggccggaaccaggcctcctgaggatgcactggtctatagcaattgccctgctgcatttactaagaatccttacaaggcatttgtttaagaatattgtttatcaactaagaagattacagctttgaagtagagcaggtctcatatacatgaataataacatggcacgatgaatgcttctttagagtaaaaaggttttctttaacttgttaagtcagagttgtctaagtaattgtaatgtcatgatcatgtacattttgtccttttttacagaaacacactggggaatggagcaaaacagtctttgaatatcgaacacgcaaggctgtgagactacctattgtagatattgcaccctatgacattggtggtcctgatcaagaatttggtgtggacgttggccctgtttgctttttataaaccaaactctatctgaaatcccaacaaaaaaaatttaactccatatgtgttcctcttgttctaatcttgtcaaccagtgcaagtgaccgacaaaattccagttatttatttccaaaatgtttggaaacagtataatttgacaaagaaaaatgatacttctctttttttgctgttccaccaaatacaattcaaatgctttttgttttatttttttaccaattccaatttcaaaatgtctcaatggtgctataataaataaacttcaacactctttatgataacaa

SEQ ID NO: 58785 - DNA, 1182 bp, Homo sapiens
  misc_feature (26)..(26): n is a, c, g, or t
ccgggctgcaggaattcggcacgagncaaattcacctacacagttctggaggatggttgcacgaaacacactggggaatggagcaaaacagtctttgaatatcgaacacgcaaggctgtgagactacctattgtagatattgcaccctatgacattggtggtcctgatcaagaatttggtgtggacgttggccctgtttgctttttataaaccaaactctatctgaaatcccaacaaaaaaaatttaactccatatgtgttcctcttgttctaatcttgtcaaccagtgcaagtgaccgacaaaattccagttatttatttccaaaatgtttggaaacagtataatttgacaaagaaaaatgatacttctctttttttgctgttccaccaaatacaattcaaatgctttttgttttatttttttaccaattccaatttcaaaatgtctcaatggtgctataataaataaacttcaacactctttatgataacaacactgtgttatattctttgaatcctagcccatctgcagagcaatgactgtgctcaccagtaaaagataacctttctttctgaaatagtcaaatacgaaattagaaaagccctccctattttaactacctcaactggtcagaaacacagattgtattctatgagtcccagaagatgaaaaaaattttatacgttgataaaacttataaatttcattgattaatctcctggaagattggtttaaaaagaaaagtgtaatgcaagaatttaaagaaatatttttaaagccacaattattttaatattggatatcaactgcttgtaaaggtgctcctcttttttcttgtcattgctggtcaagattactaatatttgggaaggctttaaagacgcatgttatggtgctaatgtactttcacttttaaactctagatcagaattgttgacttgcattcagaacataaatgcacaaaatctgtacatgtctcccatcagaaagattcattggcatgccacaggggattctcctccttcatcctgtaaaggtcaacaataaaaaccaaattatggggctgcttttgtcacactagcatagagaatgtgttgaaatttaactttgtaagcttgtatgtggttgttgatcttttttttccttacagacacccataataaaatatcatattaaaattc

SEQ ID NO: 58786 - DNA, 1142 bp, Homo sapiens
cgtccagaggatcccctctctccaaacacactggggaatggagcaaaacagtctttgaatatcgaacacgcaaggctgtgagactacctattgtagatattgcaccctatgacattggtggtcctgatcaagaatttggtgtggacgttggccctgtttgctttttataaaccaaactctatctgaaatcccaacaaaaaaaatttaactccatatgtgttcctcttgttctaatcttgtcaaccagtgcaagtgaccgacaaaattccagttatttatttccaaaatgtttggaaacagtataatttgacaaagaaaaatgatacttctctttttttgctgttccaccaaatacaattcaaatgctttttgttttatttttttaccaattccaatttcaaaatgtctcaatggtgctataataaataaacttcaacactctttatgataacaacactgtgttatattctttgaatcctagcccatctgcagagcaatgactgtgctcaccagtaaaagataacctttctttctgaaatagtcaaatacgaaattagaaaagccctccctattttaactacctcaactggtcagaaacacagattgtattctatgagtcccagaagatgaaaaaaattttatacgttgataaaacttataaatttcattgattaatctcctggaagattggtttaaaaagaaaagtgtaatgcaagaatttaaagaaatatttttaaagccacaattattttaatattggatatcaactgcttgtaaaggtgctcctcttttttcttgtcattgctggtcaagattactaatatttgggaaggctttaaagacgcatgttatggtgctaatgtactttcacttttaaactctagatcagaattgttgacttgcattcagaacataaatgcacaaaatctgtacatgtctcccatcagaaagattcattggcatgccacaggggattctcctccttcatcctgtaaaggtcaacaataaaaaccaaattatggggctgcttttgtcacactagcatagagaatgtgttgaaatttaactttgtaagcttgtatgtggttgttgatcttttttttccttacagacacccataataaaatatcatattaaaattc

SEQ ID NO: 58787 - DNA, 4777 bp, Homo sapiens
accccagaaaactacgatagcccttatgaaacttaagggtcgaaggtggatttagcagtaaactaagagtagagtgcttagttgaacagggccctgaagcgcgtacacaccgcccgtcaccctcctcaagtatacttcaaaggacatttaactaaaacccctacgcatttatatagaggagacaagtcgtaacatggtaagtgtactggaaagtgcacttggacgaactggctgagttttatgacgggcccggtgctgaagggcagggaacaacttgatggtgctactttgaactgcttttcttttctcctttttgcacaaagagtctcatgtctgatatttagacatgatgagctttgtgcaaaaggggagctggctacttctcgctctgcttcatcccactattattttggcacaacaggaagctgttgaaggaggatgttcccatcttggtcagtcctatgcggatagagatgtctggaagccagaaccatgccaaatatgtgtctgtgactcaggatccgttctctgcgatgacataatatgtgacgatcaagaattagactgccccaacccagaaattccatttggagaatgttgtgcagtttgcccacagcctccaactgctcctactcgccctcctaatggtcaaggacctcaaggccccaagggagatccaggccctcctggtattcctgggagaaatggtgaccctggtattccaggacaaccagggtcccctggttctcctggcccccctggaatctgtgaatcatgccctactggtcctcagaactattctccccagtatgattcatatgatgtcaagtctggagtagcagtaggaggactcgcaggctatcctggaccagctggccccccaggccctcccggtccccctggtacatctggtcatcctggttcccctggatctccaggataccaaggaccccctggtgaacctgggcaagctggtccttcaggccctccaggacctcctggtgctataggtccatctggtcctgctggaaaagatggagaatcaggtagacccggacgacctggagagcgaggattgcctggacctccaggtatcaaaggtccagctgggatacctggattccctggtatgaaaggacacagaggcttcgatggacgaaatggagaaaagggtgaaacaggtgctcctggattaaagggtgaaaatggtcttccaggcgaaaatggagctcctggacccatgggtccaagaggggctcctggtgagcgaggacggccaggacttcctggggctgcaggtgctcggggtaatgacggtgctcgaggcagtgatggtcaaccaggccctcctggtcctcctggaactgccggattccctggatcccctggtgctaagggtgaagttggacctgcagggtctcctggttcaaatggtgcccctggacaaagaggagaacctggacctcagggacacgctggtgctcaaggtcctcctggccctcctgggattaatggtagtcctggtggtaaaggcgaaatgggtcccgctggcattcctggagctcctggactgatgggagcccggggtcctccaggaccagccggtgctaatggtgctcctggactgcgaggtggtgcaggtgagcctggtaagaatggtgccaaaggagagcccggaccacgtggtgaacgcggtgaggctggtattccaggtgttccaggagctaaaggcgaagatggcaaggatggatcacctggagaacctggtgcaaatgggcttccaggagctgcaggagaaaggggtgcccctgggttccgaggacctgctggaccaaatggcatcccaggagaaaagggtcctgctggagagcgtggtgctccaggccctgcagggcccagaggagctgctggagaacctggcagagatggcgtccctggaggtccaggaatgaggggcatgcccggaagtccaggaggaccaggaagtgatgggaaaccagggcctcccggaagtcaaggagaaagtggtcgaccaggtcctcctgggccatctggtccccgaggtcagcctggtgtcatgggcttccccggtcctaaaggaaatgatggtgctcctggtaagaatggagaacgaggtggccctggaggacctggccctcagggtcctcctggaaagaatggtgaaactggacctcaaggacccccagggcctactgggcctggtggtgacaaaggagacacaggaccccctggtccacaaggattacaaggcttgcctggtacaggtggtcctccaggagaaaatggaaaacctggggaaccaggtccaaagggtgatgccggtgcacctggagctccaggaggcaagggtgatgctggtgcccctggtgaacgtggacctcctggattggcaggggccccaggacttagaggtggagctggtccccctggtcccgaaggaggaaagggtgctgctggtcctcctgggccacctggtgctgctggtactcctggtctgcaaggaatgcctggagaaagaggaggtcttggaagtcctggtccaaagggtgacaagggtgaaccaggcggtccaggtgctgatggtgtcccagggaaagatggcccaaggggtcctactggtcctattggtcctcctggcccagctggccagcctggagataagggtgaaggtggtgcccccggacttccaggtatagctggacctcgtggtagccctggtgagagaggtgaaactggccctccaggacctgctggtttccctggtgctcctggacagaatggtgaacctggtggtaaaggagaaagaggggctccgggtgagaaaggtgaaggaggccctcctggagttgcaggaccccctggaggttctggacctgctggtcctcctggtccccaaggtgtcaaaggtgaacgtggcagtcctggtggacctggtgctgctggcttccctggtgctcgtggtcttcctggtcctcctggtagtaatggtaacccaggacccccaggtcccagcggttctccaggcaaggatgggcccccaggtcctgcgggtaacactggtgctcctggcagccctggagtgtctggaccaaaaggtgatgctggccaaccaggagagaagggatcgcctggtgcccagggcccaccaggagctccaggcccacttgggattgctgggatcactggagcacggggtcttgcaggaccaccaggcatgccaggtcctaggggaagccctggccctcagggtgtcaagggtgaaagtgggaaaccaggagctaacggtctcagtggagaacgtggtccccctggaccccagggtcttcctggtctggctggtacagctggtgaacctggaagagatggaaaccctggatcagatggtcttccaggccgagatggatctcctggtggcaagggtgatcgtggtgaaaatggctctcctggtgcccctggcgctcctggtcatccaggcccacctggtcctgtcggtccagctggaaagagtggtgacagaggagaaagtggccctgctggccctgctggtgctcccggtcctgctggttcccgaggtgctcctggtcctcaaggcccacgtggtgacaaaggtgaaacaggtgaacgtggagctgctggcatcaaaggacatcgaggattccctggtaatccaggtgccccaggttctccaggccctgctggtcagcagggtgcaatcggcagtccaggacctgcaggccccagaggacctgttggacccagtggacctcctggcaaagatggaaccagtggacatccaggtcccattggaccaccagggcctcgaggtaacagaggtgaaagaggatctgagggctccccaggccacccagggcaaccaggccctcctggacctcctggtgcccctggtccttgctgtggtggtgttggagccgctgccattgctgggattggaggtgaaaaagctggcggttttgccccgtattatggagatgaaccaatggatttcaaaatcaacaccgatgagattatgacttcactcaagtctgttaatggacaaatagaaagcctcattagtcctgatggttctcgtaaaaaccccgctagaaactgcagagacctgaaattctgccatcctgaactcaagagtggagaatactgggttgaccctaaccaaggatgcaaattggatgctatcaaggtattctgtaatatggaaactggggaaacatgcataagtgccaatcctttgaatgttccacggaaacactggtggacagattctagtgctgagaagaaacacgtttggtttggagagtccatggatggtggttttcagtttagctacggcaatcctgaacttcctgaagatgtccttgatgtgcagctggcattccttcgacttctctccagccgagcttcccagaacatcacatatcactgcaaaaatagcattgcatacatggatcaggccagtggaaatgtaaagaaggccctgaagctgatggggtcaaatgaaggtgaattcaaggctgaaggaaatagcaaattcacctacacagttctggaggatggttgcacgaaacacactggggaatggagcaaaacagtctttgaatatcgaacacgcaaggctgtgagactacctattgtagatattgcaccctatgacattggtggtcctgatcaagaatttggtgtggacgttggccctgtttgctttttataaaccaaactctatctgaaatcccaacaaaaa

SEQ ID NO: 58788 - DNA, 4782 bp, Homo sapiens
  misc_feature (4716)..(4716): n is a, c, g, or t
accccagaaaactacgatagcccttatgaaacttaagggtcgaaggtggatttagcagtaaactaagagtagagtgcttagttgaacagggccctgaagcgcgtacacaccgcccgtcaccctcctcaagtatacttcaaaggacatttaactaaaacccctacgcatttatatagaggagacaagtcgtaacatggtaagtgtactggaaagtgcacttggacgaactggctgagttttatgacgggcccggtgctgaagggcagggaacaacttgatggtgctactttgaactgcttttcttttctcctttttgcacaaagagtctcatgtctgatatttagacatgatgagctttgtgcaaaaggggagctggctacttctcgctctgcttcatcccactattattttggcacaacaggaagctgttgaaggaggatgttcccatcttggtcagtcctatgcggatagagatgtctggaagccagaaccatgccaaatatgtgtctgtgactcaggatccgttctctgcgatgacataatatgtgacgatcaagaattagactgccccaacccagaaattccatttggagaatgttgtgcagtttgcccacagcctccaactgctcctactcgccctcctaatggtcaaggacctcaaggccccaagggagatccaggccctcctggtattcctgggagaaatggtgaccctggtattccaggacaaccagggtcccctggttctcctggcccccctggaatctgtgaatcatgccctactggtcctcagaactattctccccagtatgattcatatgatgtcaagtctggagtagcagtaggaggactcgcaggctatcctggaccagctggccccccaggccctcccggtccccctggtacatctggtcatcctggttcccctggatctccaggataccaaggaccccctggtgaacctgggcaagctggtccttcaggccctccaggacctcctggtgctataggtccatctggtcctgctggaaaagatggagaatcaggtagacccggacgacctggagagcgaggattgcctggacctccaggtatcaaaggtccagctgggatacctggattccctggtatgaaaggacacagaggcttcgatggacgaaatggagaaaagggtgaaacaggtgctcctggattaaagggtgaaaatggtcttccaggcgaaaatggagctcctggacccatgggtccaagaggggctcctggtgagcgaggacggccaggacttcctggggctgcaggtgctcggggtaatgacggtgctcgaggcagtgatggtcaaccaggccctcctggtcctcctggaactgccggattccctggatcccctggtgctaagggtgaagttggacctgcagggtctcctggttcaaatggtgcccctggacaaagaggagaacctggacctcagggacacgctggtgctcaaggtcctcctggccctcctgggattaatggtagtcctggtggtaaaggcgaaatgggtcccgctggcattcctggagctcctggactgatgggagcccggggtcctccaggaccagccggtgctaatggtgctcctggactgcgaggtggtgcaggtgagcctggtaagaatggtgccaaaggagagcccggaccacgtggtgaacgcggtgaggctggtattccaggtgttccaggagctaaaggcgaagatggcaaggatggatcacctggagaacctggtgcaaatgggcttccaggagctgcaggagaaaggggtgcccctgggttccgaggacctgctggaccaaatggcatcccaggagaaaagggtcctgctggagagcgtggtgctccaggccctgcagggcccagaggagctgctggagaacctggcagagatggcgtccctggaggtccaggaatgaggggcatgcccggaagtccaggaggaccaggaagtgatgggaaaccagggcctcccggaagtcaaggagaaagtggtcgaccaggtcctcctgggccatctggtccccgaggtcagcctggtgtcatgggcttccccggtcctaaaggaaatgatggtgctcctggtaagaatggagaacgaggtggccctggaggacctggccctcagggtcctcctggaaagaatggtgaaactggacctcaaggacccccagggcctactgggcctggtggtgacaaaggagacacaggaccccctggtccacaaggattacaaggcttgcctggtacaggtggtcctccaggagaaaatggaaaacctggggaaccaggtccaaagggtgatgccggtgcacctggagctccaggaggcaagggtgatgctggtgcccctggtgaacgtggacctcctggattggcaggggccccaggacttagaggtggagctggtccccctggtcccgaaggaggaaagggtgctgctggtcctcctgggccacctggtgctgctggtactcctggtctgcaaggaatgcctggagaaagaggaggtcttggaagtcctggtccaaagggtgacaagggtgaaccaggcggtccaggtgctgatggtgtcccagggaaagatggcccaaggggtcctactggtcctattggtcctcctggcccagctggccagcctggagataagggtgaaggtggtgcccccggacttccaggtatagctggacctcgtggtagccctggtgagagaggtgaaactggccctccaggacctgctggtttccctggtgctcctggacagaatggtgaacctggtggtaaaggagaaagaggggctccgggtgagaaaggtgaaggaggccctcctggagttgcaggaccccctggaggttctggacctgctggtcctcctggtccccaaggtgtcaaaggtgaacgtggcagtcctggtggacctggtgctgctggcttccctggtgctcgtggtcttcctggtcctcctggtagtaatggtaacccaggacccccaggtcccagcggttctccaggcaaggatgggcccccaggtcctgcgggtaacactggtgctcctggcagccctggagtgtctggaccaaaaggtgatgctggccaaccaggagagaagggatcgcctggtgcccagggcccaccaggagctccaggcccacttgggattgctgggatcactggagcacggggtcttgcaggaccaccaggcatgccaggtcctaggggaagccctggccctcagggtgtcaagggtgaaagtgggaaaccaggagctaacggtctcagtggagaacgtggtccccctggaccccagggtcttcctggtctggctggtacagctggtgaacctggaagagatggaaaccctggatcagatggtcttccaggccgagatggatctcctggtggcaagggtgatcgtggtgaaaatggctctcctggtgcccctggcgctcctggtcatccaggcccacctggtcctgtcggtccagctggaaagagtggtgacagaggagaaagtggccctgctggccctgctggtgctcccggtcctgctggttcccgaggtgctcctggtcctcaaggcccacgtggtgacaaaggtgaaacaggtgaacgtggagctgctggcatcaaaggacatcgaggattccctggtaatccaggtgccccaggttctccaggccctgctggtcagcagggtgcaatcggcagtccaggacctgcaggccccagaggacctgttggacccagtggacctcctggcaaagatggaaccagtggacatccaggtcccattggaccaccagggcctcgaggtaacagaggtgaaagaggatctgagggctccccaggccacccagggcaaccaggccctcctggacctcctggtgcccctggtccttgctgtggtggtgttggagccgctgccattgctgggattggaggtgaaaaagctggcggttttgccccgtattatggagatgaaccaatggatttcaaaatcaacaccgatgagattatgacttcactcaagtctgttaatggacaaatagaaagcctcattagtcctgatggttctcgtaaaaaccccgctagaaactgcagagacctgaaattctgccatcctgaactcaagagtggagaatactgggttgaccctaaccaaggatgcaaattggatgctatcaaggtattctgtaatatggaaactggggaaacatgcataagtgccaatcctttgaatgttccacggaaacactggtggacagattctagtgctgagaagaaacacgtttggtttggagagtccatggatggtggttttcagtttagctacggcaatcctgaacttcctgaagatgtccttgatgtgcagctggcattccttcgacttctctccagccgagcttcccagaacatcacatatcactgcaaaaatagcattgcatacatggatcaggccagtggaaatgtaaagaaggccctgaagctgatggggtcaaatgaaggtgaattcaaggctgaaggaaatagcaaattcacctacacagttctggaggatggttgcacgaaacacactggggaatggagcaaaacagtctttgaatatcgaacacgcaaggctgtgagactacctattgtagatattgcaccctatgacattggtggtcctgatcaagaatttgntgggatttagatagagtttggtttataaaagcaaacgggccaacgtccacaccaaattcttgatca

SEQ ID NO: 58789 - DNA, 4853 bp, Homo sapiens
  misc_feature (4787)..(4787): n is a, c, g, or t
accccagaaaactacgatagcccttatgaaacttaagggtcgaaggtggatttagcagtaaactaagagtagagtgcttagttgaacagggccctgaagcgcgtacacaccgcccgtcaccctcctcaagtatacttcaaaggacatttaactaaaacccctacgcatttatatagaggagacaagtcgtaacatggtaagtgtactggaaagtgcacttggacgaactggctgagttttatgacgggcccggtgctgaagggcagggaacaacttgatggtgctactttgaactgcttttcttttctcctttttgcacaaagagtctcatgtctgatatttagacatgatgagctttgtgcaaaaggggagctggctacttctcgctctgcttcatcccactattattttggcacaacaggaagctgttgaaggaggatgttcccatcttggtcagtcctatgcggatagagatgtctggaagccagaaccatgccaaatatgtgtctgtgactcaggatccgttctctgcgatgacataatatgtgacgatcaagaattagactgccccaacccagaaattccatttggagaatgttgtgcagtttgcccacagcctccaactgctcctactcgccctcctaatggtcaaggacctcaaggccccaagggagatccaggccctcctggtattcctgggagaaatggtgaccctggtattccaggacaaccagggtcccctggttctcctggcccccctggaatctgtgaatcatgccctactggtcctcagaactattctccccagtatgattcatatgatgtcaagtctggagtagcagtaggaggactcgcaggctatcctggaccagctggccccccaggccctcccggtccccctggtacatctggtcatcctggttcccctggatctccaggataccaaggaccccctggtgaacctgggcaagctggtccttcaggccctccaggacctcctggtgctataggtccatctggtcctgctggaaaagatggagaatcaggtagacccggacgacctggagagcgaggattgcctggacctccaggtatcaaaggtccagctgggatacctggattccctggtatgaaaggacacagaggcttcgatggacgaaatggagaaaagggtgaaacaggtgctcctggattaaagggtgaaaatggtcttccaggcgaaaatggagctcctggacccatgggtccaagaggggctcctggtgagcgaggacggccaggacttcctggggctgcaggtgctcggggtaatgacggtgctcgaggcagtgatggtcaaccaggccctcctggtcctcctggaactgccggattccctggatcccctggtgctaagggtgaagttggacctgcagggtctcctggttcaaatggtgcccctggacaaagaggagaacctggacctcagggacacgctggtgctcaaggtcctcctggccctcctgggattaatggtagtcctggtggtaaaggcgaaatgggtcccgctggcattcctggagctcctggactgatgggagcccggggtcctccaggaccagccggtgctaatggtgctcctggactgcgaggtggtgcaggtgagcctggtaagaatggtgccaaaggagagcccggaccacgtggtgaacgcggtgaggctggtattccaggtgttccaggagctaaaggcgaagatggcaaggatggatcacctggagaacctggtgcaaatgggcttccaggagctgcaggagaaaggggtgcccctgggttccgaggacctgctggaccaaatggcatcccaggagaaaagggtcctgctggagagcgtggtgctccaggccctgcagggcccagaggagctgctggagaacctggcagagatggcgtccctggaggtccaggaatgaggggcatgcccggaagtccaggaggaccaggaagtgatgggaaaccagggcctcccggaagtcaaggagaaagtggtcgaccaggtcctcctgggccatctggtccccgaggtcagcctggtgtcatgggcttccccggtcctaaaggaaatgatggtgctcctggtaagaatggagaacgaggtggccctggaggacctggccctcagggtcctcctggaaagaatggtgaaactggacctcaaggacccccagggcctactgggcctggtggtgacaaaggagacacaggaccccctggtccacaaggattacaaggcttgcctggtacaggtggtcctccaggagaaaatggaaaacctggggaaccaggtccaaagggtgatgccggtgcacctggagctccaggaggcaagggtgatgctggtgcccctggtgaacgtggacctcctggattggcaggggccccaggacttagaggtggagctggtccccctggtcccgaaggaggaaagggtgctgctggtcctcctgggccacctggtgctgctggtactcctggtctgcaaggaatgcctggagaaagaggaggtcttggaagtcctggtccaaagggtgacaagggtgaaccaggcggtccaggtgctgatggtgtcccagggaaagatggcccaaggggtcctactggtcctattggtcctcctggcccagctggccagcctggagataagggtgaaggtggtgcccccggacttccaggtatagctggacctcgtggtagccctggtgagagaggtgaaactggccctccaggacctgctggtttccctggtgctcctggacagaatggtgaacctggtggtaaaggagaaagaggggctccgggtgagaaaggtgaaggaggccctcctggagttgcaggaccccctggaggttctggacctgctggtcctcctggtccccaaggtgtcaaaggtgaacgtggcagtcctggtggacctggtgctgctggcttccctggtgctcgtggtcttcctggtcctcctggtagtaatggtaacccaggacccccaggtcccagcggttctccaggcaaggatgggcccccaggtcctgcgggtaacactggtgctcctggcagccctggagtgtctggaccaaaaggtgatgctggccaaccaggagagaagggatcgcctggtgcccagggcccaccaggagctccaggcccacttgggattgctgggatcactggagcacggggtcttgcaggaccaccaggcatgccaggtcctaggggaagccctggccctcagggtgtcaagggtgaaagtgggaaaccaggagctaacggtctcagtggagaacgtggtccccctggaccccagggtcttcctggtctggctggtacagctggtgaacctggaagagatggaaaccctggatcagatggtcttccaggccgagatggatctcctggtggcaagggtgatcgtggtgaaaatggctctcctggtgcccctggcgctcctggtcatccaggcccacctggtcctgtcggtccagctggaaagagtggtgacagaggagaaagtggccctgctggccctgctggtgctcccggtcctgctggttcccgaggtgctcctggtcctcaaggcccacgtggtgacaaaggtgaaacaggtgaacgtggagctgctggcatcaaaggacatcgaggattccctggtaatccaggtgccccaggttctccaggccctgctggtcagcagggtgcaatcggcagtccaggacctgcaggccccagaggacctgttggacccagtggacctcctggcaaagatggaaccagtggacatccaggtcccattggaccaccagggcctcgaggtaacagaggtgaaagaggatctgagggctccccaggccacccagggcaaccaggccctcctggacctcctggtgcccctggtccttgctgtggtggtgttggagccgctgccattgctgggattggaggtgaaaaagctggcggttttgccccgtattatggagatgaaccaatggatttcaaaatcaacaccgatgagattatgacttcactcaagtctgttaatggacaaatagaaagcctcattagtcctgatggttctcgtaaaaaccccgctagaaactgcagagacctgaaattctgccatcctgaactcaagagtggagaatactgggttgaccctaaccaaggatgcaaattggatgctatcaaggtattctgtaatatggaaactggggaaacatgcataagtgccaatcctttgaatgttccacggaaacactggtggacagattctagtgctgagaagaaacacgtttggtttggagagtccatggatggtggttttcagtttagctacggcaatcctgaacttcctgaagatgtccttgatgtgcagctggcattccttcgacttctctccagccgagcttcccagaacatcacatatcactgcaaaaatagcattgcatacatggatcaggccagtggaaatgtaaagaaggccctgaagctgatggggtcaaatgaaggtgaattcaaggctgaaggaaatagcaaattcacctacacagttctggaggatggttgcacgaaacacactggggaatggagcaaaacagtctttgaatatcgaacacgcaaggctgtgagactacctattgttttaaaacacaggaaaaagtaagaacatgagtagcgcactgacgcgagcaggtacgtcgtcgaacggggcccaggatgcgatcagaggacaaatataggaggtaaattctctttcntgggatttagatagagtttggtttataaaagcaaacgggccaacgtccacaccaaattcttgatca

SEQ ID NO: 58790 - DNA, 4758 bp, Homo sapiens
accccagaaaactacgatagcccttatgaaacttaagggtcgaaggtggatttagcagtaaactaagagtagagtgcttagttgaacagggccctgaagcgcgtacacaccgcccgtcaccctcctcaagtatacttcaaaggacatttaactaaaacccctacgcatttatatagaggagacaagtcgtaacatggtaagtgtactggaaagtgcacttggacgaactggctgagttttatgacgggcccggtgctgaagggcagggaacaacttgatggtgctactttgaactgcttttcttttctcctttttgcacaaagagtctcatgtctgatatttagacatgatgagctttgtgcaaaaggggagctggctacttctcgctctgcttcatcccactattattttggcacaacaggaagctgttgaaggaggatgttcccatcttggtcagtcctatgcggatagagatgtctggaagccagaaccatgccaaatatgtgtctgtgactcaggatccgttctctgcgatgacataatatgtgacgatcaagaattagactgccccaacccagaaattccatttggagaatgttgtgcagtttgcccacagcctccaactgctcctactcgccctcctaatggtcaaggacctcaaggccccaagggagatccaggccctcctggtattcctgggagaaatggtgaccctggtattccaggacaaccagggtcccctggttctcctggcccccctggaatctgtgaatcatgccctactggtcctcagaactattctccccagtatgattcatatgatgtcaagtctggagtagcagtaggaggactcgcaggctatcctggaccagctggccccccaggccctcccggtccccctggtacatctggtcatcctggttcccctggatctccaggataccaaggaccccctggtgaacctgggcaagctggtccttcaggccctccaggacctcctggtgctataggtccatctggtcctgctggaaaagatggagaatcaggtagacccggacgacctggagagcgaggattgcctggacctccaggtatcaaaggtccagctgggatacctggattccctggtatgaaaggacacagaggcttcgatggacgaaatggagaaaagggtgaaacaggtgctcctggattaaagggtgaaaatggtcttccaggcgaaaatggagctcctggacccatgggtccaagaggggctcctggtgagcgaggacggccaggacttcctggggctgcaggtgctcggggtaatgacggtgctcgaggcagtgatggtcaaccaggccctcctggtcctcctggaactgccggattccctggatcccctggtgctaagggtgaagttggacctgcagggtctcctggttcaaatggtgcccctggacaaagaggagaacctggacctcagggacacgctggtgctcaaggtcctcctggccctcctgggattaatggtagtcctggtggtaaaggcgaaatgggtcccgctggcattcctggagctcctggactgatgggagcccggggtcctccaggaccagccggtgctaatggtgctcctggactgcgaggtggtgcaggtgagcctggtaagaatggtgccaaaggagagcccggaccacgtggtgaacgcggtgaggctggtattccaggtgttccaggagctaaaggcgaagatggcaaggatggatcacctggagaacctggtgcaaatgggcttccaggagctgcaggagaaaggggtgcccctgggttccgaggacctgctggaccaaatggcatcccaggagaaaagggtcctgctggagagcgtggtgctccaggccctgcagggcccagaggagctgctggagaacctggcagagatggcgtccctggaggtccaggaatgaggggcatgcccggaagtccaggaggaccaggaagtgatgggaaaccagggcctcccggaagtcaaggagaaagtggtcgaccaggtcctcctgggccatctggtccccgaggtcagcctggtgtcatgggcttccccggtcctaaaggaaatgatggtgctcctggtaagaatggagaacgaggtggccctggaggacctggccctcagggtcctcctggaaagaatggtgaaactggacctcaaggacccccagggcctactgggcctggtggtgacaaaggagacacaggaccccctggtccacaaggattacaaggcttgcctggtacaggtggtcctccaggagaaaatggaaaacctggggaaccaggtccaaagggtgatgccggtgcacctggagctccaggaggcaagggtgatgctggtgcccctggtgaacgtggacctcctggattggcaggggccccaggacttagaggtggagctggtccccctggtcccgaaggaggaaagggtgctgctggtcctcctgggccacctggtgctgctggtactcctggtctgcaaggaatgcctggagaaagaggaggtcttggaagtcctggtccaaagggtgacaagggtgaaccaggcggtccaggtgctgatggtgtcccagggaaagatggcccaaggggtcctactggtcctattggtcctcctggcccagctggccagcctggagataagggtgaaggtggtgcccccggacttccaggtatagctggacctcgtggtagccctggtgagagaggtgaaactggccctccaggacctgctggtttccctggtgctcctggacagaatggtgaacctggtggtaaaggagaaagaggggctccgggtgagaaaggtgaaggaggccctcctggagttgcaggaccccctggaggttctggacctgctggtcctcctggtccccaaggtgtcaaaggtgaacgtggcagtcctggtggacctggtgctgctggcttccctggtgctcgtggtcttcctggtcctcctggtagtaatggtaacccaggacccccaggtcccagcggttctccaggcaaggatgggcccccaggtcctgcgggtaacactggtgctcctggcagccctggagtgtctggaccaaaaggtgatgctggccaaccaggagagaagggatcgcctggtgcccagggcccaccaggagctccaggcccacttgggattgctgggatcactggagcacggggtcttgcaggaccaccaggcatgccaggtcctaggggaagccctggccctcagggtgtcaagggtgaaagtgggaaaccaggagctaacggtctcagtggagaacgtggtccccctggaccccagggtcttcctggtctggctggtacagctggtgaacctggaagagatggaaaccctggatcagatggtcttccaggccgagatggatctcctggtggcaagggtgatcgtggtgaaaatggctctcctggtgcccctggcgctcctggtcatccaggcccacctggtcctgtcggtccagctggaaagagtggtgacagaggagaaagtggccctgctggccctgctggtgctcccggtcctgctggttcccgaggtgctcctggtcctcaaggcccacgtggtgacaaaggtgaaacaggtgaacgtggagctgctggcatcaaaggacatcgaggattccctggtaatccaggtgccccaggttctccaggccctgctggtcagcagggtgcaatcggcagtccaggacctgcaggccccagaggacctgttggacccagtggacctcctggcaaagatggaaccagtggacatccaggtcccattggaccaccagggcctcgaggtaacagaggtgaaagaggatctgagggctccccaggccacccagggcaaccaggccctcctggacctcctggtgcccctggtccttgctgtggtggtgttggagccgctgccattgctgggattggaggtgaaaaagctggcggttttgccccgtattatggagatgaaccaatggatttcaaaatcaacaccgatgagattatgacttcactcaagtctgttaatggacaaatagaaagcctcattagtcctgatggttctcgtaaaaaccccgctagaaactgcagagacctgaaattctgccatcctgaactcaagagtggagaatactgggttgaccctaaccaaggatgcaaattggatgctatcaaggtattctgtaatatggaaactggggaaacatgcataagtgccaatcctttgaatgttccacggaaacactggtggacagattctagtgctgagaagaaacacgtttggtttggagagtccatggatggtggttttcagtttagctacggcaatcctgaacttcctgaagatgtccttgatgtgcagctggcattccttcgacttctctccagccgagcttcccagaacatcacatatcactgcaaaaatagcattgcatacatggatcaggccagtggaaatgtaaagaaggccctgaagctgatggggtcaaatgaaggtgaattcaaggctgaaggaaatagcaaattcacctacacagttctggaggatggttgcacgaaacactggtggacagattctagtgctgagaagaaacacgtttggtttggagagtccatggatggtggttttcagtttagctacggcaatcctgaacttcctgaagatgtccttgatgtgcagctggcattccttcgacttctctccagccgagcttc

SEQ ID NO: 58791 - DNA, 4715 bp, Homo sapiens
accccagaaaactacgatagcccttatgaaacttaagggtcgaaggtggatttagcagtaaactaagagtagagtgcttagttgaacagggccctgaagcgcgtacacaccgcccgtcaccctcctcaagtatacttcaaaggacatttaactaaaacccctacgcatttatatagaggagacaagtcgtaacatggtaagtgtactggaaagtgcacttggacgaactggctgagttttatgacgggcccggtgctgaagggcagggaacaacttgatggtgctactttgaactgcttttcttttctcctttttgcacaaagagtctcatgtctgatatttagacatgatgagctttgtgcaaaaggggagctggctacttctcgctctgcttcatcccactattattttggcacaacaggaagctgttgaaggaggatgttcccatcttggtcagtcctatgcggatagagatgtctggaagccagaaccatgccaaatatgtgtctgtgactcaggatccgttctctgcgatgacataatatgtgacgatcaagaattagactgccccaacccagaaattccatttggagaatgttgtgcagtttgcccacagcctccaactgctcctactcgccctcctaatggtcaaggacctcaaggccccaagggagatccaggccctcctggtattcctgggagaaatggtgaccctggtattccaggacaaccagggtcccctggttctcctggcccccctggaatctgtgaatcatgccctactggtcctcagaactattctccccagtatgattcatatgatgtcaagtctggagtagcagtaggaggactcgcaggctatcctggaccagctggccccccaggccctcccggtccccctggtacatctggtcatcctggttcccctggatctccaggataccaaggaccccctggtgaacctgggcaagctggtccttcaggccctccaggacctcctggtgctataggtccatctggtcctgctggaaaagatggagaatcaggtagacccggacgacctggagagcgaggattgcctggacctccaggtatcaaaggtccagctgggatacctggattccctggtatgaaaggacacagaggcttcgatggacgaaatggagaaaagggtgaaacaggtgctcctggattaaagggtgaaaatggtcttccaggcgaaaatggagctcctggacccatgggtccaagaggggctcctggtgagcgaggacggccaggacttcctggggctgcaggtgctcggggtaatgacggtgctcgaggcagtgatggtcaaccaggccctcctggtcctcctggaactgccggattccctggatcccctggtgctaagggtgaagttggacctgcagggtctcctggttcaaatggtgcccctggacaaagaggagaacctggacctcagggacacgctggtgctcaaggtcctcctggccctcctgggattaatggtagtcctggtggtaaaggcgaaatgggtcccgctggcattcctggagctcctggactgatgggagcccggggtcctccaggaccagccggtgctaatggtgctcctggactgcgaggtggtgcaggtgagcctggtaagaatggtgccaaaggagagcccggaccacgtggtgaacgcggtgaggctggtattccaggtgttccaggagctaaaggcgaagatggcaaggatggatcacctggagaacctggtgcaaatgggcttccaggagctgcaggagaaaggggtgcccctgggttccgaggacctgctggaccaaatggcatcccaggagaaaagggtcctgctggagagcgtggtgctccaggccctgcagggcccagaggagctgctggagaacctggcagagatggcgtccctggaggtccaggaatgaggggcatgcccggaagtccaggaggaccaggaagtgatgggaaaccagggcctcccggaagtcaaggagaaagtggtcgaccaggtcctcctgggccatctggtccccgaggtcagcctggtgtcatgggcttccccggtcctaaaggaaatgatggtgctcctggtaagaatggagaacgaggtggccctggaggacctggccctcagggtcctcctggaaagaatggtgaaactggacctcaaggacccccagggcctactgggcctggtggtgacaaaggagacacaggaccccctggtccacaaggattacaaggcttgcctggtacaggtggtcctccaggagaaaatggaaaacctggggaaccaggtccaaagggtgatgccggtgcacctggagctccaggaggcaagggtgatgctggtgcccctggtgaacgtggacctcctggattggcaggggccccaggacttagaggtggagctggtccccctggtcccgaaggaggaaagggtgctgctggtcctcctgggccacctggtgctgctggtactcctggtctgcaaggaatgcctggagaaagaggaggtcttggaagtcctggtccaaagggtgacaagggtgaaccaggcggtccaggtgctgatggtgtcccagggaaagatggcccaaggggtcctactggtcctattggtcctcctggcccagctggccagcctggagataagggtgaaggtggtgcccccggacttccaggtatagctggacctcgtggtagccctggtgagagaggtgaaactggccctccaggacctgctggtttccctggtgctcctggacagaatggtgaacctggtggtaaaggagaaagaggggctccgggtgagaaaggtgaaggaggccctcctggagttgcaggaccccctggaggttctggacctgctggtcctcctggtccccaaggtgtcaaaggtgaacgtggcagtcctggtggacctggtgctgctggcttccctggtgctcgtggtcttcctggtcctcctggtagtaatggtaacccaggacccccaggtcccagcggttctccaggcaaggatgggcccccaggtcctgcgggtaacactggtgctcctggcagccctggagtgtctggaccaaaaggtgatgctggccaaccaggagagaagggatcgcctggtgcccagggcccaccaggagctccaggcccacttgggattgctgggatcactggagcacggggtcttgcaggaccaccaggcatgccaggtcctaggggaagccctggccctcagggtgtcaagggtgaaagtgggaaaccaggagctaacggtctcagtggagaacgtggtccccctggaccccagggtcttcctggtctggctggtacagctggtgaacctggaagagatggaaaccctggatcagatggtcttccaggccgagatggatctcctggtggcaagggtgatcgtggtgaaaatggctctcctggtgcccctggcgctcctggtcatccaggcccacctggtcctgtcggtccagctggaaagagtggtgacagaggagaaagtggccctgctggccctgctggtgctcccggtcctgctggttcccgaggtgctcctggtcctcaaggcccacgtggtgacaaaggtgaaacaggtgaacgtggagctgctggcatcaaaggacatcgaggattccctggtaatccaggtgccccaggttctccaggccctgctggtcagcagggtgcaatcggcagtccaggacctgcaggccccagaggacctgttggacccagtggacctcctggcaaagatggaaccagtggacatccaggtcccattggaccaccagggcctcgaggtaacagaggtgaaagaggatctgagggctccccaggccacccagggcaaccaggccctcctggacctcctggtgcccctggtccttgctgtggtggtgttggagccgctgccattgctgggattggaggtgaaaaagctggcggttttgccccgtattatggagatgaaccaatggatttcaaaatcaacaccgatgagattatgacttcactcaagtctgttaatggacaaatagaaagcctcattagtcctgatggttctcgtaaaaaccccgctagaaactgcagagacctgaaattctgccatcctgaactcaagagtggagaatactgggttgaccctaaccaaggatgcaaattggatgctatcaaggtattctgtaatatggaaactggggaaacatgcataagtgccaatcctttgaatgttccacggaaacactggtggacagattctagtgctgagaagaaacacgtttggtttggagagtccatggatggtggttttcagtttagctacggcaatcctgaacttcctgaagatgtccttgatgtgcagctggcattccttcgacttctctccagccgagcttcccagaacatcacatatcactgcaaaaatagcattgcatacatggatcaggccagtggaaatgtaaagaaggccctgaagctgatggggtcaaatgaagaaacacactggggaatggagcaaaacagtctttgaatatcgaacacgcaaggctgtgagactacctattgtagatattgcaccctatgacattggtggtcctgatcaagaatttggtgtggacgttggccctgtttgctttttataaaccaaactctatctgaaatcccaacaaaaa

SEQ ID NO: 58792 - DNA, 4472 bp, Homo sapiens
accccagaaaactacgatagcccttatgaaacttaagggtcgaaggtggatttagcagtaaactaagagtagagtgcttagttgaacagggccctgaagcgcgtacacaccgcccgtcaccctcctcaagtatacttcaaaggacatttaactaaaacccctacgcatttatatagaggagacaagtcgtaacatggtaagtgtactggaaagtgcacttggacgaactggctgagttttatgacgggcccggtgctgaagggcagggaacaacttgatggtgctactttgaactgcttttcttttctcctttttgcacaaagagtctcatgtctgatatttagacatgatgagctttgtgcaaaaggggagctggctacttctcgctctgcttcatcccactattattttggcacaacaggaagctgttgaaggaggatgttcccatcttggtcagtcctatgcggatagagatgtctggaagccagaaccatgccaaatatgtgtctgtgactcaggatccgttctctgcgatgacataatatgtgacgatcaagaattagactgccccaacccagaaattccatttggagaatgttgtgcagtttgcccacagcctccaactgctcctactcgccctcctaatggtcaaggacctcaaggccccaagggagatccaggccctcctggtattcctgggagaaatggtgaccctggtattccaggacaaccagggtcccctggttctcctggcccccctggaatctgtgaatcatgccctactggtcctcagaactattctccccagtatgattcatatgatgtcaagtctggagtagcagtaggaggactcgcaggctatcctggaccagctggccccccaggccctcccggtccccctggtacatctggtcatcctggttcccctggatctccaggataccaaggaccccctggtgaacctgggcaagctggtccttcaggccctccaggacctcctggtgctataggtccatctggtcctgctggaaaagatggagaatcaggtagacccggacgacctggagagcgaggattgcctggacctccaggtatcaaaggtccagctgggatacctggattccctggtatgaaaggacacagaggcttcgatggacgaaatggagaaaagggtgaaacaggtgctcctggattaaagggtgaaaatggtcttccaggcgaaaatggagctcctggacccatgggtccaagaggggctcctggtgagcgaggacggccaggacttcctggggctgcaggtgctcggggtaatgacggtgctcgaggcagtgatggtcaaccaggccctcctggtcctcctggaactgccggattccctggatcccctggtgctaagggtgaagttggacctgcagggtctcctggttcaaatggtgcccctggacaaagaggagaacctggacctcagggacacgctggtgctcaaggtcctcctggccctcctgggattaatggtagtcctggtggtaaaggcgaaatgggtcccgctggcattcctggagctcctggactgatgggagcccggggtcctccaggaccagccggtgctaatggtgctcctggactgcgaggtggtgcaggtgagcctggtaagaatggtgccaaaggagagcccggaccacgtggtgaacgcggtgaggctggtattccaggtgttccaggagctaaaggcgaagatggcaaggatggatcacctggagaacctggtgcaaatgggcttccaggagctgcaggagaaaggggtgcccctgggttccgaggacctgctggaccaaatggcatcccaggagaaaagggtcctgctggagagcgtggtgctccaggccctgcagggcccagaggagctgctggagaacctggcagagatggcgtccctggaggtccaggaatgaggggcatgcccggaagtccaggaggaccaggaagtgatgggaaaccagggcctcccggaagtcaaggagaaagtggtcgaccaggtcctcctgggccatctggtccccgaggtcagcctggtgtcatgggcttccccggtcctaaaggaaatgatggtgctcctggtaagaatggagaacgaggtggccctggaggacctggccctcagggtcctcctggaaagaatggtgaaactggacctcaaggacccccagggcctactgggcctggtggtgacaaaggagacacaggaccccctggtccacaaggattacaaggcttgcctggtacaggtggtcctccaggagaaaatggaaaacctggggaaccaggtccaaagggtgatgccggtgcacctggagctccaggaggcaagggtgatgctggtgcccctggtgaacgtggacctcctggattggcaggggccccaggacttagaggtggagctggtccccctggtcccgaaggaggaaagggtgctgctggtcctcctgggccacctggtgctgctggtactcctggtctgcaaggaatgcctggagaaagaggaggtcttggaagtcctggtccaaagggtgacaagggtgaaccaggcggtccaggtgctgatggtgtcccagggaaagatggcccaaggggtcctactggtcctattggtcctcctggcccagctggccagcctggagataagggtgaaggtggtgcccccggacttccaggtatagctggacctcgtggtagccctggtgagagaggtgaaactggccctccaggacctgctggtttccctggtgctcctggacagaatggtgaacctggtggtaaaggagaaagaggggctccgggtgagaaaggtgaaggaggccctcctggagttgcaggaccccctggaggttctggacctgctggtcctcctggtccccaaggtgtcaaaggtgaacgtggcagtcctggtggacctggtgctgctggcttccctggtgctcgtggtcttcctggtcctcctggtagtaatggtaacccaggacccccaggtcccagcggttctccaggcaaggatgggcccccaggtcctgcgggtaacactggtgctcctggcagccctggagtgtctggaccaaaaggtgatgctggccaaccaggagagaagggatcgcctggtgcccagggcccaccaggagctccaggcccacttgggattgctgggatcactggagcacggggtcttgcaggaccaccaggcatgccaggtcctaggggaagccctggccctcagggtgtcaagggtgaaagtgggaaaccaggagctaacggtctcagtggagaacgtggtccccctggaccccagggtcttcctggtctggctggtacagctggtgaacctggaagagatggaaaccctggatcagatggtcttccaggccgagatggatctcctggtggcaagggtgatcgtggtgaaaatggctctcctggtgcccctggcgctcctggtcatccaggcccacctggtcctgtcggtccagctggaaagagtggtgacagaggagaaagtggccctgctggccctgctggtgctcccggtcctgctggttcccgaggtgctcctggtcctcaaggcccacgtggtgacaaaggtgaaacaggtgaacgtggagctgctggcatcaaaggacatcgaggattccctggtaatccaggtgccccaggttctccaggccctgctggtcagcagggtgcaatcggcagtccaggacctgcaggccccagaggacctgttggacccagtggacctcctggcaaagatggaaccagtggacatccaggtcccattggaccaccagggcctcgaggtaacagaggtgaaagaggatctgagggctccccaggccacccagggcaaccaggccctcctggacctcctggtgcccctggtccttgctgtggtggtgttggagccgctgccattgctgggattggaggtgaaaaagctggcggttttgccccgtattatggagatgaaccaatggatttcaaaatcaacaccgatgagattatgacttcactcaagtctgttaatggacaaatagaaagcctcattagtcctgatggttctcgtaaaaaccccgctagaaactgcagagacctgaaattctgccatcctgaactcaagagtggagaatactgggttgaccctaaccaaggatgcaaattggatgctatcaaggtattctgtaatatggaaactggggaaacatgcataagtgccaatcctttgaatgttccacggaaacactggtggacagattctagtgctgagaagaaacacgtttggtttggagagtccatggatggtggttttcagtttagctacggcaatcctgaacttcctgaagatgtccttgatgtgcagctggcattccttcgacttctctccagccgagcttcataaccttttgcttcagggaagcacggttctt

SEQ ID NO: 58793 - DNA, 4381 bp, Homo sapiens
accccagaaaactacgatagcccttatgaaacttaagggtcgaaggtggatttagcagtaaactaagagtagagtgcttagttgaacagggccctgaagcgcgtacacaccgcccgtcaccctcctcaagtatacttcaaaggacatttaactaaaacccctacgcatttatatagaggagacaagtcgtaacatggtaagtgtactggaaagtgcacttggacgaactggctgagttttatgacgggcccggtgctgaagggcagggaacaacttgatggtgctactttgaactgcttttcttttctcctttttgcacaaagagtctcatgtctgatatttagacatgatgagctttgtgcaaaaggggagctggctacttctcgctctgcttcatcccactattattttggcacaacaggaagctgttgaaggaggatgttcccatcttggtcagtcctatgcggatagagatgtctggaagccagaaccatgccaaatatgtgtctgtgactcaggatccgttctctgcgatgacataatatgtgacgatcaagaattagactgccccaacccagaaattccatttggagaatgttgtgcagtttgcccacagcctccaactgctcctactcgccctcctaatggtcaaggacctcaaggccccaagggagatccaggccctcctggtattcctgggagaaatggtgaccctggtattccaggacaaccagggtcccctggttctcctggcccccctggaatctgtgaatcatgccctactggtcctcagaactattctccccagtatgattcatatgatgtcaagtctggagtagcagtaggaggactcgcaggctatcctggaccagctggccccccaggccctcccggtccccctggtacatctggtcatcctggttcccctggatctccaggataccaaggaccccctggtgaacctgggcaagctggtccttcaggccctccaggacctcctggtgctataggtccatctggtcctgctggaaaagatggagaatcaggtagacccggacgacctggagagcgaggattgcctggacctccaggtatcaaaggtccagctgggatacctggattccctggtatgaaaggacacagaggcttcgatggacgaaatggagaaaagggtgaaacaggtgctcctggattaaagggtgaaaatggtcttccaggcgaaaatggagctcctggacccatgggtccaagaggggctcctggtgagcgaggacggccaggacttcctggggctgcaggtgctcggggtaatgacggtgctcgaggcagtgatggtcaaccaggccctcctggtcctcctggaactgccggattccctggatcccctggtgctaagggtgaagttggacctgcagggtctcctggttcaaatggtgcccctggacaaagaggagaacctggacctcagggacacgctggtgctcaaggtcctcctggccctcctgggattaatggtagtcctggtggtaaaggcgaaatgggtcccgctggcattcctggagctcctggactgatgggagcccggggtcctccaggaccagccggtgctaatggtgctcctggactgcgaggtggtgcaggtgagcctggtaagaatggtgccaaaggagagcccggaccacgtggtgaacgcggtgaggctggtattccaggtgttccaggagctaaaggcgaagatggcaaggatggatcacctggagaacctggtgcaaatgggcttccaggagctgcaggagaaaggggtgcccctgggttccgaggacctgctggaccaaatggcatcccaggagaaaagggtcctgctggagagcgtggtgctccaggccctgcagggcccagaggagctgctggagaacctggcagagatggcgtccctggaggtccaggaatgaggggcatgcccggaagtccaggaggaccaggaagtgatgggaaaccagggcctcccggaagtcaaggagaaagtggtcgaccaggtcctcctgggccatctggtccccgaggtcagcctggtgtcatgggcttccccggtcctaaaggaaatgatggtgctcctggtaagaatggagaacgaggtggccctggaggacctggccctcagggtcctcctggaaagaatggtgaaactggacctcaaggacccccagggcctactgggcctggtggtgacaaaggagacacaggaccccctggtccacaaggattacaaggcttgcctggtacaggtggtcctccaggagaaaatggaaaacctggggaaccaggtccaaagggtgatgccggtgcacctggagctccaggaggcaagggtgatgctggtgcccctggtgaacgtggacctcctggattggcaggggccccaggacttagaggtggagctggtccccctggtcccgaaggaggaaagggtgctgctggtcctcctgggccacctggtgctgctggtactcctggtctgcaaggaatgcctggagaaagaggaggtcttggaagtcctggtccaaagggtgacaagggtgaaccaggcggtccaggtgctgatggtgtcccagggaaagatggcccaaggggtcctactggtcctattggtcctcctggcccagctggccagcctggagataagggtgaaggtggtgcccccggacttccaggtatagctggacctcgtggtagccctggtgagagaggtgaaactggccctccaggacctgctggtttccctggtgctcctggacagaatggtgaacctggtggtaaaggagaaagaggggctccgggtgagaaaggtgaaggaggccctcctggagttgcaggaccccctggaggttctggacctgctggtcctcctggtccccaaggtgtcaaaggtgaacgtggcagtcctggtggacctggtgctgctggcttccctggtgctcgtggtcttcctggtcctcctggtagtaatggtaacccaggacccccaggtcccagcggttctccaggcaaggatgggcccccaggtcctgcgggtaacactggtgctcctggcagccctggagtgtctggaccaaaaggtgatgctggccaaccaggagagaagggatcgcctggtgcccagggcccaccaggagctccaggcccacttgggattgctgggatcactggagcacggggtcttgcaggaccaccaggcatgccaggtcctaggggaagccctggccctcagggtgtcaagggtgaaagtgggaaaccaggagctaacggtctcagtggagaacgtggtccccctggaccccagggtcttcctggtctggctggtacagctggtgaacctggaagagatggaaaccctggatcagatggtcttccaggccgagatggatctcctggtggcaagggtgatcgtggtgaaaatggctctcctggtgcccctggcgctcctggtcatccaggcccacctggtcctgtcggtccagctggaaagagtggtgacagaggagaaagtggccctgctggccctgctggtgctcccggtcctgctggttcccgaggtgctcctggtcctcaaggcccacgtggtgacaaaggtgaaacaggtgaacgtggagctgctggcatcaaaggacatcgaggattccctggtaatccaggtgccccaggttctccaggccctgctggtcagcagggtgcaatcggcagtccaggacctgcaggccccagaggacctgttggacccagtggacctcctggcaaagatggaaccagtggacatccaggtcccattggaccaccagggcctcgaggtaacagaggtgaaagaggatctgagggctccccaggccacccagggcaaccaggccctcctggacctcctggtgcccctggtccttgctgtggtggtgttggagccgctgccattgctgggattggaggtgaaaaagctggcggttttgccccgtattatggagatgaaccaatggatttcaaaatcaacaccgatgagattatgacttcactcaagtctgttaatggacaaatagaaagcctcattagtcctgatggttctcgtaaaaaccccgctagaaactgcagagacctgaaattctgccatcctgaactcaagagtggagaatactgggttgaccctaaccaaggatgcaaattggatgctatcaaggtattctgtaatatggaaactggggaaacatgcataagtgccaatcctttgaatgttccacggaaacactggtggacagattctagtgctgagaagaaacacgtttggtttggagagtccatggatggtggttttcaggtctctctagctgaataatctcaa

SEQ ID NO: 58794 - DNA, 3922 bp, Homo sapiens
  misc_feature (3913)..(3913): n is a, c, g, or t
  misc_feature (3919)..(3919): n is a, c, g, or t
accccagaaaactacgatagcccttatgaaacttaagggtcgaaggtggatttagcagtaaactaagagtagagtgcttagttgaacagggccctgaagcgcgtacacaccgcccgtcaccctcctcaagtatacttcaaaggacatttaactaaaacccctacgcatttatatagaggagacaagtcgtaacatggtaagtgtactggaaagtgcacttggacgaactggctgagttttatgacgggcccggtgctgaagggcagggaacaacttgatggtgctactttgaactgcttttcttttctcctttttgcacaaagagtctcatgtctgatatttagacatgatgagctttgtgcaaaaggggagctggctacttctcgctctgcttcatcccactattattttggcacaacaggaagctgttgaaggaggatgttcccatcttggtcagtcctatgcggatagagatgtctggaagccagaaccatgccaaatatgtgtctgtgactcaggatccgttctctgcgatgacataatatgtgacgatcaagaattagactgccccaacccagaaattccatttggagaatgttgtgcagtttgcccacagcctccaactgctcctactcgccctcctaatggtcaaggacctcaaggccccaagggagatccaggccctcctggtattcctgggagaaatggtgaccctggtattccaggacaaccagggtcccctggttctcctggcccccctggaatctgtgaatcatgccctactggtcctcagaactattctccccagtatgattcatatgatgtcaagtctggagtagcagtaggaggactcgcaggctatcctggaccagctggccccccaggccctcccggtccccctggtacatctggtcatcctggttcccctggatctccaggataccaaggaccccctggtgaacctgggcaagctggtccttcaggccctccaggacctcctggtgctataggtccatctggtcctgctggaaaagatggagaatcaggtagacccggacgacctggagagcgaggattgcctggacctccaggtatcaaaggtccagctgggatacctggattccctggtatgaaaggacacagaggcttcgatggacgaaatggagaaaagggtgaaacaggtgctcctggattaaagggtgaaaatggtcttccaggcgaaaatggagctcctggacccatgggtccaagaggggctcctggtgagcgaggacggccaggacttcctggggctgcaggtgctcggggtaatgacggtgctcgaggcagtgatggtcaaccaggccctcctggtcctcctggaactgccggattccctggatcccctggtgctaagggtgaagttggacctgcagggtctcctggttcaaatggtgcccctggacaaagaggagaacctggacctcagggacacgctggtgctcaaggtcctcctggccctcctgggattaatggtagtcctggtggtaaaggcgaaatgggtcccgctggcattcctggagctcctggactgatgggagcccggggtcctccaggaccagccggtgctaatggtgctcctggactgcgaggtggtgcaggtgagcctggtaagaatggtgccaaaggagagcccggaccacgtggtgaacgcggtgaggctggtattccaggtgttccaggagctaaaggcgaagatggcaaggatggatcacctggagaacctggtgcaaatgggcttccaggagctgcaggagaaaggggtgcccctgggttccgaggacctgctggaccaaatggcatcccaggagaaaagggtcctgctggagagcgtggtgctccaggccctgcagggcccagaggagctgctggagaacctggcagagatggcgtccctggaggtccaggaatgaggggcatgcccggaagtccaggaggaccaggaagtgatgggaaaccagggcctcccggaagtcaaggagaaagtggtcgaccaggtcctcctgggccatctggtccccgaggtcagcctggtgtcatgggcttccccggtcctaaaggaaatgatggtgctcctggtaagaatggagaacgaggtggccctggaggacctggccctcagggtcctcctggaaagaatggtgaaactggacctcaaggacccccagggcctactgggcctggtggtgacaaaggagacacaggaccccctggtccacaaggattacaaggcttgcctggtacaggtggtcctccaggagaaaatggaaaacctggggaaccaggtccaaagggtgatgccggtgcacctggagctccaggaggcaagggtgatgctggtgcccctggtgaacgtggacctcctggattggcaggggccccaggacttagaggtggagctggtccccctggtcccgaaggaggaaagggtgctgctggtcctcctgggccacctggtgctgctggtactcctggtctgcaaggaatgcctggagaaagaggaggtcttggaagtcctggtccaaagggtgacaagggtgaaccaggcggtccaggtgctgatggtgtcccagggaaagatggcccaaggggtcctactggtcctattggtcctcctggcccagctggccagcctggagataagggtgaaggtggtgcccccggacttccaggtatagctggacctcgtggtagccctggtgagagaggtgaaactggccctccaggacctgctggtttccctggtgctcctggacagaatggtgaacctggtggtaaaggagaaagaggggctccgggtgagaaaggtgaaggaggccctcctggagttgcaggaccccctggaggttctggacctgctggtcctcctggtccccaaggtgtcaaaggtgaacgtggcagtcctggtggacctggtgctgctggcttccctggtgctcgtggtcttcctggtcctcctggtagtaatggtaacccaggacccccaggtcccagcggttctccaggcaaggatgggcccccaggtcctgcgggtaacactggtgctcctggcagccctggagtgtctggaccaaaaggtgatgctggccaaccaggagagaagggatcgcctggtgcccagggcccaccaggagctccaggcccacttgggattgctgggatcactggagcacggggtcttgcaggaccaccaggcatgccaggtcctaggggaagccctggccctcagggtgtcaagggtgaaagtgggaaaccaggagctaacggtctcagtggagaacgtggtccccctggaccccagggtcttcctggtctggctggtacagctggtgaacctggaagagatggaaaccctggatcagatggtcttccaggccgagatggatctcctggtggcaagggtgatcgtggtgaaaatggctctcctggtgcccctggcgctcctggtcatccaggcccacctggtcctgtcggtccagctggaaagagtggtgacagaggagaaagtggccctgctggccctgctggtgctcccggtcctgctggttcccgaggtgctcctggtcctcaaggcccacgtggtgacaaaggtgaaacaggtgaacgtggagctgctggcatcaaaggacatcgaggattccctggtaatccaggtgccccaggttctccaggccctgctggtcagcagggtgcaatcggcagtccaggacctgcaggccccagaggacctgttggacccagtggacctcctggcaaagatggaaccagtggacatccaggtcccattggaccaccagggcctcgaggtaacagaggtgaaagaggatctgagggctccccaggccacccagggagggggatcctcaagcgaccncggacnaac

SEQ ID NO: 58795 - DNA, 3961 bp, Homo sapiens
accccagaaaactacgatagcccttatgaaacttaagggtcgaaggtggatttagcagtaaactaagagtagagtgcttagttgaacagggccctgaagcgcgtacacaccgcccgtcaccctcctcaagtatacttcaaaggacatttaactaaaacccctacgcatttatatagaggagacaagtcgtaacatggtaagtgtactggaaagtgcacttggacgaactggctgagttttatgacgggcccggtgctgaagggcagggaacaacttgatggtgctactttgaactgcttttcttttctcctttttgcacaaagagtctcatgtctgatatttagacatgatgagctttgtgcaaaaggggagctggctacttctcgctctgcttcatcccactattattttggcacaacaggaagctgttgaaggaggatgttcccatcttggtcagtcctatgcggatagagatgtctggaagccagaaccatgccaaatatgtgtctgtgactcaggatccgttctctgcgatgacataatatgtgacgatcaagaattagactgccccaacccagaaattccatttggagaatgttgtgcagtttgcccacagcctccaactgctcctactcgccctcctaatggtcaaggacctcaaggccccaagggagatccaggccctcctggtattcctgggagaaatggtgaccctggtattccaggacaaccagggtcccctggttctcctggcccccctggaatctgtgaatcatgccctactggtcctcagaactattctccccagtatgattcatatgatgtcaagtctggagtagcagtaggaggactcgcaggctatcctggaccagctggccccccaggccctcccggtccccctggtacatctggtcatcctggttcccctggatctccaggataccaaggaccccctggtgaacctgggcaagctggtccttcaggccctccaggacctcctggtgctataggtccatctggtcctgctggaaaagatggagaatcaggtagacccggacgacctggagagcgaggattgcctggacctccaggtatcaaaggtccagctgggatacctggattccctggtatgaaaggacacagaggcttcgatggacgaaatggagaaaagggtgaaacaggtgctcctggattaaagggtgaaaatggtcttccaggcgaaaatggagctcctggacccatgggtccaagaggggctcctggtgagcgaggacggccaggacttcctggggctgcaggtgctcggggtaatgacggtgctcgaggcagtgatggtcaaccaggccctcctggtcctcctggaactgccggattccctggatcccctggtgctaagggtgaagttggacctgcagggtctcctggttcaaatggtgcccctggacaaagaggagaacctggacctcagggacacgctggtgctcaaggtcctcctggccctcctgggattaatggtagtcctggtggtaaaggcgaaatgggtcccgctggcattcctggagctcctggactgatgggagcccggggtcctccaggaccagccggtgctaatggtgctcctggactgcgaggtggtgcaggtgagcctggtaagaatggtgccaaaggagagcccggaccacgtggtgaacgcggtgaggctggtattccaggtgttccaggagctaaaggcgaagatggcaaggatggatcacctggagaacctggtgcaaatgggcttccaggagctgcaggagaaaggggtgcccctgggttccgaggacctgctggaccaaatggcatcccaggagaaaagggtcctgctggagagcgtggtgctccaggccctgcagggcccagaggagctgctggagaacctggcagagatggcgtccctggaggtccaggaatgaggggcatgcccggaagtccaggaggaccaggaagtgatgggaaaccagggcctcccggaagtcaaggagaaagtggtcgaccaggtcctcctgggccatctggtccccgaggtcagcctggtgtcatgggcttccccggtcctaaaggaaatgatggtgctcctggtaagaatggagaacgaggtggccctggaggacctggccctcagggtcctcctggaaagaatggtgaaactggacctcaaggacccccagggcctactgggcctggtggtgacaaaggagacacaggaccccctggtccacaaggattacaaggcttgcctggtacaggtggtcctccaggagaaaatggaaaacctggggaaccaggtccaaagggtgatgccggtgcacctggagctccaggaggcaagggtgatgctggtgcccctggtgaacgtggacctcctggattggcaggggccccaggacttagaggtggagctggtccccctggtcccgaaggaggaaagggtgctgctggtcctcctgggccacctggtgctgctggtactcctggtctgcaaggaatgcctggagaaagaggaggtcttggaagtcctggtccaaagggtgacaagggtgaaccaggcggtccaggtgctgatggtgtcccagggaaagatggcccaaggggtcctactggtcctattggtcctcctggcccagctggccagcctggagataagggtgaaggtggtgcccccggacttccaggtatagctggacctcgtggtagccctggtgagagaggtgaaactggccctccaggacctgctggtttccctggtgctcctggacagaatggtgaacctggtggtaaaggagaaagaggggctccgggtgagaaaggtgaaggaggccctcctggagttgcaggaccccctggaggttctggacctgctggtcctcctggtccccaaggtgtcaaaggtgaacgtggcagtcctggtggacctggtgctgctggcttccctggtgctcgtggtcttcctggtcctcctggtagtaatggtaacccaggacccccaggtcccagcggttctccaggcaaggatgggcccccaggtcctgcgggtaacactggtgctcctggcagccctggagtgtctggaccaaaaggtgatgctggccaaccaggagagaagggatcgcctggtgcccagggcccaccaggagctccaggcccacttgggattgctgggatcactggagcacggggtcttgcaggaccaccaggcatgccaggtcctaggggaagccctggccctcagggtgtcaagggtgaaagtgggaaaccaggagctaacggtctcagtggagaacgtggtccccctggaccccagggtcttcctggtctggctggtacagctggtgaacctggaagagatggaaaccctggatcagatggtcttccaggccgagatggatctcctggtggcaagggtgatcgtggtgaaaatggctctcctggtgcccctggcgctcctggtcatccaggcccacctggtcctgtcggtccagctggaaagagtggtgacagaggagaaagtggccctgctggccctgctggtgctcccggtcctgctggttcccgaggtgctcctggtcctcaaggcccacgtggtgacaaaggtgaaacaggtgaacgtggagctgctggcatcaaaggacatcgaggattccctggtaatccaggtgccccaggttctccaggcctgttgtcagcagggtgcaatcggtcgtccaggaactgtggcccagaggacctgttggcccagtggactcctgggaaggatggacctgtgggctcccgtccttggaccacgggtcttgagtgaccggggtgagacggttgggggtcccagggccctggcgcaagcctcttgcctctgtgcctggtctgttgtgtttggccgctgtggtggtggtactcgtttccgtttgggactgttaaaccggttttc

SEQ ID NO: 58796 - DNA, 3725 bp, Homo sapiens
accccagaaaactacgatagcccttatgaaacttaagggtcgaaggtggatttagcagtaaactaagagtagagtgcttagttgaacagggccctgaagcgcgtacacaccgcccgtcaccctcctcaagtatacttcaaaggacatttaactaaaacccctacgcatttatatagaggagacaagtcgtaacatggtaagtgtactggaaagtgcacttggacgaactggctgagttttatgacgggcccggtgctgaagggcagggaacaacttgatggtgctactttgaactgcttttcttttctcctttttgcacaaagagtctcatgtctgatatttagacatgatgagctttgtgcaaaaggggagctggctacttctcgctctgcttcatcccactattattttggcacaacaggaagctgttgaaggaggatgttcccatcttggtcagtcctatgcggatagagatgtctggaagccagaaccatgccaaatatgtgtctgtgactcaggatccgttctctgcgatgacataatatgtgacgatcaagaattagactgccccaacccagaaattccatttggagaatgttgtgcagtttgcccacagcctccaactgctcctactcgccctcctaatggtcaaggacctcaaggccccaagggagatccaggccctcctggtattcctgggagaaatggtgaccctggtattccaggacaaccagggtcccctggttctcctggcccccctggaatctgtgaatcatgccctactggtcctcagaactattctccccagtatgattcatatgatgtcaagtctggagtagcagtaggaggactcgcaggctatcctggaccagctggccccccaggccctcccggtccccctggtacatctggtcatcctggttcccctggatctccaggataccaaggaccccctggtgaacctgggcaagctggtccttcaggccctccaggacctcctggtgctataggtccatctggtcctgctggaaaagatggagaatcaggtagacccggacgacctggagagcgaggattgcctggacctccaggtatcaaaggtccagctgggatacctggattccctggtatgaaaggacacagaggcttcgatggacgaaatggagaaaagggtgaaacaggtgctcctggattaaagggtgaaaatggtcttccaggcgaaaatggagctcctggacccatgggtccaagaggggctcctggtgagcgaggacggccaggacttcctggggctgcaggtgctcggggtaatgacggtgctcgaggcagtgatggtcaaccaggccctcctggtcctcctggaactgccggattccctggatcccctggtgctaagggtgaagttggacctgcagggtctcctggttcaaatggtgcccctggacaaagaggagaacctggacctcagggacacgctggtgctcaaggtcctcctggccctcctgggattaatggtagtcctggtggtaaaggcgaaatgggtcccgctggcattcctggagctcctggactgatgggagcccggggtcctccaggaccagccggtgctaatggtgctcctggactgcgaggtggtgcaggtgagcctggtaagaatggtgccaaaggagagcccggaccacgtggtgaacgcggtgaggctggtattccaggtgttccaggagctaaaggcgaagatggcaaggatggatcacctggagaacctggtgcaaatgggcttccaggagctgcaggagaaaggggtgcccctgggttccgaggacctgctggaccaaatggcatcccaggagaaaagggtcctgctggagagcgtggtgctccaggccctgcagggcccagaggagctgctggagaacctggcagagatggcgtccctggaggtccaggaatgaggggcatgcccggaagtccaggaggaccaggaagtgatgggaaaccagggcctcccggaagtcaaggagaaagtggtcgaccaggtcctcctgggccatctggtccccgaggtcagcctggtgtcatgggcttccccggtcctaaaggaaatgatggtgctcctggtaagaatggagaacgaggtggccctggaggacctggccctcagggtcctcctggaaagaatggtgaaactggacctcaaggacccccagggcctactgggcctggtggtgacaaaggagacacaggaccccctggtccacaaggattacaaggcttgcctggtacaggtggtcctccaggagaaaatggaaaacctggggaaccaggtccaaagggtgatgccggtgcacctggagctccaggaggcaagggtgatgctggtgcccctggtgaacgtggacctcctggattggcaggggccccaggacttagaggtggagctggtccccctggtcccgaaggaggaaagggtgctgctggtcctcctgggccacctggtgctgctggtactcctggtctgcaaggaatgcctggagaaagaggaggtcttggaagtcctggtccaaagggtgacaagggtgaaccaggcggtccaggtgctgatggtgtcccagggaaagatggcccaaggggtcctactggtcctattggtcctcctggcccagctggccagcctggagataagggtgaaggtggtgcccccggacttccaggtatagctggacctcgtggtagccctggtgagagaggtgaaactggccctccaggacctgctggtttccctggtgctcctggacagaatggtgaacctggtggtaaaggagaaagaggggctccgggtgagaaaggtgaaggaggccctcctggagttgcaggaccccctggaggttctggacctgctggtcctcctggtccccaaggtgtcaaaggtgaacgtggcagtcctggtggacctggtgctgctggcttccctggtgctcgtggtcttcctggtcctcctggtagtaatggtaacccaggacccccaggtcccagcggttctccaggcaaggatgggcccccaggtcctgcgggtaacactggtgctcctggcagccctggagtgtctggaccaaaaggtgatgctggccaaccaggagagaagggatcgcctggtgcccagggcccaccaggagctccaggcccacttgggattgctgggatcactggagcacggggtcttgcaggaccaccaggcatgccaggtcctaggggaagccctggccctcagggtgtcaagggtgaaagtgggaaaccaggagctaacggtctcagtggagaacgtggtccccctggaccccagggtcttcctggtctggctggtacagctggtgaacctggaagagatggaaaccctggatcagatggtcttccaggccgagatggatctcctggtggcaagggtgatcgtggtgaaaatggctctcctggtgcccctggcgctcctggtcatccaggcccacctggtcctgtcggtccagctggaaagagtggtgacagaggagaaagtggccctgctggccctgctggtgctcccggtcctcctggttccgaggtgctcgtggtcgtcaggccacgtggtgacaaggtaaacaggtaacgtgagctctgcagtaaggacataggattcctgtagtcaggtccaggttctcagggcctctgtaaggggtcaatgaagttcagaccta

SEQ ID NO: 58797 - DNA, 3138 bp, Homo sapiens
accccagaaaactacgatagcccttatgaaacttaagggtcgaaggtggatttagcagtaaactaagagtagagtgcttagttgaacagggccctgaagcgcgtacacaccgcccgtcaccctcctcaagtatacttcaaaggacatttaactaaaacccctacgcatttatatagaggagacaagtcgtaacatggtaagtgtactggaaagtgcacttggacgaactggctgagttttatgacgggcccggtgctgaagggcagggaacaacttgatggtgctactttgaactgcttttcttttctcctttttgcacaaagagtctcatgtctgatatttagacatgatgagctttgtgcaaaaggggagctggctacttctcgctctgcttcatcccactattattttggcacaacaggaagctgttgaaggaggatgttcccatcttggtcagtcctatgcggatagagatgtctggaagccagaaccatgccaaatatgtgtctgtgactcaggatccgttctctgcgatgacataatatgtgacgatcaagaattagactgccccaacccagaaattccatttggagaatgttgtgcagtttgcccacagcctccaactgctcctactcgccctcctaatggtcaaggacctcaaggccccaagggagatccaggccctcctggtattcctgggagaaatggtgaccctggtattccaggacaaccagggtcccctggttctcctggcccccctggaatctgtgaatcatgccctactggtcctcagaactattctccccagtatgattcatatgatgtcaagtctggagtagcagtaggaggactcgcaggctatcctggaccagctggccccccaggccctcccggtccccctggtacatctggtcatcctggttcccctggatctccaggataccaaggaccccctggtgaacctgggcaagctggtccttcaggccctccaggacctcctggtgctataggtccatctggtcctgctggaaaagatggagaatcaggtagacccggacgacctggagagcgaggattgcctggacctccaggtatcaaaggtccagctgggatacctggattccctggtatgaaaggacacagaggcttcgatggacgaaatggagaaaagggtgaaacaggtgctcctggattaaagggtgaaaatggtcttccaggcgaaaatggagctcctggacccatgggtccaagaggggctcctggtgagcgaggacggccaggacttcctggggctgcaggtgctcggggtaatgacggtgctcgaggcagtgatggtcaaccaggccctcctggtcctcctggaactgccggattccctggatcccctggtgctaagggtgaagttggacctgcagggtctcctggttcaaatggtgcccctggacaaagaggagaacctggacctcagggacacgctggtgctcaaggtcctcctggccctcctgggattaatggtagtcctggtggtaaaggcgaaatgggtcccgctggcattcctggagctcctggactgatgggagcccggggtcctccaggaccagccggtgctaatggtgctcctggactgcgaggtggtgcaggtgagcctggtaagaatggtgccaaaggagagcccggaccacgtggtgaacgcggtgaggctggtattccaggtgttccaggagctaaaggcgaagatggcaaggatggatcacctggagaacctggtgcaaatgggcttccaggagctgcaggagaaaggggtgcccctgggttccgaggacctgctggaccaaatggcatcccaggagaaaagggtcctgctggagagcgtggtgctccaggccctgcagggcccagaggagctgctggagaacctggcagagatggcgtccctggaggtccaggaatgaggggcatgcccggaagtccaggaggaccaggaagtgatgggaaaccagggcctcccggaagtcaaggagaaagtggtcgaccaggtcctcctgggccatctggtccccgaggtcagcctggtgtcatgggcttccccggtcctaaaggaaatgatggtgctcctggtaagaatggagaacgaggtggccctggaggacctggccctcagggtcctcctggaaagaatggtgaaactggacctcaaggacccccagggcctactgggcctggtggtgacaaaggagacacaggaccccctggtccacaaggattacaaggcttgcctggtacaggtggtcctccaggagaaaatggaaaacctggggaaccaggtccaaagggtgatgccggtgcacctggagctccaggaggcaagggtgatgctggtgcccctggtgaacgtggacctcctggattggcaggggccccaggacttagaggtggagctggtccccctggtcccgaaggaggaaagggtgctgctggtcctcctgggccacctggtgctgctggtactcctggtctgcaaggaatgcctggagaaagaggaggtcttggaagtcctggtccaaagggtgacaagggtgaaccaggcggtccaggtgctgatggtgtcccagggaaagatggcccaaggggtcctactggtcctattggtcctcctggcccagctggccagcctggagataagggtgaaggtggtgcccccggacttccaggtatagctggacctcgtggtagccctggtgagagaggtgaaactggccctccaggacctgctggtttccctggtgctcctggacagaatggtgaacctggtggtaaaggagaaagaggggctccgggtgagaaaggtgaaggaggccctcctggagttgcaggaccccctggaggttctggacctgctggtcctcctggtccccaaggtgtcaaaggtgaacgtggcagtcctggtggacctggtgctgctggcttccctggtgctcgtggtcttcctggtcctcctggtagtaatgtaagtaattgttaaagtcttttctcatcatacacttcagaaagagcattcatgtatgtataggatgagaaacttacacattgctacttatttctctagtaagtctcaaataaaattatttgaagtaagta

SEQ ID NO: 58798 - DNA, 3065 bp, Homo sapiens
accccagaaaactacgatagcccttatgaaacttaagggtcgaaggtggatttagcagtaaactaagagtagagtgcttagttgaacagggccctgaagcgcgtacacaccgcccgtcaccctcctcaagtatacttcaaaggacatttaactaaaacccctacgcatttatatagaggagacaagtcgtaacatggtaagtgtactggaaagtgcacttggacgaactggctgagttttatgacgggcccggtgctgaagggcagggaacaacttgatggtgctactttgaactgcttttcttttctcctttttgcacaaagagtctcatgtctgatatttagacatgatgagctttgtgcaaaaggggagctggctacttctcgctctgcttcatcccactattattttggcacaacaggaagctgttgaaggaggatgttcccatcttggtcagtcctatgcggatagagatgtctggaagccagaaccatgccaaatatgtgtctgtgactcaggatccgttctctgcgatgacataatatgtgacgatcaagaattagactgccccaacccagaaattccatttggagaatgttgtgcagtttgcccacagcctccaactgctcctactcgccctcctaatggtcaaggacctcaaggccccaagggagatccaggccctcctggtattcctgggagaaatggtgaccctggtattccaggacaaccagggtcccctggttctcctggcccccctggaatctgtgaatcatgccctactggtcctcagaactattctccccagtatgattcatatgatgtcaagtctggagtagcagtaggaggactcgcaggctatcctggaccagctggccccccaggccctcccggtccccctggtacatctggtcatcctggttcccctggatctccaggataccaaggaccccctggtgaacctgggcaagctggtccttcaggccctccaggacctcctggtgctataggtccatctggtcctgctggaaaagatggagaatcaggtagacccggacgacctggagagcgaggattgcctggacctccaggtatcaaaggtccagctgggatacctggattccctggtatgaaaggacacagaggcttcgatggacgaaatggagaaaagggtgaaacaggtgctcctggattaaagggtgaaaatggtcttccaggcgaaaatggagctcctggacccatgggtccaagaggggctcctggtgagcgaggacggccaggacttcctggggctgcaggtgctcggggtaatgacggtgctcgaggcagtgatggtcaaccaggccctcctggtcctcctggaactgccggattccctggatcccctggtgctaagggtgaagttggacctgcagggtctcctggttcaaatggtgcccctggacaaagaggagaacctggacctcagggacacgctggtgctcaaggtcctcctggccctcctgggattaatggtagtcctggtggtaaaggcgaaatgggtcccgctggcattcctggagctcctggactgatgggagcccggggtcctccaggaccagccggtgctaatggtgctcctggactgcgaggtggtgcaggtgagcctggtaagaatggtgccaaaggagagcccggaccacgtggtgaacgcggtgaggctggtattccaggtgttccaggagctaaaggcgaagatggcaaggatggatcacctggagaacctggtgcaaatgggcttccaggagctgcaggagaaaggggtgcccctgggttccgaggacctgctggaccaaatggcatcccaggagaaaagggtcctgctggagagcgtggtgctccaggccctgcagggcccagaggagctgctggagaacctggcagagatggcgtccctggaggtccaggaatgaggggcatgcccggaagtccaggaggaccaggaagtgatgggaaaccagggcctcccggaagtcaaggagaaagtggtcgaccaggtcctcctgggccatctggtccccgaggtcagcctggtgtcatgggcttccccggtcctaaaggaaatgatggtgctcctggtaagaatggagaacgaggtggccctggaggacctggccctcagggtcctcctggaaagaatggtgaaactggacctcaaggacccccagggcctactgggcctggtggtgacaaaggagacacaggaccccctggtccacaaggattacaaggcttgcctggtacaggtggtcctccaggagaaaatggaaaacctggggaaccaggtccaaagggtgatgccggtgcacctggagctccaggaggcaagggtgatgctggtgcccctggtgaacgtggacctcctggattggcaggggccccaggacttagaggtggagctggtccccctggtcccgaaggaggaaagggtgctgctggtcctcctgggccacctggtgctgctggtactcctggtctgcaaggaatgcctggagaaagaggaggtcttggaagtcctggtccaaagggtgacaagtcccagcgctggtttcgacttcagcttcctgccccagccacctcaagagaaggctcacgatggtggccgctactaccgggctgatgatgccaatgtggttcgtgaccgtgacctcgaggtggacaccaccctcaagagcctgagccagcagatcgagaacatccggagcccagagggcagccgcaagaaccccgcccgcacctgccgtgacctcaagatgtgccactctgactggaagagtggagagtactggattgaccccaaccaaggctgcaacctggatgccatcaaagtcttctgcaacatggagactggtgagacctgcgtgtaccccactcagcccagtgtggcccagaagaactggtacatcaacaagaaccccaaggacaagaggcatgtctggttcggcgagagcatgaccgatggaattccatttccagtttggcgggcagggcttcgacccttccgatgtggccatccagctgacctt

SEQ ID NO: 58799 - DNA, 532 bp, Homo sapiens
cactcctatgtacacttcctttctttccagggccctgctggtcagcagggtgcaatcggcagtccaggacctgcaggccccagagtaagtagcacagaaagatattacaggtccacatgtttcagatgtctgcatttcagaaagatattctggcattgtgatgtcatgatactttcttagggacctgttggacccagtggacctcctggcaaagatggaaccagtggacatccaggtcccattggaccaccagggcctcgaggtaacagaggtgaaagaggatctgaggtaagacatcacttatacgtatgtgtatttaatttgctacaatcttccaattttcagaaacacagcgcattatgtttaaattgaaatagagagacgcaatgcatccactcaatttagaaactgaacaatgactttaagacattctccatcacattaaaaatgtttctaccacactataacaggagaaaaatacctttttaaaaattgatcaggtatccatcgtatcagaataatgacatctgcc

SEQ ID NO: 58800 - DNA, 287 bp, Homo sapiens
ccgggcccggctggggcccatgtagaggaggacagatccaaggtattctgtaatatggaaactggggaaacatgcataagtgccaatcctttgaatgttccacggaaacactggtggacagattctagtgctgagaagaaacacgtttggtttggagagtccatggatggtggttttcagtttagctacggcaatcctgaacttcctgaagatgtccttgatgtgcagctggcattccttcgacttctctccagccgagcttccccgcccctcaacccgcccggccc

SEQ ID NO: 58801 - DNA, 776 bp, Homo sapiens
  misc_feature (70)..(70): n is a, c, g, or t
gtgtcatcagagtaagaagatatagtacagagaaaaacacgtaggttgagagtccatggatggtggtttncagtttagctacggcaatcctgaacttcctgaagatgtccttgatgtgcagctggcattccttcgacttctctccagccgagcttcccagaacatcacatatcactgcaaaaatagcattgcatacatggatcaggccagtggaaatgtaaagaaggccctgaagctgatggggtcaaatgaaggtgaattcaaggctgaaggaaatagcaaattcacctacacagttctggaggatggttgcacgaaacacactggggaatggagcaaaacagtctttgaatatcgaacacgcaaggctgtgagactacctattgtagatattgcaccctatgacattggtggtcctgatcaagaatttggtgtggacgttggccctgtttgctttttataaaccaaactctatctgaaatcccaacaaaaaaaatttaactccatatgtgttcctcttgttctaatcttgtcaaccagtgcaagtgaccgacaaaattccagttatttatttccaaaatgtttggaaacagtataatttgacaaagaaaaatgatacttctctttttttgctgttccaccaaatacaattcaaatgctttttgttttatttttttaccaattccaatttcaaaatgtctcaatggtgctagaaggcgactatggacgagagccgggccctttctgtgagatacgccccagataagaagggaatg

SEQ ID NO: 58802 - DNA, 4932 bp, Homo sapiens
accccagaaaactacgatagcccttatgaaacttaagggtcgaaggtggatttagcagtaaactaagagtagagtgcttagttgaacagggccctgaagcgcgtacacaccgcccgtcaccctcctcaagtatacttcaaaggacatttaactaaaacccctacgcatttatatagaggagacaagtcgtaacatggtaagtgtactggaaagtgcacttggacgaactggctgagttttatgacgggcccggtgctgaagggcagggaacaacttgatggtgctactttgaactgcttttcttttctcctttttgcacaaagagtctcatgtctgatatttagacatgatgagctttgtgcaaaaggggagctggctacttctcgctctgcttcatcccactattattttggcacaacaggaagctgttgaaggaggatgttcccatcttggtcagtcctatgcggatagagatgtctggaagccagaaccatgccaaatatgtgtctgtgactcaggatccgttctctgcgatgacataatatgtgacgatcaagaattagactgccccaacccagaaattccatttggagaatgttgtgcagtttgcccacagcctccaactgctcctactcgccctcctaatggtcaaggacctcaaggccccaagggagatccaggccctcctggtattcctgggagaaatggtgaccctggtattccaggacaaccagggtcccctggttctcctggcccccctggaatctgtgaatcatgccctactggtcctcagaactattctccccagtatgattcatatgatgtcaagtctggagtagcagtaggaggactcgcaggctatcctggaccagctggccccccaggccctcccggtccccctggtacatctggtcatcctggttcccctggatctccaggataccaaggaccccctggtgaacctgggcaagctggtccttcaggccctccaggacctcctggtgctataggtccatctggtcctgctggaaaagatggagaatcaggtagacccggacgacctggagagcgaggattgcctggacctccaggtatcaaaggtccagctgggatacctggattccctggtatgaaaggacacagaggcttcgatggacgaaatggagaaaagggtgaaacaggtgctcctggattaaagggtgaaaatggtcttccaggcgaaaatggagctcctggacccatgggtccaagaggggctcctggtgagcgaggacggccaggacttcctggggctgcaggtgctcggggtaatgacggtgctcgaggcagtgatggtcaaccaggccctcctggtcctcctggaactgccggattccctggatcccctggtgctaagggccctcctgggattaatggtagtcctggtggtaaaggcgaaatgggtcccgctggcattcctggagctcctggactgatgggagcccggggtcctccaggaccagccggtgctaatggtgctcctggactgcgaggtggtgcaggtgagcctggtaagaatggtgccaaaggagagcccggaccacgtggtgaacgcggtgaggctggtattccaggtgttccaggagctaaaggcgaagatggcaaggatggatcacctggagaacctggtgcaaatgggcttccaggagctgcaggagaaaggggtgcccctgggttccgaggacctgctggaccaaatggcatcccaggagaaaagggtcctgctggagagcgtggtgctccaggccctgcagggcccagaggagctgctggagaacctggcagagatggcgtccctggaggtccaggaatgaggggcatgcccggaagtccaggaggaccaggaagtgatgggaaaccagggcctcccggaagtcaaggagaaagtggtcgaccaggtcctcctgggccatctggtccccgaggtcagcctggtgtcatgggcttccccggtcctaaaggaaatgatggtgctcctggtaagaatggagaacgaggtggccctggaggacctggccctcagggtcctcctggaaagaatggtgaaactggacctcaaggacccccagggcctactgggcctggtggtgacaaaggagacacaggaccccctggtccacaaggattacaaggcttgcctggtacaggtggtcctccaggagaaaatggaaaacctggggaaccaggtccaaagggtgatgccggtgcacctggagctccaggaggcaagggtgatgctggtgcccctggtgaacgtggacctcctggattggcaggggccccaggacttagaggtggagctggtccccctggtcccgaaggaggaaagggtgctgctggtcctcctgggccacctggtgctgctggtactcctggtctgcaaggaatgcctggagaaagaggaggtcttggaagtcctggtccaaagggtgacaagggtgaaccaggcggtccaggtgctgatggtgtcccagggaaagatggcccaaggggtcctactggtcctattggtcctcctggcccagctggccagcctggagataagggtgaaggtggtgcccccggacttccaggtatagctggacctcgtggtagccctggtgagagaggtgaaactggccctccaggacctgctggtttccctggtgctcctggacagaatggtgaacctggtggtaaaggagaaagaggggctccgggtgagaaaggtgaaggaggccctcctggagttgcaggaccccctggaggttctggacctgctggtcctcctggtccccaaggtgtcaaaggtgaacgtggcagtcctggtggacctggtgctgctggcttccctggtgctcgtggtcttcctggtcctcctggtagtaatggtaacccaggacccccaggtcccagcggttctccaggcaaggatgggcccccaggtcctgcgggtaacactggtgctcctggcagccctggagtgtctggaccaaaaggtgatgctggccaaccaggagagaagggatcgcctggtgcccagggcccaccaggagctccaggcccacttgggattgctgggatcactggagcacggggtcttgcaggaccaccaggcatgccaggtcctaggggaagccctggccctcagggtgtcaagggtgaaagtgggaaaccaggagctaacggtctcagtggagaacgtggtccccctggaccccagggtcttcctggtctggctggtacagctggtgaacctggaagagatggaaaccctggatcagatggtcttccaggccgagatggatctcctggtggcaagggtgatcgtggtgaaaatggctctcctggtgcccctggcgctcctggtcatccaggcccacctggtcctgtcggtccagctggaaagagtggtgacagaggagaaagtggccctgctggccctgctggtgctcccggtcctgctggttcccgaggtgctcctggtcctcaaggcccacgtggtgacaaaggtgaaacaggtgaacgtggagctgctggcatcaaaggacatcgaggattccctggtaatccaggtgccccaggttctccaggccctgctggtcagcagggtgcaatcggcagtccaggacctgcaggccccagaggacctgttggacccagtggacctcctggcaaagatggaaccagtggacatccaggtcccattggaccaccagggcctcgaggtaacagaggtgaaagaggatctgagggctccccaggccacccagggcaaccaggccctcctggacctcctggtgcccctggtccttgctgtggtggtgttggagccgctgccattgctgggattggaggtgaaaaagctggcggttttgccccgtattatggagatgaaccaatggatttcaaaatcaacaccgatgagattatgacttcactcaagtctgttaatggacaaatagaaagcctcattagtcctgatggttctcgtaaaaaccccgctagaaactgcagagacctgaaattctgccatcctgaactcaagagtggagaatactgggttgaccctaaccaaggatgcaaattggatgctatcaaggtattctgtaatatggaaactggggaaacatgcataagtgccaatcctttgaatgttccacggaaacactggtggacagattctagtgctgagaagaaacacgtttggtttggagagtccatggatggtggttttcagtttagctacggcaatcctgaacttcctgaagatgtccttgatgtgcagctggcattccttcgacttctctccagccgagcttcccagaacatcacatatcactgcaaaaatagcattgcatacatggatcaggccagtggaaatgtaaagaaggccctgaagctgatggggtcaaatgaaggtgaattcaaggctgaaggaaatagcaaattcacctacacagttctggaggatggttgcacgaaacacactggggaatggagcaaaacagtctttgaatatcgaacacgcaaggctgtgagactacctattgtagatattgcaccctatgacattggtggtcctgatcaagaatttggtgtggacgttggccctgtttgctttttataaaccaaactctatctgaaatcccaacaaaaaaaatttaactccatatgtgttcctcttgttctaatcttgtcaaccagtgcaagtgaccgacaaaattccagttatttatttccaaaatgtttggaaacagtataatttgacaaagaaaaatgatacttctctttttttgctgttccaccaaatacaattcaaatgctttttgttttatttttttaccaattccaatttcaaaatgtctcaatggtgctataataaataaacttcaacactctttatgataacaa

SEQ ID NO: 58803 - DNA, 3558 bp, Homo sapiens
accccagaaaactacgatagcccttatgaaacttaagggtcgaaggtggatttagcagtaaactaagagtagagtgcttagttgaacagggccctgaagcgcgtacacaccgcccgtcaccctcctcaagtatacttcaaaggacatttaactaaaacccctacgcatttatatagaggagacaagtcgtaacatggtaagtgtactggaaagtgcacttggacgaactggctgagttttatgacgggcccggtgctgaagggcagggaacaacttgatggtgctactttgaactgcttttcttttctcctttttgcacaaagagtctcatgtctgatatttagacatgatgagctttgtgcaaaaggggagctggctacttctcgctctgcttcatcccactattattttggcacaacaggaagctgttgaaggaggatgttcccatcttggtcagtcctatgcggatagagatgtctggaagccagaaccatgccaaatatgtgtctgtgactcaggatccgttctctgcgatgacataatatgtgacgatcaagaattagactgccccaacccagaaattccatttggagaatgttgtgcagtttgcccacagcctccaactgctcctactcgccctcctaatggtcaaggacctcaaggccccaagggagatccaggccctcctggtattcctgggagaaatggtgaccctggtattccaggacaaccagggtcccctggttctcctggcccccctggaatctgtgaatcatgccctactggtcctcagaactattctccccagtatgattcatatgatgtcaagtctggagtagcagtaggaggactcgcaggctatcctggaccagctggccccccaggccctcccggtccccctggtacatctggtcatcctggttcccctggatctccaggataccaaggaccccctggtgaacctgggcaagctggtccttcaggccctccaggacctcctggtgctataggtccatctggtcctgctggaaaagatggagaatcaggtagacccggacgacctggagagcgaggattgcctggacctccaggtatcaaaggtccagctgggatacctggattccctggtatgaaaggacacagaggcttcgatggacgaaatggagaaaagggtgaaacaggtgctcctggattaaagggtgaaaatggtcttccaggcgaaaatggagctcctggacccatgggtccaagaggggctcctggtgagcgaggacggccaggacttcctggggctgcaggtgctcggggtaatgacggtgctcgaggcagtgatggtcaaccaggccctcctggtcctcctggaactgccggattccctggatcccctggtgctaagggtgaagttggacctgcagggtctcctggttcaaatggtgcccctggacaaagaggagaacctggacctcagggacacgctggtgctcaaggtcctcctggccctcctgggattaatggtagtcctggtggtaaaggcgaaatgggtcccgctggcattcctggagctcctggactgatgggagcccggggtcctccaggaccagccggtgctaatggtgctcctggactgcgaggtggtgcaggtgagcctggtaagaatggtgccaaaggagagcccggaccacgtggtgaacgcggtgaggctggtattccaggtgttccaggagctaaaggcgaagatggcaaggatggatcacctggagaacctggtgcaaatgggcttccaggagctgcaggagaaaggggtgcccctgggttccgaggacctgctggaccaaatggcatcccaggagaaaagggtcctgctggagagcgtggtgctccaggccctgcagggcccagaggagctgctggagaacctggcagagatggcgtccctggaggtccaggaatgaggggcatgcccggaagtccaggaggaccaggaagtgatgggaaaccagggcctcccggaagtcaaggagaaagtggtcgaccaggtcctcctgggccatctggtccccgaggtcagcctggtgtcatgggcttccccggtcctaaaggaaatgatgctggttcccgaggtgctcctggtcctcaaggcccacgtggtgacaaaggtgaaacaggtgaacgtggagctgctggcatcaaaggacatcgaggattccctggtaatccaggtgccccaggttctccaggccctgctggtcagcagggtgcaatcggcagtccaggacctgcaggccccagaggacctgttggacccagtggacctcctggcaaagatggaaccagtggacatccaggtcccattggaccaccagggcctcgaggtaacagaggtgaaagaggatctgagggctccccaggccacccagggcaaccaggccctcctggacctcctggtgcccctggtccttgctgtggtggtgttggagccgctgccattgctgggattggaggtgaaaaagctggcggttttgccccgtattatggagatgaaccaatggatttcaaaatcaacaccgatgagattatgacttcactcaagtctgttaatggacaaatagaaagcctcattagtcctgatggttctcgtaaaaaccccgctagaaactgcagagacctgaaattctgccatcctgaactcaagagtggagaatactgggttgaccctaaccaaggatgcaaattggatgctatcaaggtattctgtaatatggaaactggggaaacatgcataagtgccaatcctttgaatgttccacggaaacactggtggacagattctagtgctgagaagaaacacgtttggtttggagagtccatggatggtggttttcagtttagctacggcaatcctgaacttcctgaagatgtccttgatgtgcagctggcattccttcgacttctctccagccgagcttcccagaacatcacatatcactgcaaaaatagcattgcatacatggatcaggccagtggaaatgtaaagaaggccctgaagctgatggggtcaaatgaaggtgaattcaaggctgaaggaaatagcaaattcacctacacagttctggaggatggttgcacgaaacacactggggaatggagcaaaacagtctttgaatatcgaacacgcaaggctgtgagactacctattgtagatattgcaccctatgacattggtggtcctgatcaagaatttggtgtggacgttggccctgtttgctttttataaaccaaactctatctgaaatcccaacaaaaaaaatttaactccatatgtgttcctcttgttctaatcttgtcaaccagtgcaagtgaccgacaaaattccagttatttatttccaaaatgtttggaaacagtataatttgacaaagaaaaatgatacttctctttttttgctgttccaccaaatacaattcaaatgctttttgttttatttttttaccaattccaatttcaaaatgtctcaatggtgctataataaataaacttcaacactctttatgataacaa

SEQ ID NO: 58804 - DNA, 5719 bp, Homo sapiens
accccagaaaactacgatagcccttatgaaacttaagggtcgaaggtggatttagcagtaaactaagagtagagtgcttagttgaacagggccctgaagcgcgtacacaccgcccgtcaccctcctcaagtatacttcaaaggacatttaactaaaacccctacgcatttatatagaggagacaagtcgtaacatggtaagtgtactggaaagtgcacttggacgaactggctgagttttatgacgggcccggtgctgaagggcagggaacaacttgatggtgctactttgaactgcttttcttttctcctttttgcacaaagagtctcatgtctgatatttagacatgatgagctttgtgcaaaaggggagctggctacttctcgctctgcttcatcccactattattttggcacaacaggaagctgttgaaggaggatgttcccatcttggtcagtcctatgcggatagagatgtctggaagccagaaccatgccaaatatgtgtctgtgactcaggatccgttctctgcgatgacataatatgtgacgatcaagaattagactgccccaacccagaaattccatttggagaatgttgtgcagtttgcccacagcctccaactgctcctactcgccctcctaatggtcaaggacctcaaggccccaagggagatccaggccctcctggtattcctgggagaaatggtgaccctggtattccaggacaaccagggtcccctggttctcctggcccccctggaatctgtgaatcatgccctactggtcctcagaactattctccccagtatgattcatatgatgtcaagtctggagtagcagtaggaggactcgcaggctatcctggaccagctggccccccaggccctcccggtccccctggtacatctggtcatcctggttcccctggatctccaggataccaaggaccccctggtgaacctgggcaagctggtccttcaggccctccaggacctcctggtgctataggtccatctggtcctgctggaaaagatggagaatcaggtagacccggacgacctggagagcgaggattgcctggacctccaggtatcaaaggtccagctgggatacctggattccctggtatgaaaggacacagaggcttcgatggacgaaatggagaaaagggtgaaacaggtgctcctggattaaagggtgaaaatggtcttccaggcgaaaatggagctcctggacccatgggtccaagaggggctcctggtgagcgaggacggccaggacttcctggggctgcaggtgctcggggtaatgacggtgctcgaggcagtgatggtcaaccaggccctcctggtcctcctggaactgccggattccctggatcccctggtgctaagggtgaagttggacctgcagggtctcctggttcaaatggtgcccctggacaaagaggagaacctggacctcagggacacgctggtgctcaaggtcctcctggccctcctgggattaatggtagtcctggtggtaaaggcgaaatgggtcccgctggcattcctggagctcctggactgatgggagcccggggtcctccaggaccagccggtgctaatggtgctcctggactgcgaggtggtgcaggtgagcctggtaagaatggtgccaaaggagagcccggaccacgtggtgaacgcggtgaggctggtattccaggtgttccaggagctaaaggcgaagatggcaaggatggatcacctggagaacctggtgcaaatgggcttccaggagctgcaggagaaaggggtgcccctgggttccgaggacctgctggaccaaatggcatcccaggagaaaagggtcctgctggagagcgtggtgctccaggccctgcagggcccagaggagctgctggagaacctggcagagatggcgtccctggaggtccaggaatgaggggcatgcccggaagtccaggaggaccaggaagtgatgggaaaccagggcctcccggaagtcaaggagaaagtggtcgaccaggtcctcctgggccatctggtccccgaggtcagcctggtgtcatgggcttccccggtcctaaaggaaatgatggtgctcctggtaagaatggagaacgaggtggccctggaggacctggccctcagggtcctcctggaaagaatggtgaaactggacctcaaggacccccagggcctactgggcctggtggtgacaaaggagacacaggaccccctggtccacaaggattacaaggcttgcctggtacaggtggtcctccaggagaaaatggaaaacctggggaaccaggtccaaagggtgatgccggtgcacctggagctccaggaggcaagggtgatgctggtgcccctggtgaacgtggacctcctggattggcaggggccccaggacttagaggtggagctggtccccctggtcccgaaggaggaaagggtgctgctggtcctcctgggccacctggtgctgctggtactcctggtctgcaaggaatgcctggagaaagaggaggtcttggaagtcctggtccaaagggtgacaagggtgaaccaggcggtccaggtgctgatggtgtcccagggaaagatggcccaaggggtcctactggtcctattggtcctcctggcccagctggccagcctggagataagggtgaaggtggtgcccccggacttccaggtatagctggacctcgtggtagccctggtgagagaggtgaaactggccctccaggacctgctggtttccctggtgctcctggacagaatggtgaacctggtggtaaaggagaaagaggggctccgggtgagaaaggtgaaggaggccctcctggagttgcaggaccccctggaggttctggacctgctggtcctcctggtccccaaggtgtcaaaggtgaacgtggcagtcctggtggacctggtgctgctggcttccctggtgctcgtggtcttcctggtcctcctggtagtaatggtaacccaggacccccaggtcccagcggttctccaggcaaggatgggcccccaggtcctgcgggtaacactggtgctcctggcagccctggagtgtctggaccaaaaggtgatgctggccaaccaggagagaagggatcgcctggtgcccagggcccaccaggagctccaggcccacttgggattgctgggatcactggagcacggggtcttgcaggaccaccaggcatgccaggtcctaggggaagccctggccctcagggtgtcaagggtgaaagtgggaaaccaggagctaacggtctcagtggagaacgtggtccccctggaccccagggtcttcctggtctggctggtacagctggtgaacctggaagagatggaaaccctggatcagatggtcttccaggccgagatggatctcctggtggcaagggtgatcgtggtgaaaatggctctcctggtgcccctggcgctcctggtcatccaggcccacctggtcctgtcggtccagctggaaagagtggtgacagaggagaaagtggccctgctggccctgctggtgctcccggtcctgctggttcccgaggtgctcctggtcctcaaggcccacgtggtgacaaaggtgaaacaggtgaacgtggagctgctggcatcaaaggacatcgaggattccctggtaatccaggtgccccaggttctccaggccctgctggtcagcagggtgcaatcggcagtccaggacctgcaggccccagaggacctgttggacccagtggacctcctggcaaagatggaaccagtggacatccaggtcccattggaccaccagggcctcgaggtaacagaggtgaaagaggatctgagggctccccaggccacccagggcaaccaggccctcctggacctcctggtgcccctggtccttgctgtggtggtgttggagccgctgccattgctgggattggaggtgaaaaagctggcggttttgccccgtattatggagatgaaccaatggatttcaaaatcaacaccgatgagattatgacttcactcaagtctgttaatggacaaatagaaagcctcattagtcctgatggttctcgtaaaaaccccgctagaaactgcagagacctgaaattctgccatcctgaactcaagagtggagaatactgggttgaccctaaccaaggatgcaaattggatgctatcaaggtattctgtaatatggaaactggggaaacatgcataagtgccaatcctttgaatgttccacggaaacactggtggacagattctagtgctgagaagaaacacgtttggtttggagagtccatggatggtggttttcagtttagctacggcaatcctgaacttcctgaagatgtccttgatgtgcagctggcattccttcgacttctctccagccgagcttcccagaacatcacatatcactgcaaaaatagcattgcatacatggatcaggccagtggaaatgtaaagaaggccctgaagctgatggggtcaaatgaaggtgaattcaaggctgaaggaaatagcaaattcacctacacagttctggaggatggttgcacgaaacacactggggaatggagcaaaacagtctttgaatatcgaacacgcaaggctgtgagactacctattgtagatattgcaccctatgacattggtggtcctgatcaagaatttggtgtggacgttggccctgtttgctttttataaaccaaactctatctgaaatcccaacaaaaaaaatttaactccatatgtgttcctcttgttctaatcttgtcaaccagtgcaagtgaccgacaaaattccagttatttatttccaaaatgtttggaaacagtataatttgacaaagaaaaatgatacttctctttttttgctgttccaccaaatacaattcaaatgctttttgttttatttttttaccaattccaatttcaaaatgtctcaatggtgctataataaataaacttcaacactctttatgataacaacactgtgttatattctttgaatcctagcccatctgcagagcaatgactgtgctcaccagtaaaagataacctttctttctgaaatagtcaaatacgaaattagaaaagccctccctattttaactacctcaactggtcagaaacacagattgtattctatgagtcccagaagatgaaaaaaattttatacgttgataaaacttataaatttcattgattaatctcctggaagattggtttaaaaagaaaagtgtaatgcaagaatttaaagaaatatttttaaagccacaattattttaatattggatatcaactgcttgtaaaggtgctcctcttttttcttgtcattgctggtcaagattactaatatttgggaaggctttaaagacgcatgttatggtgctaatgtactttcacttttaaactctagatcagaattgttgacttgcattcagaacataaatgcacaaaatctgtacatgtctcccatcagaaagattcattggcatgccacaggggattctcctccttcatcctgtaaaggtcaacaataaaaaccaaattatggggctgcttttgtcacactagcatagagaatgtgttgaaatttaactttgtaagcttgtatgtggttgttgatcttttttttccttacagacacccataataaaatatcatattaaaattc

SEQ ID NO: 58805 - DNA, 5764 bp, Homo sapiens
accccagaaaactacgatagcccttatgaaacttaagggtcgaaggtggatttagcagtaaactaagagtagagtgcttagttgaacagggccctgaagcgcgtacacaccgcccgtcaccctcctcaagtatacttcaaaggacatttaactaaaacccctacgcatttatatagaggagacaagtcgtaacatggtaagtgtactggaaagtgcacttggacgaactggctgagttttatgacgggcccggtgctgaagggcagggaacaacttgatggtgctactttgaactgcttttcttttctcctttttgcacaaagagtctcatgtctgatatttagacatgatgagctttgtgcaaaaggggagctggctacttctcgctctgcttcatcccactattattttggcacaacaggaagctgttgaaggaggatgttcccatcttggtcagtcctatgcggatagagatgtctggaagccagaaccatgccaaatatgtgtctgtgactcaggatccgttctctgcgatgacataatatgtgacgatcaagaattagactgccccaacccagaaattccatttggagaatgttgtgcagtttgcccacagcctccaactgctcctactcgccctcctaatggtcaaggacctcaaggccccaagggagatccaggccctcctggtattcctgggagaaatggtgaccctggtattccaggacaaccagggtcccctggttctcctggcccccctggaatctgtgaatcatgccctactggtcctcagaactattctccccagtatgattcatatgatgtcaagtctggagtagcagtaggaggactcgcaggctatcctggaccagctggccccccaggccctcccggtccccctggtacatctggtcatcctggttcccctggatctccaggataccaaggaccccctggtgaacctgggcaagctggtccttcaggccctccaggacctcctggtgctataggtccatctggtcctgctggaaaagatggagaatcaggtagacccggacgacctggagagcgaggattgcctggacctccaggtatcaaaggtccagctgggatacctggattccctggtatgaaaggacacagaggcttcgatggacgaaatggagaaaagggtgaaacaggtgctcctggattaaagggtgaaaatggtcttccaggcgaaaatggagctcctggacccatgggtccaagaggggctcctggtgagcgaggacggccaggacttcctggggctgcaggtgctcggggtaatgacggtgctcgaggcagtgatggtcaaccaggccctcctggtcctcctggaactgccggattccctggatcccctggtgctaagggtgaagttggacctgcagggtctcctggttcaaatggtgcccctggacaaagaggagaacctggacctcagggacacgctggtgctcaaggtcctcctggccctcctgggattaatggtagtcctggtggtaaaggcgaaatgggtcccgctggcattcctggagctcctggactgatgggagcccggggtcctccaggaccagccggtgctaatggtgctcctggactgcgaggtggtgcaggtgagcctggtaagaatggtgccaaaggagagcccggaccacgtggtgaacgcggtgaggctggtattccaggtgttccaggagctaaaggcgaagatggcaaggatggatcacctggagaacctggtgcaaatgggcttccaggagctgcaggagaaaggggtgcccctgggttccgaggacctgctggaccaaatggcatcccaggagaaaagggtcctgctggagagcgtggtgctccaggccctgcagggcccagaggagctgctggagaacctggcagagatggcgtccctggaggtccaggaatgaggggcatgcccggaagtccaggaggaccaggaagtgatgggaaaccagggcctcccggaagtcaaggagaaagtggtcgaccaggtcctcctgggccatctggtccccgaggtcagcctggtgtcatgggcttccccggtcctaaaggaaatgatggtgctcctggtaagaatggagaacgaggtggccctggaggacctggccctcagggtcctcctggaaagaatggtgaaactggacctcaaggacccccagggcctactgggcctggtggtgacaaaggagacacaggaccccctggtccacaaggattacaaggcttgcctggtacaggtggtcctccaggagaaaatggaaaacctggggaaccaggtccaaagggtgatgccggtgcacctggagctccaggaggcaagggtgatgctggtgcccctggtgaacgtggacctcctggattggcaggggccccaggacttagaggtggagctggtccccctggtcccgaaggaggaaagggtgctgctggtcctcctgggccacctggtgctgctggtactcctggtctgcaaggaatgcctggagaaagaggaggtcttggaagtcctggtccaaagggtgacaagggtgaaccaggcggtccaggtgctgatggtgtcccagggaaagatggcccaaggggtcctactggtcctattggtcctcctggcccagctggccagcctggagataagggtgaaggtggtgcccccggacttccaggtatagctggacctcgtggtagccctggtgagagaggtgaaactggccctccaggacctgctggtttccctggtgctcctggacagaatggtgaacctggtggtaaaggagaaagaggggctccgggtgagaaaggtgaaggaggccctcctggagttgcaggaccccctggaggttctggacctgctggtcctcctggtccccaaggtgtcaaaggtgaacgtggcagtcctggtggacctggtgctgctggcttccctggtgctcgtggtcttcctggtcctcctggtagtaatggtaacccaggacccccaggtcccagcggttctccaggcaaggatgggcccccaggtcctgcgggtaacactggtgctcctggcagccctggagtgtctggaccaaaaggtgatgctggccaaccaggagagaagggatcgcctggtgcccagggcccaccaggagctccaggcccacttgggattgctgggatcactggagcacggggtcttgcaggaccaccaggcatgccaggtcctaggggaagccctggccctcagggtgtcaagggtgaaagtgggaaaccaggagctaacggtctcagtggagaacgtggtccccctggaccccagggtcttcctggtctggctggtacagctggtgaacctggaagagatggaaaccctggatcagatggtcttccaggccgagatggatctcctggtggcaagggtgatcgtggtgaaaatggctctcctggtgcccctggcgctcctggtcatccaggcccacctggtcctgtcggtccagctggaaagagtggtgacagaggagaaagtggccctgctggccctgctggtgctcccggtcctgctggttcccgaggtgctcctggtcctcaaggcccacgtggtgacaaaggtgaaacaggtgaacgtggagctgctggcatcaaaggacatcgaggattccctggtaatccaggtgccccaggttctccaggccctgctggtcagcagggtgcaatcggcagtccaggacctgcaggccccagaggacctgttggacccagtggacctcctggcaaagatggaaccagtggacatccaggtcccattggaccaccagggcctcgaggtaacagaggtgaaagaggatctgagggctccccaggccacccagggcaaccaggccctcctggacctcctggtgcccctggtccttgctgtggtggtgttggagccgctgccattgctgggattggaggtgaaaaagctggcggttttgccccgtattatggagatgaaccaatggatttcaaaatcaacaccgatgagattatgacttcactcaagtctgttaatggacaaatagaaagcctcattagtcctgatggttctcgtaaaaaccccgctagaaactgcagagacctgaaattctgccatcctgaactcaagagtggagaatactgggttgaccctaaccaaggatgcaaattggatgctatcaaggtattctgtaatatggaaactggggaaacatgcataagtgccaatcctttgaatgttccacggaaacactggtggacagattctagtgctgagaagaaacacgtttggtttggagagtccatggatggtggttttcagtttagctacggcaatcctgaacttcctgaagatgtccttgatgtgcagctggcattccttcgacttctctccagccgagcttcccagaacatcacatatcactgcaaaaatagcattgcatacatggatcaggccagtggaaatgtaaagaaggccctgaagctgatggggtcaaatgaaggtgaattcaaggctgaaggaaatagcaaattcacctacacagttctggaggatggttgcacgaaacacactggggaatggagcaaaacagtctttgaatatcgaacacgcaaggctgtgagactacctattgtagatattgcaccctatgacattggtggtcctgatcaagaatttggtgtggacgttggccctgtttgctttttataaaccaaactctatctgaaatcccaacaaaaaaaatttaactccatatgtgttcctcttgttctaatcttgtcaaccagtgcaagtgaccgacaaaattccagttatttatttccaaaatgtttggaaacagtataatttgacaaagaaaaatgatacttctctttttttgctgttccaccaaatacaattcaaatgctttttgttttatttttttaccaattccaatttcaaaatgtctcaatggtgctataaataaacttcaacactctttatgataacaacactgtgttatattaataaataaacttcaacactctttatgataacaacactgtgttatattctttgaatcctagcccatctgcagagcaatgactgtgctcaccagtaaaagataacctttctttctgaaatagtcaaatacgaaattagaaaagccctccctattttaactacctcaactggtcagaaacacagattgtattctatgagtcccagaagatgaaaaaaattttatacgttgataaaacttataaatttcattgattaatctcctggaagattggtttaaaaagaaaagtgtaatgcaagaatttaaagaaatatttttaaagccacaattattttaatattggatatcaactgcttgtaaaggtgctcctcttttttcttgtcattgctggtcaagattactaatatttgggaaggctttaaagacgcatgttatggtgctaatgtactttcacttttaaactctagatcagaattgttgacttgcattcagaacataaatgcacaaaatctgtacatgtctcccatcagaaagattcattggcatgccacaggggattctcctccttcatcctgtaaaggtcaacaataaaaaccaaattatggggctgcttttgtcacactagcatagagaatgtgttgaaatttaactttgtaagcttgtatgtggttgttgatcttttttttccttacagacacccataataaaatatcatattaaaattc

SEQ ID NO: 58806 - DNA, 6358 bp, Homo sapiens
  misc_feature (5741)..(5741): n is a, c, g, or t
accccagaaaactacgatagcccttatgaaacttaagggtcgaaggtggatttagcagtaaactaagagtagagtgcttagttgaacagggccctgaagcgcgtacacaccgcccgtcaccctcctcaagtatacttcaaaggacatttaactaaaacccctacgcatttatatagaggagacaagtcgtaacatggtaagtgtactggaaagtgcacttggacgaactggctgagttttatgacgggcccggtgctgaagggcagggaacaacttgatggtgctactttgaactgcttttcttttctcctttttgcacaaagagtctcatgtctgatatttagacatgatgagctttgtgcaaaaggggagctggctacttctcgctctgcttcatcccactattattttggcacaacaggaagctgttgaaggaggatgttcccatcttggtcagtcctatgcggatagagatgtctggaagccagaaccatgccaaatatgtgtctgtgactcaggatccgttctctgcgatgacataatatgtgacgatcaagaattagactgccccaacccagaaattccatttggagaatgttgtgcagtttgcccacagcctccaactgctcctactcgccctcctaatggtcaaggacctcaaggccccaagggagatccaggccctcctggtattcctgggagaaatggtgaccctggtattccaggacaaccagggtcccctggttctcctggcccccctggaatctgtgaatcatgccctactggtcctcagaactattctccccagtatgattcatatgatgtcaagtctggagtagcagtaggaggactcgcaggctatcctggaccagctggccccccaggccctcccggtccccctggtacatctggtcatcctggttcccctggatctccaggataccaaggaccccctggtgaacctgggcaagctggtccttcaggccctccaggacctcctggtgctataggtccatctggtcctgctggaaaagatggagaatcaggtagacccggacgacctggagagcgaggattgcctggacctccaggtatcaaaggtccagctgggatacctggattccctggtatgaaaggacacagaggcttcgatggacgaaatggagaaaagggtgaaacaggtgctcctggattaaagggtgaaaatggtcttccaggcgaaaatggagctcctggacccatgggtccaagaggggctcctggtgagcgaggacggccaggacttcctggggctgcaggtgctcggggtaatgacggtgctcgaggcagtgatggtcaaccaggccctcctggtcctcctggaactgccggattccctggatcccctggtgctaagggtgaagttggacctgcagggtctcctggttcaaatggtgcccctggacaaagaggagaacctggacctcagggacacgctggtgctcaaggtcctcctggccctcctgggattaatggtagtcctggtggtaaaggcgaaatgggtcccgctggcattcctggagctcctggactgatgggagcccggggtcctccaggaccagccggtgctaatggtgctcctggactgcgaggtggtgcaggtgagcctggtaagaatggtgccaaaggagagcccggaccacgtggtgaacgcggtgaggctggtattccaggtgttccaggagctaaaggcgaagatggcaaggatggatcacctggagaacctggtgcaaatgggcttccaggagctgcaggagaaaggggtgcccctgggttccgaggacctgctggaccaaatggcatcccaggagaaaagggtcctgctggagagcgtggtgctccaggccctgcagggcccagaggagctgctggagaacctggcagagatggcgtccctggaggtccaggaatgaggggcatgcccggaagtccaggaggaccaggaagtgatgggaaaccagggcctcccggaagtcaaggagaaagtggtcgaccaggtcctcctgggccatctggtccccgaggtcagcctggtgtcatgggcttccccggtcctaaaggaaatgatggtgctcctggtaagaatggagaacgaggtggccctggaggacctggccctcagggtcctcctggaaagaatggtgaaactggacctcaaggacccccagggcctactgggcctggtggtgacaaaggagacacaggaccccctggtccacaaggattacaaggcttgcctggtacaggtggtcctccaggagaaaatggaaaacctggggaaccaggtccaaagggtgatgccggtgcacctggagctccaggaggcaagggtgatgctggtgcccctggtgaacgtggacctcctggattggcaggggccccaggacttagaggtggagctggtccccctggtcccgaaggaggaaagggtgctgctggtcctcctgggccacctggtgctgctggtactcctggtctgcaaggaatgcctggagaaagaggaggtcttggaagtcctggtccaaagggtgacaagggtgaaccaggcggtccaggtgctgatggtgtcccagggaaagatggcccaaggggtcctactggtcctattggtcctcctggcccagctggccagcctggagataagggtgaaggtggtgcccccggacttccaggtatagctggacctcgtggtagccctggtgagagaggtgaaactggccctccaggacctgctggtttccctggtgctcctggacagaatggtgaacctggtggtaaaggagaaagaggggctccgggtgagaaaggtgaaggaggccctcctggagttgcaggaccccctggaggttctggacctgctggtcctcctggtccccaaggtgtcaaaggtgaacgtggcagtcctggtggacctggtgctgctggcttccctggtgctcgtggtcttcctggtcctcctggtagtaatggtaacccaggacccccaggtcccagcggttctccaggcaaggatgggcccccaggtcctgcgggtaacactggtgctcctggcagccctggagtgtctggaccaaaaggtgatgctggccaaccaggagagaagggatcgcctggtgcccagggcccaccaggagctccaggcccacttgggattgctgggatcactggagcacggggtcttgcaggaccaccaggcatgccaggtcctaggggaagccctggccctcagggtgtcaagggtgaaagtgggaaaccaggagctaacggtctcagtggagaacgtggtccccctggaccccagggtcttcctggtctggctggtacagctggtgaacctggaagagatggaaaccctggatcagatggtcttccaggccgagatggatctcctggtggcaagggtgatcgtggtgaaaatggctctcctggtgcccctggcgctcctggtcatccaggcccacctggtcctgtcggtccagctggaaagagtggtgacagaggagaaagtggccctgctggccctgctggtgctcccggtcctgctggttcccgaggtgctcctggtcctcaaggcccacgtggtgacaaaggtgaaacaggtgaacgtggagctgctggcatcaaaggacatcgaggattccctggtaatccaggtgccccaggttctccaggccctgctggtcagcagggtgcaatcggcagtccaggacctgcaggccccagaggacctgttggacccagtggacctcctggcaaagatggaaccagtggacatccaggtcccattggaccaccagggcctcgaggtaacagaggtgaaagaggatctgagggctccccaggccacccagggcaaccaggccctcctggacctcctggtgcccctggtccttgctgtggtggtgttggagccgctgccattgctgggattggaggtgaaaaagctggcggttttgccccgtattatggagatgaaccaatggatttcaaaatcaacaccgatgagattatgacttcactcaagtctgttaatggacaaatagaaagcctcattagtcctgatggttctcgtaaaaaccccgctagaaactgcagagacctgaaattctgccatcctgaactcaagagtggagaatactgggttgaccctaaccaaggatgcaaattggatgctatcaaggtattctgtaatatggaaactggggaaacatgcataagtgccaatcctttgaatgttccacggaaacactggtggacagattctagtgctgagaagaaacacgtttggtttggagagtccatggatggtggttttcagtttagctacggcaatcctgaacttcctgaagatgtccttgatgtgcagctggcattccttcgacttctctccagccgagcttcccagaacatcacatatcactgcaaaaatagcattgcatacatggatcaggccagtggaaatgtaaagaaggccctgaagctgatggggtcaaatgaaggtgaattcaaggctgaaggaaatagcaaattcacctacacagttctggaggatggttgcacgaaacacactggggaatggagcaaaacagtctttgaatatcgaacacgcaaggctgtgagactacctattgtagatattgcaccctatgacattggtggtcctgatcaagaatttggtgtggacgttggccctgtttgctttttataaaccaaactctatctgaaatcccaacaaaaaaaatttaactccatatgtgttcctcttgttctaatcttgtcaaccagtgcaagtgaccgacaaaattccagttatttatttccaaaatgtttggaaacagtataatttgacaaagaaaaatgatacttctctttttttgctgttccaccaaatacaattcaaatgctttttgttttatttttttaccaattccaatttcaaaatgtctcaatggtgctataataaataaacttcaacactctttatgataacaacactgtgttatattctttgaatcctagcccatctgcagagcaatgactgtgctcaccagtaaaagataacctttctttctgaaatagtcaaatacgaaattagaaaagccctccctattttaactacctcaactggtcagaaacacagattgtattctatgagtcccagaagatgaaaaaaattttatacgttgataaaacttataaatttcattgattaatctcctggaagattggtttaaaaagaaaagtgtaatgcaagaatttaaagaaatatttttaaagccacaattattttaatattggatatcaactgcttgtaaaggtgctcctcttttttcttgtcattgctggtcaagattactaatatttgggaaggctttaaagacgcatgttatggtgctaatgtactttcacttttaaactctagatcagaattgttgacttgcattcagaacataaatgcacaaaatctgtacatgtctcccatcagaaagattcattggcatgccacaggggattctcctccttcatcctgtaaaggtcaacaataaaaaccaaattatggggctgcttttgtcacactagcatagagaatgtgttgaaatttaactttgtaagcttgtatgtggttgttgatcttttttttccttacagacacccataataaaatatcatattaaaattcaaaaaaaaaaaaaaaaaaaaanaaaaaaaaaaaaaaaaataaaaaaaaaaaaaaaaaaaaagaaaaaattttggggcgccgccgcgcccccaagaaaaagaaatttaacagaaacacagcagttgtgtggcgcacgcgcgcccacaagaggagaaagaaaaaagtgaccaaaaaggtggtccccagaagagaacccgcggacacacacagcggcggggagatatcccccaaaaacaacgaccccccgggggaaccacacacagcgtgtttgacagacaaacccccagaagagagagtctataggcagcccaaaacggggaacctcatacaacagggggacgtcacaagagagcagtgcaagataaacaaatatcaccccgccgacacgggggggagacgcgagcgcggagaagtacatacgtagcagagcctgacagagcacatcgaagaacaaacgcacagagaccagaacggaaagaaaggcatgcgcaaacgacgaccgcaaagaaagagatgaagcgcagcgagcaaggcagcgaagaacagaacacagcaagcagcacagactgaacggaatgcagaagtcaggacacgagagagctaccaacccacacagcacagcggaacgaaagaaaaaca

SEQ ID NO: 58807 - DNA, 712 bp, Homo sapiens
  misc_feature (24)..(24): n is a, c, g, or t
  misc_feature (31)..(31): n is a, c, g, or t
ccggtaccgaagctcactctatgnatggtgnttttcagtttagctacggcaatcctgaacttcctgaagatgtccttgatgtgcagctggcattccttcgacttctctccagccgagcttcccagaacatcacatatcactgcaaaaatagcattgcatacatggatcaggccagtggaaatgtaaagaaggccctgaagctgatggggtcaaatgaaggtgaattcaaggctgaaggaaatagcaaattcacctacacagttctggaggatggttgcacgaaacacactggggaatggagcaaaacagtctttgaatatcgaacacgcaaggctgtgagactacctattgtagatattgcaccctatgacattggtggtcctgatcaagaatttggtgtggacgttggccctgtttgctttttataaaccaaactctatctgaaatcccaacaaaaaaaatttaactccatatgtgttcctcttgttctaatcttgtcaaccagtgcaagtgaccgacaaaattccagttatttatttccaaaatgtttggaaacagtataatttgacaaagaaaaatgatacttctctttttttgctgttccaccaaatacaattcaaatgctttttgttttatttttttaccaattccaatttcaaaatgtctcaatggtgctataataaataaacttcaacactctttatgataacaa

SEQ ID NO: 58808 - DNA, 706 bp, Homo sapiens
cggacacggcgagaccaggacggggctcacagtttagctacggcaatcctgaacttcctgaagatgtccttgatgtgcagctggcattccttcgacttctctccagccgagcttcccagaacatcacatatcactgcaaaaatagcattgcatacatggatcaggccagtggaaatgtaaagaaggccctgaagctgatggggtcaaatgaaggtgaattcaaggctgaaggaaatagcaaattcacctacacagttctggaggatggttgcacgaaacacactggggaatggagcaaaacagtctttgaatatcgaacacgcaaggctgtgagactacctattgtagatattgcaccctatgacattggtggtcctgatcaagaatttggtgtggacgttggccctgtttgctttttataaaccaaactctatctgaaatcccaacaaaaaaaatttaactccatatgtgttcctcttgttctaatcttgtcaaccagtgcaagtgaccgacaaaattccagttatttatttccaaaatgtttggaaacagtataatttgacaaagaaaaatgatacttctctttttttgctgttccaccaaatacaattcaaatgctttttgttttatttttttaccaattccaatttcaaaatgtctcaatggtgctataataaataaacttcaacactctttatgataacaa

SEQ ID NO: 58809 - DNA, 5623 bp, Homo sapiens
accccagaaaactacgatagcccttatgaaacttaagggtcgaaggtggatttagcagtaaactaagagtagagtgcttagttgaacagggccctgaagcgcgtacacaccgcccgtcaccctcctcaagtatacttcaaaggacatttaactaaaacccctacgcatttatatagaggagacaagtcgtaacatggtaagtgtactggaaagtgcacttggacgaactggctgagttttatgacgggcccggtgctgaagggcagggaacaacttgatggtgctactttgaactgcttttcttttctcctttttgcacaaagagtctcatgtctgatatttagacatgatgagctttgtgcaaaaggggagctggctacttctcgctctgcttcatcccactattattttggcacaacaggaagctgttgaaggaggatgttcccatcttggtcagtcctatgcggatagagatgtctggaagccagaaccatgccaaatatgtgtctgtgactcaggatccgttctctgcgatgacataatatgtgacgatcaagaattagactgccccaacccagaaattccatttggagaatgttgtgcagtttgcccacagcctccaactgctcctactcgccctcctaatggtcaaggacctcaaggccccaagggagatccaggccctcctggtattcctgggagaaatggtgaccctggtattccaggacaaccagggtcccctggttctcctggcccccctggaatctgtgaatcatgccctactggtcctcagaactattctccccagtatgattcatatgatgtcaagtctggagtagcagtaggaggactcgcaggctatcctggaccagctggccccccaggccctcccggtccccctggtacatctggtcatcctggttcccctggatctccaggataccaaggaccccctggtgaacctgggcaagctggtccttcaggccctccaggacctcctggtgctataggtccatctggtcctgctggaaaagatggagaatcaggtagacccggacgacctggagagcgaggattgcctggacctccaggtatcaaaggtccagctgggatacctggattccctggtatgaaaggacacagaggcttcgatggacgaaatggagaaaagggtgaaacaggtgctcctggattaaagggtgaaaatggtcttccaggcgaaaatggagctcctggacccatgggtccaagaggggctcctggtgagcgaggacggccaggacttcctggggctgcaggtgctcggggtaatgacggtgctcgaggcagtgatggtcaaccaggccctcctggtcctcctggaactgccggattccctggatcccctggtgctaagggtgaagttggacctgcagggtctcctggttcaaatggtgcccctggacaaagaggagaacctggacctcagggacacgctggtgctcaaggtcctcctggccctcctgggattaatggtagtcctggtggtaaaggcgaaatgggtcccgctggcattcctggagctcctggactgatgggagcccggggtcctccaggaccagccggtgctaatggtgctcctggactgcgaggtggtgcaggtgagcctggtaagaatggtgccaaaggagagcccggaccacgtggtgaacgcggtgaggctggtattccaggtgttccaggagctaaaggcgaagatggcaaggatggatcacctggagaacctggtgcaaatgggcttccaggagctgcaggagaaaggggtgcccctgggttccgaggacctgctggaccaaatggcatcccaggagaaaagggtcctgctggagagcgtggtgctccaggccctgcagggcccagaggagctgctggagaacctggcagagatggcgtccctggaggtccaggaatgaggggcatgcccggaagtccaggaggaccaggaagtgatgggaaaccagggcctcccggaagtcaaggagaaagtggtcgaccaggtcctcctgggccatctggtccccgaggtcagcctggtgtcatgggcttccccggtcctaaaggaaatgatggtgctcctggtaagaatggagaacgaggtggccctggaggacctggccctcagggtcctcctggaaagaatggtgaaactggacctcaaggacccccagggcctactgggcctggtggtgacaaaggagacacaggaccccctggtccacaaggattacaaggcttgcctggtacaggtggtcctccaggagaaaatggaaaacctggggaaccaggtccaaagggtgatgccggtgcacctggagctccaggaggcaagggtgatgctggtgcccctggtgaacgtggacctcctggattggcaggggccccaggacttagaggtggagctggtccccctggtcccgaaggaggaaagggtgctgctggtcctcctgggccacctggtgctgctggtactcctggtctgcaaggaatgcctggagaaagaggaggtcttggaagtcctggtccaaagggtgacaagggtgaaccaggcggtccaggtgctgatggtgtcccagggaaagatggcccaaggggtcctactggtcctattggtcctcctggcccagctggccagcctggagataagggtgaaggtggtgcccccggacttccaggtatagctggacctcgtggtagccctggtgagagaggtgaaactggccctccaggacctgctggtttccctggtgctcctggacagaatggtgaacctggtggtaaaggagaaagaggggctccgggtgagaaaggtgaaggaggccctcctggagttgcaggaccccctggaggttctggacctgctggtcctcctggtccccaaggtgtcaaaggtgaacgtggcagtcctggtggacctggtgctgctggcttccctggtgctcgtggtcttcctggtcctcctggtagtaatggtaacccaggacccccaggtcccagcggttctccaggcaaggatgggcccccaggtcctgcgggtaacactggtgctcctggcagccctggagtgtctggaccaaaaggtgatgctggccaaccaggagagaagggatcgcctggtgcccagggcccaccaggagctccaggcccacttgggattgctgggatcactggagcacggggtcttgcaggaccaccaggcatgccaggtcctaggggaagccctggccctcagggtgtcaagggtgaaagtgggaaaccaggagctaacggtctcagtggagaacgtggtccccctggaccccagggtcttcctggtctggctggtacagctggtgaacctggaagagatggaaaccctggatcagatggtcttccaggccgagatggatctcctggtggcaagggtgatcgtggtgaaaatggctctcctggtgcccctggcgctcctggtcatccaggcccacctggtcctgtcggtccagctggaaagagtggtgacagaggagaaagtggccctgctggccctgctggtgctcccggtcctgctggttcccgaggtgctcctggtcctcaaggcccacgtggtgacaaaggtgaaacaggtgaacgtggagctgctggcatcaaaggacatcgaggattccctggtaatccaggtgccccaggttctccaggccctgctggtcagcagggtgcaatcggcagtccaggacctgcaggccccagaggacctgttggacccagtggacctcctggcaaagatggaaccagtggacatccaggtcccattggaccaccagggcctcgaggtaacagaggtgaaagaggatctgagggctccccaggccacccagggcaaccaggccctcctggacctcctggtgcccctggtccttgctgtggtggtgttggagccgctgccattgctgggattggaggtgaaaaagctggcggttttgccccgtattatggagatgaaccaatggatttcaaaatcaacaccgatgagattatgacttcactcaagtctgttaatggacaaatagaaagcctcattagtcctgatggttctcgtaaaaaccccgctagaaactgcagagacctgaaattctgccatcctgaactcaagagtggagaatactgggttgaccctaaccaaggatgcaaattggatgctatcaaggtattctgtaatatggaaactggggaaacatgcataagtgccaatcctttgaatgttccacggaaacactggtggacagattctagtgctgagaagaaacacgtttggtttggagagtccatggatggtggttttcagtttagctacggcaatcctgaacttcctgaagatgtccttgatgtgcagctggcattccttcgacttctctccagccgagcttcccagaacatcacatatcactgcaaaaatagcattgcatacatggatcaggccagtggaaatgtaaagaaggccctgaagctgatggggtcaaatgaaggtgaattcaaggctgaaggaaatagcaaattcacctacacagttctggaggatggttgcacgaaacacactggggaatggagcaaaacagtctttgaatatcgaacacgcaaggctgtgagactacctattgtagatattgcaccctatgacattggtggtcctgatcaagaatttggtgtggacgttggccctgtttgctttttataaaccaaactctatctgaaatcccaacaaaaaaaatttaactccatatgtgttcctcttgttctaatcttgtcaaccagtgcaagtgaccgacaaaattccagttatttatttccaaaatgtttggaaacagtataatttgacaaagaaaaatgatacttctctttttttgctgttccaccaaatacaattcaaatgctttttgttttatttttttaccaattccaatttcaaaatgtctcaatggtgctataataaataaacttcaacactctttatgataacaacactgtgttatattctttgaatcctagcccatctgcagagcaatgactgtgctcaccagtaaaagataacctttctttctgaaatagtcaaatacgaaattagaaaagccctccctattttaactacctcaactggtcagaaacacagattgtattctatgagtcccagaagatgaaaaaaattttatacgttgataaaacttataaatttcattgattaatctcctggaagattggtttaaaaagaaaagtgtaatgcaagaatttaaagaaatatttttaaagccacaattattttaatattggatatcaactgcttgtaaaggtgctcctcttttttcttgtcattgctggtcaagattactaatatttgggaaggctttaaagacgcatgttatggtgctaatgtactttcacttttaaactctagatcagaattctgtaaaggtcaacaataaaaaccaaattatggggctgcttttgtcacactagcatagagaatgtgttgaaatttaactttgtaagcttgtatgtggttgttgatcttttttttccttacagacacccataataaaatatcatattaaaattc

SEQ ID NO: 58810 - DNA, 5604 bp, Homo sapiens
accccagaaaactacgatagcccttatgaaacttaagggtcgaaggtggatttagcagtaaactaagagtagagtgcttagttgaacagggccctgaagcgcgtacacaccgcccgtcaccctcctcaagtatacttcaaaggacatttaactaaaacccctacgcatttatatagaggagacaagtcgtaacatggtaagtgtactggaaagtgcacttggacgaactggctgagttttatgacgggcccggtgctgaagggcagggaacaacttgatggtgctactttgaactgcttttcttttctcctttttgcacaaagagtctcatgtctgatatttagacatgatgagctttgtgcaaaaggggagctggctacttctcgctctgcttcatcccactattattttggcacaacaggaagctgttgaaggaggatgttcccatcttggtcagtcctatgcggatagagatgtctggaagccagaaccatgccaaatatgtgtctgtgactcaggatccgttctctgcgatgacataatatgtgacgatcaagaattagactgccccaacccagaaattccatttggagaatgttgtgcagtttgcccacagcctccaactgctcctactcgccctcctaatggtcaaggacctcaaggccccaagggagatccaggccctcctggtattcctgggagaaatggtgaccctggtattccaggacaaccagggtcccctggttctcctggcccccctggaatctgtgaatcatgccctactggtcctcagaactattctccccagtatgattcatatgatgtcaagtctggagtagcagtaggaggactcgcaggctatcctggaccagctggccccccaggccctcccggtccccctggtacatctggtcatcctggttcccctggatctccaggataccaaggaccccctggtgaacctgggcaagctggtccttcaggccctccaggacctcctggtgctataggtccatctggtcctgctggaaaagatggagaatcaggtagacccggacgacctggagagcgaggattgcctggacctccaggtatcaaaggtccagctgggatacctggattccctggtatgaaaggacacagaggcttcgatggacgaaatggagaaaagggtgaaacaggtgctcctggattaaagggtgaaaatggtcttccaggcgaaaatggagctcctggacccatgggtccaagaggggctcctggtgagcgaggacggccaggacttcctggggctgcaggtgctcggggtaatgacggtgctcgaggcagtgatggtcaaccaggccctcctggtcctcctggaactgccggattccctggatcccctggtgctaagggtgaagttggacctgcagggtctcctggttcaaatggtgcccctggacaaagaggagaacctggacctcagggacacgctggtgctcaaggtcctcctggccctcctgggattaatggtagtcctggtggtaaaggcgaaatgggtcccgctggcattcctggagctcctggactgatgggagcccggggtcctccaggaccagccggtgctaatggtgctcctggactgcgaggtggtgcaggtgagcctggtaagaatggtgccaaaggagagcccggaccacgtggtgaacgcggtgaggctggtattccaggtgttccaggagctaaaggcgaagatggcaaggatggatcacctggagaacctggtgcaaatgggcttccaggagctgcaggagaaaggggtgcccctgggttccgaggacctgctggaccaaatggcatcccaggagaaaagggtcctgctggagagcgtggtgctccaggccctgcagggcccagaggagctgctggagaacctggcagagatggcgtccctggaggtccaggaatgaggggcatgcccggaagtccaggaggaccaggaagtgatgggaaaccagggcctcccggaagtcaaggagaaagtggtcgaccaggtcctcctgggccatctggtccccgaggtcagcctggtgtcatgggcttccccggtcctaaaggaaatgatggtgctcctggtaagaatggagaacgaggtggccctggaggacctggccctcagggtcctcctggaaagaatggtgaaactggacctcaaggacccccagggcctactgggcctggtggtgacaaaggagacacaggaccccctggtccacaaggattacaaggcttgcctggtacaggtggtcctccaggagaaaatggaaaacctggggaaccaggtccaaagggtgatgccggtgcacctggagctccaggaggcaagggtgatgctggtgcccctggtgaacgtggacctcctggattggcaggggccccaggacttagaggtggagctggtccccctggtcccgaaggaggaaagggtgctgctggtcctcctgggccacctggtgctgctggtactcctggtctgcaaggaatgcctggagaaagaggaggtcttggaagtcctggtccaaagggtgacaagggtgaaccaggcggtccaggtgctgatggtgtcccagggaaagatggcccaaggggtcctactggtcctattggtcctcctggcccagctggccagcctggagataagggtgaaggtggtgcccccggacttccaggtatagctggacctcgtggtagccctggtgagagaggtgaaactggccctccaggacctgctggtttccctggtgctcctggacagaatggtgaacctggtggtaaaggagaaagaggggctccgggtgagaaaggtgaaggaggccctcctggagttgcaggaccccctggaggttctggacctgctggtcctcctggtccccaaggtgtcaaaggtgaacgtggcagtcctggtggacctggtgctgctggcttccctggtgctcgtggtcttcctggtcctcctggtagtaatggtaacccaggacccccaggtcccagcggttctccaggcaaggatgggcccccaggtcctgcgggtaacactggtgctcctggcagccctggagtgtctggaccaaaaggtgatgctggccaaccaggagagaagggatcgcctggtgcccagggcccaccaggagctccaggcccacttgggattgctgggatcactggagcacggggtcttgcaggaccaccaggcatgccaggtcctaggggaagccctggccctcagggtgtcaagggtgaaagtgggaaaccaggagctaacggtctcagtggagaacgtggtccccctggaccccagggtcttcctggtctggctggtacagctggtgaacctggaagagatggaaaccctggatcagatggtcttccaggccgagatggatctcctggtggcaagggtgatcgtggtgaaaatggctctcctggtgcccctggcgctcctggtcatccaggcccacctggtcctgtcggtccagctggaaagagtggtgacagaggagaaagtggccctgctggccctgctggtgctcccggtcctgctggttcccgaggtgctcctggtcctcaaggcccacgtggtgacaaaggtgaaacaggtgaacgtggagctgctggcatcaaaggacatcgaggattccctggtaatccaggtgccccaggttctccaggccctgctggtcagcagggtgcaatcggcagtccaggacctgcaggccccagaggacctgttggacccagtggacctcctggcaaagatggaaccagtggacatccaggtcccattggaccaccagggcctcgaggtaacagaggtgaaagaggatctgagggctccccaggccacccagggcaaccaggccctcctggacctcctggtgcccctggtccttgctgtggtggtgttggagccgctgccattgctgggattggaggtgaaaaagctggcggttttgccccgtattatggagatgaaccaatggatttcaaaatcaacaccgatgagattatgacttcactcaagtctgttaatggacaaatagaaagcctcattagtcctgatggttctcgtaaaaaccccgctagaaactgcagagacctgaaattctgccatcctgaactcaagagtggagaatactgggttgaccctaaccaaggatgcaaattggatgctatcaaggtattctgtaatatggaaactggggaaacatgcataagtgccaatcctttgaatgttccacggaaacactggtggacagattctagtgctgagaagaaacacgtttggtttggagagtccatggatggtggttttcagtttagctacggcaatcctgaacttcctgaagatgtccttgatgtgcagctggcattccttcgacttctctccagccgagcttcccagaacatcacatatcactgcaaaaatagcattgcatacatggaaaacacactggggaatggagcaaaacagtctttgaatatcgaacacgcaaggctgtgagactacctattgtagatattgcaccctatgacattggtggtcctgatcaagaatttggtgtggacgttggccctgtttgctttttataaaccaaactctatctgaaatcccaacaaaaaaaatttaactccatatgtgttcctcttgttctaatcttgtcaaccagtgcaagtgaccgacaaaattccagttatttatttccaaaatgtttggaaacagtataatttgacaaagaaaaatgatacttctctttttttgctgttccaccaaatacaattcaaatgctttttgttttatttttttaccaattccaatttcaaaatgtctcaatggtgctataataaataaacttcaacactctttatgataacaacactgtgttatattctttgaatcctagcccatctgcagagcaatgactgtgctcaccagtaaaagataacctttctttctgaaatagtcaaatacgaaattagaaaagccctccctattttaactacctcaactggtcagaaacacagattgtattctatgagtcccagaagatgaaaaaaattttatacgttgataaaacttataaatttcattgattaatctcctggaagattggtttaaaaagaaaagtgtaatgcaagaatttaaagaaatatttttaaagccacaattattttaatattggatatcaactgcttgtaaaggtgctcctcttttttcttgtcattgctggtcaagattactaatatttgggaaggctttaaagacgcatgttatggtgctaatgtactttcacttttaaactctagatcagaattgttgacttgcattcagaacataaatgcacaaaatctgtacatgtctcccatcagaaagattcattggcatgccacaggggattctcctccttcatcctgtaaaggtcaacaataaaaaccaaattatggggctgcttttgtcacactagcatagagaatgtgttgaaatttaactttgtaagcttgtatgtggttgttgatcttttttttccttacagacacccataataaaatatcatattaaaattc

SEQ ID NO: 58811 - DNA, 5344 bp, Homo sapiens
accccagaaaactacgatagcccttatgaaacttaagggtcgaaggtggatttagcagtaaactaagagtagagtgcttagttgaacagggccctgaagcgcgtacacaccgcccgtcaccctcctcaagtatacttcaaaggacatttaactaaaacccctacgcatttatatagaggagacaagtcgtaacatggtaagtgtactggaaagtgcacttggacgaactggctgagttttatgacgggcccggtgctgaagggcagggaacaacttgatggtgctactttgaactgcttttcttttctcctttttgcacaaagagtctcatgtctgatatttagacatgatgagctttgtgcaaaaggggagctggctacttctcgctctgcttcatcccactattattttggcacaacaggaagctgttgaaggaggatgttcccatcttggtcagtcctatgcggatagagatgtctggaagccagaaccatgccaaatatgtgtctgtgactcaggatccgttctctgcgatgacataatatgtgacgatcaagaattagactgccccaacccagaaattccatttggagaatgttgtgcagtttgcccacagcctccaactgctcctactcgccctcctaatggtcaaggacctcaaggccccaagggagatccaggccctcctggtattcctgggagaaatggtgaccctggtattccaggacaaccagggtcccctggttctcctggcccccctggaatctgtgaatcatgccctactggtcctcagaactattctccccagtatgattcatatgatgtcaagtctggagtagcagtaggaggactcgcaggctatcctggaccagctggccccccaggccctcccggtccccctggtacatctggtcatcctggttcccctggatctccaggataccaaggaccccctggtgaacctgggcaagctggtccttcaggccctccaggacctcctggtgctataggtccatctggtcctgctggaaaagatggagaatcaggtagacccggacgacctggagagcgaggattgcctggacctccaggtatcaaaggtccagctgggatacctggattccctggtatgaaaggacacagaggcttcgatggacgaaatggagaaaagggtgaaacaggtgctcctggattaaagggtgaaaatggtcttccaggcgaaaatggagctcctggacccatgggtccaagaggggctcctggtgagcgaggacggccaggacttcctggggctgcaggtgctcggggtaatgacggtgctcgaggcagtgatggtcaaccaggccctcctggtcctcctggaactgccggattccctggatcccctggtgctaagggtgaagttggacctgcagggtctcctggttcaaatggtgcccctggacaaagaggagaacctggacctcagggacacgctggtgctcaaggtcctcctggccctcctgggattaatggtagtcctggtggtaaaggcgaaatgggtcccgctggcattcctggagctcctggactgatgggagcccggggtcctccaggaccagccggtgctaatggtgctcctggactgcgaggtggtgcaggtgagcctggtaagaatggtgccaaaggagagcccggaccacgtggtgaacgcggtgaggctggtattccaggtgttccaggagctaaaggcgaagatggcaaggatggatcacctggagaacctggtgcaaatgggcttccaggagctgcaggagaaaggggtgcccctgggttccgaggacctgctggaccaaatggcatcccaggagaaaagggtcctgctggagagcgtggtgctccaggccctgcagggcccagaggagctgctggagaacctggcagagatggcgtccctggaggtccaggaatgaggggcatgcccggaagtccaggaggaccaggaagtgatgggaaaccagggcctcccggaagtcaaggagaaagtggtcgaccaggtcctcctgggccatctggtccccgaggtcagcctggtgtcatgggcttccccggtcctaaaggaaatgatggtgctcctggtaagaatggagaacgaggtggccctggaggacctggccctcagggtcctcctggaaagaatggtgaaactggacctcaaggacccccagggcctactgggcctggtggtgacaaaggagacacaggaccccctggtccacaaggattacaaggcttgcctggtacaggtggtcctccaggagaaaatggaaaacctggggaaccaggtccaaagggtgatgccggtgcacctggagctccaggaggcaagggtgatgctggtgcccctggtgaacgtggacctcctggattggcaggggccccaggacttagaggtggagctggtccccctggtcccgaaggaggaaagggtgctgctggtcctcctgggccacctggtgctgctggtactcctggtctgcaaggaatgcctggagaaagaggaggtcttggaagtcctggtccaaagggtgacaagggtgaaccaggcggtccaggtgctgatggtgtcccagggaaagatggcccaaggggtcctactggtcctattggtcctcctggcccagctggccagcctggagataagggtgaaggtggtgcccccggacttccaggtatagctggacctcgtggtagccctggtgagagaggtgaaactggccctccaggacctgctggtttccctggtgctcctggacagaatggtgaacctggtggtaaaggagaaagaggggctccgggtgagaaaggtgaaggaggccctcctggagttgcaggaccccctggaggttctggacctgctggtcctcctggtccccaaggtgtcaaaggtgaacgtggcagtcctggtggacctggtgctgctggcttccctggtgctcgtggtcttcctggtcctcctggtagtaatggtaacccaggacccccaggtcccagcggttctccaggcaaggatgggcccccaggtcctgcgggtaacactggtgctcctggcagccctggagtgtctggaccaaaaggtgatgctggccaaccaggagagaagggatcgcctggtgcccagggcccaccaggagctccaggcccacttgggattgctgggatcactggagcacggggtcttgcaggaccaccaggcatgccaggtcctaggggaagccctggccctcagggtgtcaagggtgaaagtgggaaaccaggagctaacggtctcagtggagaacgtggtccccctggaccccagggtcttcctggtctggctggtacagctggtgaacctggaagagatggaaaccctggatcagatggtcttccaggccgagatggatctcctggtggcaagggtgatcgtggtgaaaatggctctcctggtgcccctggcgctcctggtcatccaggcccacctggtcctgtcggtccagctggaaagagtggtgacagaggagaaagtggccctgctggccctgctggtgctcccggtcctgctggttcccgaggtgctcctggtcctcaaggcccacgtggtgacaaaggtgaaacaggtgaacgtggagctgctggcatcaaaggacatcgaggattccctggtaatccaggtgccccaggttctccaggccctgctggtcagcagggtgcaatcggcagtccaggacctgcaggccccagaggacctgttggacccagtggacctcctggcaaagatggaaccagtggacatccaggtcccattggaccaccagggcctcgaggtaacagaggtgaaagaggatctgagggctccccaggccacccagggcaaccaggccctcctggacctcctggtgcccctggtccttgctgtggtggtgttggagccgctgccattgctgggattggaggtgaaaaagctggcggttttgccccgtattatggagatgaaccaatggatttcaaaatcaacaccgatgagattatgacttcactcaagtctgttaatggacaaatagaaagcctcattagtcctgatggttctcgtaaaaaccccgctagaaactgcagagacctgaaattctgccatcctgaactcaagagtggagaatactgggttgaccctaaccaaggatgcaaattggatgctatcaaggtattctgtaatatggaaactggggaaacatgcataagtgccaatcctttgaatgttccacggaaacactggtggacagattctagtgctgagaagaaacacgtttggtttggagagtccatggatggtggttttcagtttagctacggcaatcctgaacttcctgaagatgtccttgatgtgcagctggcattccttcgacttctctccagccgagcttcccagaacatcacatatcactgcaaaaatagcattgcatacatggatcaggccagtggaaatgtaaagaaggccctgaagctgatggggtcaaatgaaggtgaattcaaggctgaaggaaatagcaaattcacctacacagttctggaggatggttgcacgaaacacactggggaatggagcaaaacagtctttgaatatcgaacacgcaaggctgtgagactacctattgtagatattgcaccctatgacattggtggtcctgatcaagaatttggtgtggacgttggccctgtttgctttttataaaccaaactctatctgaaatcccaacaaaaaaaatttaactccatatgtgttcctcttgttctaatcttgtcaaccagtgcaagtgaccgacaaaattccagttatttatttccaaaatgtttggaaacagtataatttgacaaagaaaaatgatacttctctttttttgctgttccaccaaatacaattcaaatgctttttgttttatttttttaccaattccaatttcaaaatgtctcaatggtgctataataaataaacttcaacactctttatgataacaaaaaaaagacaaaaaacagcaagaacacactgtgtgggcacactagagacccagagagaggtttgtaaacacacatccgtatggggcacggggagcccacgtaggaggtatggtgaacaaggcgcgcaaaagcggtgtgccacgaggagaaaaactcggggcgcaaaacacaaggggggggattctcacagaataaaaaagcccgggggggacacaccgggacggttcttgaaacaaatcacaaaggagagtccggaggcacacaagaggagatcaataacagagggccacaagggaggcgcgaaataaataca

SEQ ID NO: 58812 - DNA, 5021 bp, Homo sapiens
  misc_feature (5008)..(5008): n is a, c, g, or t
  misc_feature (5017)..(5017): n is a, c, g, or t
accccagaaaactacgatagcccttatgaaacttaagggtcgaaggtggatttagcagtaaactaagagtagagtgcttagttgaacagggccctgaagcgcgtacacaccgcccgtcaccctcctcaagtatacttcaaaggacatttaactaaaacccctacgcatttatatagaggagacaagtcgtaacatggtaagtgtactggaaagtgcacttggacgaactggctgagttttatgacgggcccggtgctgaagggcagggaacaacttgatggtgctactttgaactgcttttcttttctcctttttgcacaaagagtctcatgtctgatatttagacatgatgagctttgtgcaaaaggggagctggctacttctcgctctgcttcatcccactattattttggcacaacaggaagctgttgaaggaggatgttcccatcttggtcagtcctatgcggatagagatgtctggaagccagaaccatgccaaatatgtgtctgtgactcaggatccgttctctgcgatgacataatatgtgacgatcaagaattagactgccccaacccagaaattccatttggagaatgttgtgcagtttgcccacagcctccaactgctcctactcgccctcctaatggtcaaggacctcaaggccccaagggagatccaggccctcctggtattcctgggagaaatggtgaccctggtattccaggacaaccagggtcccctggttctcctggcccccctggaatctgtgaatcatgccctactggtcctcagaactattctccccagtatgattcatatgatgtcaagtctggagtagcagtaggaggactcgcaggctatcctggaccagctggccccccaggccctcccggtccccctggtacatctggtcatcctggttcccctggatctccaggataccaaggaccccctggtgaacctgggcaagctggtccttcaggccctccaggacctcctggtgctataggtccatctggtcctgctggaaaagatggagaatcaggtagacccggacgacctggagagcgaggattgcctggacctccaggtatcaaaggtccagctgggatacctggattccctggtatgaaaggacacagaggcttcgatggacgaaatggagaaaagggtgaaacaggtgctcctggattaaagggtgaaaatggtcttccaggcgaaaatggagctcctggacccatgggtccaagaggggctcctggtgagcgaggacggccaggacttcctggggctgcaggtgctcggggtaatgacggtgctcgaggcagtgatggtcaaccaggccctcctggtcctcctggaactgccggattccctggatcccctggtgctaagggtgaagttggacctgcagggtctcctggttcaaatggtgcccctggacaaagaggagaacctggacctcagggacacgctggtgctcaaggtcctcctggccctcctgggattaatggtagtcctggtggtaaaggcgaaatgggtcccgctggcattcctggagctcctggactgatgggagcccggggtcctccaggaccagccggtgctaatggtgctcctggactgcgaggtggtgcaggtgagcctggtaagaatggtgccaaaggagagcccggaccacgtggtgaacgcggtgaggctggtattccaggtgttccaggagctaaaggcgaagatggcaaggatggatcacctggagaacctggtgcaaatgggcttccaggagctgcaggagaaaggggtgcccctgggttccgaggacctgctggaccaaatggcatcccaggagaaaagggtcctgctggagagcgtggtgctccaggccctgcagggcccagaggagctgctggagaacctggcagagatggcgtccctggaggtccaggaatgaggggcatgcccggaagtccaggaggaccaggaagtgatgggaaaccagggcctcccggaagtcaaggagaaagtggtcgaccaggtcctcctgggccatctggtccccgaggtcagcctggtgtcatgggcttccccggtcctaaaggaaatgatggtgctcctggtaagaatggagaacgaggtggccctggaggacctggccctcagggtcctcctggaaagaatggtgaaactggacctcaaggacccccagggcctactgggcctggtggtgacaaaggagacacaggaccccctggtccacaaggattacaaggcttgcctggtacaggtggtcctccaggagaaaatggaaaacctggggaaccaggtccaaagggtgatgccggtgcacctggagctccaggaggcaagggtgatgctggtgcccctggtgaacgtggacctcctggattggcaggggccccaggacttagaggtggagctggtccccctggtcccgaaggaggaaagggtgctgctggtcctcctgggccacctggtgctgctggtactcctggtctgcaaggaatgcctggagaaagaggaggtcttggaagtcctggtccaaagggtgacaagggtgaaccaggcggtccaggtgctgatggtgtcccagggaaagatggcccaaggggtcctactggtcctattggtcctcctggcccagctggccagcctggagataagggtgaaggtggtgcccccggacttccaggtatagctggacctcgtggtagccctggtgagagaggtgaaactggccctccaggacctgctggtttccctggtgctcctggacagaatggtgaacctggtggtaaaggagaaagaggggctccgggtgagaaaggtgaaggaggccctcctggagttgcaggaccccctggaggttctggacctgctggtcctcctggtccccaaggtgtcaaaggtgaacgtggcagtcctggtggacctggtgctgctggcttccctggtgctcgtggtcttcctggtcctcctggtagtaatggtaacccaggacccccaggtcccagcggttctccaggcaaggatgggcccccaggtcctgcgggtaacactggtgctcctggcagccctggagtgtctggaccaaaaggtgatgctggccaaccaggagagaagggatcgcctggtgcccagggcccaccaggagctccaggcccacttgggattgctgggatcactggagcacggggtcttgcaggaccaccaggcatgccaggtcctaggggaagccctggccctcagggtgtcaagggtgaaagtgggaaaccaggagctaacggtctcagtggagaacgtggtccccctggaccccagggtcttcctggtctggctggtacagctggtgaacctggaagagatggaaaccctggatcagatggtcttccaggccgagatggatctcctggtggcaagggtgatcgtggtgaaaatggctctcctggtgcccctggcgctcctggtcatccaggcccacctggtcctgtcggtccagctggaaagagtggtgacagaggagaaagtggccctgctggccctgctggtgctcccggtcctgctggttcccgaggtgctcctggtcctcaaggcccacgtggtgacaaaggtgaaacaggtgaacgtggagctgctggcatcaaaggacatcgaggattccctggtaatccaggtgccccaggttctccaggccctgctggtcagcagggtgcaatcggcagtccaggacctgcaggccccagaggacctgttggacccagtggacctcctggcaaagatggaaccagtggacatccaggtcccattggaccaccagggcctcgaggtaacagaggtgaaagaggatctgagggctccccaggccacccagggcaaccaggccctcctggacctcctggtgcccctggtccttgctgtggtggtgttggagccgctgccattgctgggattggaggtgaaaaagctggcggttttgccccgtattatggagatgaaccaatggatttcaaaatcaacaccgatgagattatgacttcactcaagtctgttaatggacaaatagaaagcctcattagtcctgatggttctcgtaaaaaccccgctagaaactgcagagacctgaaattctgccatcctgaactcaagagtggagaatactgggttgaccctaaccaaggatgcaaattggatgctatcaaggtattctgtaatatggaaactggggaaacatgcataagtgccaatcctttgaatgttccacggaaacactggtggacagattctagtgctgagaagaaacacgtttggtttggagagtccatggatggtggttttcagtttagctacggcaatcctgaacttcctgaagatgtccttgatgtgcagctggcattccttcgacttctctccagccgagcttcccagaacatcacatatcactgcaaaaatagcattgcatacatggatcaggccagtggaaatgtaaagaaggccctgaagctgatggggtcaaatgaaggtgaattcaaggctgaaggaaatagcaaattcacctacacagttctggaggatggttgcacgaaacacactggggaatggagcaaaacagtctttgaatatcgaacacgcaaggctgtgagactacctattgtagatattgcaccctatgacattggtggtcctgatcaagaatttggtgtggacgttggccctgtttgctttttataaaccaaactctatctgaaatcccaacaaaaaaaatttaactccatatgtgttcctcttgttctaatcttgtcaaccagtgcaagtgaccgacaaaattccagttatttatttccaaaatgtttggaaacagtataatttgacaaagaaaaatgatacttctctttttttgctgttccaccaaatacaattcaaatgctttttgttttatttttttaccaattccaatttcaaaatgtctcaatggtgctacagggggccggnaccgagctngata

SEQ ID NO: 58813 - DNA, 5049 bp, Homo sapiens
accccagaaaactacgatagcccttatgaaacttaagggtcgaaggtggatttagcagtaaactaagagtagagtgcttagttgaacagggccctgaagcgcgtacacaccgcccgtcaccctcctcaagtatacttcaaaggacatttaactaaaacccctacgcatttatatagaggagacaagtcgtaacatggtaagtgtactggaaagtgcacttggacgaactggctgagttttatgacgggcccggtgctgaagggcagggaacaacttgatggtgctactttgaactgcttttcttttctcctttttgcacaaagagtctcatgtctgatatttagacatgatgagctttgtgcaaaaggggagctggctacttctcgctctgcttcatcccactattattttggcacaacaggaagctgttgaaggaggatgttcccatcttggtcagtcctatgcggatagagatgtctggaagccagaaccatgccaaatatgtgtctgtgactcaggatccgttctctgcgatgacataatatgtgacgatcaagaattagactgccccaacccagaaattccatttggagaatgttgtgcagtttgcccacagcctccaactgctcctactcgccctcctaatggtcaaggacctcaaggccccaagggagatccaggccctcctggtattcctgggagaaatggtgaccctggtattccaggacaaccagggtcccctggttctcctggcccccctggaatctgtgaatcatgccctactggtcctcagaactattctccccagtatgattcatatgatgtcaagtctggagtagcagtaggaggactcgcaggctatcctggaccagctggccccccaggccctcccggtccccctggtacatctggtcatcctggttcccctggatctccaggataccaaggaccccctggtgaacctgggcaagctggtccttcaggccctccaggacctcctggtgctataggtccatctggtcctgctggaaaagatggagaatcaggtagacccggacgacctggagagcgaggattgcctggacctccaggtatcaaaggtccagctgggatacctggattccctggtatgaaaggacacagaggcttcgatggacgaaatggagaaaagggtgaaacaggtgctcctggattaaagggtgaaaatggtcttccaggcgaaaatggagctcctggacccatgggtccaagaggggctcctggtgagcgaggacggccaggacttcctggggctgcaggtgctcggggtaatgacggtgctcgaggcagtgatggtcaaccaggccctcctggtcctcctggaactgccggattccctggatcccctggtgctaagggtgaagttggacctgcagggtctcctggttcaaatggtgcccctggacaaagaggagaacctggacctcagggacacgctggtgctcaaggtcctcctggccctcctgggattaatggtagtcctggtggtaaaggcgaaatgggtcccgctggcattcctggagctcctggactgatgggagcccggggtcctccaggaccagccggtgctaatggtgctcctggactgcgaggtggtgcaggtgagcctggtaagaatggtgccaaaggagagcccggaccacgtggtgaacgcggtgaggctggtattccaggtgttccaggagctaaaggcgaagatggcaaggatggatcacctggagaacctggtgcaaatgggcttccaggagctgcaggagaaaggggtgcccctgggttccgaggacctgctggaccaaatggcatcccaggagaaaagggtcctgctggagagcgtggtgctccaggccctgcagggcccagaggagctgctggagaacctggcagagatggcgtccctggaggtccaggaatgaggggcatgcccggaagtccaggaggaccaggaagtgatgggaaaccagggcctcccggaagtcaaggagaaagtggtcgaccaggtcctcctgggccatctggtccccgaggtcagcctggtgtcatgggcttccccggtcctaaaggaaatgatggtgctcctggtaagaatggagaacgaggtggccctggaggacctggccctcagggtcctcctggaaagaatggtgaaactggacctcaaggacccccagggcctactgggcctggtggtgacaaaggagacacaggaccccctggtccacaaggattacaaggcttgcctggtacaggtggtcctccaggagaaaatggaaaacctggggaaccaggtccaaagggtgatgccggtgcacctggagctccaggaggcaagggtgatgctggtgcccctggtgaacgtggacctcctggattggcaggggccccaggacttagaggtggagctggtccccctggtcccgaaggaggaaagggtgctgctggtcctcctgggccacctggtgctgctggtactcctggtctgcaaggaatgcctggagaaagaggaggtcttggaagtcctggtccaaagggtgacaagggtgaaccaggcggtccaggtgctgatggtgtcccagggaaagatggcccaaggggtcctactggtcctattggtcctcctggcccagctggccagcctggagataagggtgaaggtggtgcccccggacttccaggtatagctggacctcgtggtagccctggtgagagaggtgaaactggccctccaggacctgctggtttccctggtgctcctggacagaatggtgaacctggtggtaaaggagaaagaggggctccgggtgagaaaggtgaaggaggccctcctggagttgcaggaccccctggaggttctggacctgctggtcctcctggtccccaaggtgtcaaaggtgaacgtggcagtcctggtggacctggtgctgctggcttccctggtgctcgtggtcttcctggtcctcctggtagtaatggtaacccaggacccccaggtcccagcggttctccaggcaaggatgggcccccaggtcctgcgggtaacactggtgctcctggcagccctggagtgtctggaccaaaaggtgatgctggccaaccaggagagaagggatcgcctggtgcccagggcccaccaggagctccaggcccacttgggattgctgggatcactggagcacggggtcttgcaggaccaccaggcatgccaggtcctaggggaagccctggccctcagggtgtcaagggtgaaagtgggaaaccaggagctaacggtctcagtggagaacgtggtccccctggaccccagggtcttcctggtctggctggtacagctggtgaacctggaagagatggaaaccctggatcagatggtcttccaggccgagatggatctcctggtggcaagggtgatcgtggtgaaaatggctctcctggtgcccctggcgctcctggtcatccaggcccacctggtcctgtcggtccagctggaaagagtggtgacagaggagaaagtggccctgctggccctgctggtgctcccggtcctgctggttcccgaggtgctcctggtcctcaaggcccacgtggtgacaaaggtgaaacaggtgaacgtggagctgctggcatcaaaggacatcgaggattccctggtaatccaggtgccccaggttctccaggccctgctggtcagcagggtgcaatcggcagtccaggacctgcaggccccagaggacctgttggacccagtggacctcctggcaaagatggaaccagtggacatccaggtcccattggaccaccagggcctcgaggtaacagaggtgaaagaggatctgagggctccccaggccacccagggcaaccaggccctcctggacctcctggtgcccctggtccttgctgtggtggtgttggagccgctgccattgctgggattggaggtgaaaaagctggcggttttgccccgtattatggagatgaaccaatggatttcaaaatcaacaccgatgagattatgacttcactcaagtctgttaatggacaaatagaaagcctcattagtcctgatggttctcgtaaaaaccccgctagaaactgcagagacctgaaattctgccatcctgaactcaagagtggagaatactgggttgaccctaaccaaggatgcaaattggatgctatcaaggtattctgtaatatggaaactggggaaacatgcataagtgccaatcctttgaatgttccacggaaacactggtggacagattctagtgctgagaagaaacacgtttggtttggagagtccatggatggtggttttcagtttagctacggcaatcctgaacttcctgaagatgtccttgatgtgcagctggcattccttcgacttctctccagccgagcttcccagaacatcacatatcactgcaaaaatagcattgcatacatggatcaggccagtggaaatgtaaagaaggccctgaagctgatggggtcaaatgaaggtgaattcaaggctgaaggaaatagcaaattcacctacacagttctggaggatggttgcacgaaacacactggggaatggagcaaaacagtctttgaatatcgaacacgcaaggctgtgagactacctattgtagatattgcaccctatgacattggtggtcctgatcaagaatttggtgtggacgttggccctgtttgctttttataaaccaaactctatctgaaatcccaacaaaaaaaatttaactccatatgtgttcctcttgttctaatcttgtcaaccagtgcaagtgaccgacaaaattccagttatttatttccaaaatgtttggaaacagtataatttgacaaagaaaaatgatacttctctttttttgctgttccaccaaatacaattcaaatgctttttgttttatttttttaccaattccaatttcaaaatgtctcaatggtgctagccatcggaaacttcgccatcggaaacttcgccatcggaaacttcgccatcgg

SEQ ID NO: 58814 - DNA, 4993 bp, Homo sapiens
accccagaaaactacgatagcccttatgaaacttaagggtcgaaggtggatttagcagtaaactaagagtagagtgcttagttgaacagggccctgaagcgcgtacacaccgcccgtcaccctcctcaagtatacttcaaaggacatttaactaaaacccctacgcatttatatagaggagacaagtcgtaacatggtaagtgtactggaaagtgcacttggacgaactggctgagttttatgacgggcccggtgctgaagggcagggaacaacttgatggtgctactttgaactgcttttcttttctcctttttgcacaaagagtctcatgtctgatatttagacatgatgagctttgtgcaaaaggggagctggctacttctcgctctgcttcatcccactattattttggcacaacaggaagctgttgaaggaggatgttcccatcttggtcagtcctatgcggatagagatgtctggaagccagaaccatgccaaatatgtgtctgtgactcaggatccgttctctgcgatgacataatatgtgacgatcaagaattagactgccccaacccagaaattccatttggagaatgttgtgcagtttgcccacagcctccaactgctcctactcgccctcctaatggtcaaggacctcaaggccccaagggagatccaggccctcctggtattcctgggagaaatggtgaccctggtattccaggacaaccagggtcccctggttctcctggcccccctggaatctgtgaatcatgccctactggtcctcagaactattctccccagtatgattcatatgatgtcaagtctggagtagcagtaggaggactcgcaggctatcctggaccagctggccccccaggccctcccggtccccctggtacatctggtcatcctggttcccctggatctccaggataccaaggaccccctggtgaacctgggcaagctggtccttcaggccctccaggacctcctggtgctataggtccatctggtcctgctggaaaagatggagaatcaggtagacccggacgacctggagagcgaggattgcctggacctccaggtatcaaaggtccagctgggatacctggattccctggtatgaaaggacacagaggcttcgatggacgaaatggagaaaagggtgaaacaggtgctcctggattaaagggtgaaaatggtcttccaggcgaaaatggagctcctggacccatgggtccaagaggggctcctggtgagcgaggacggccaggacttcctggggctgcaggtgctcggggtaatgacggtgctcgaggcagtgatggtcaaccaggccctcctggtcctcctggaactgccggattccctggatcccctggtgctaagggtgaagttggacctgcagggtctcctggttcaaatggtgcccctggacaaagaggagaacctggacctcagggacacgctggtgctcaaggtcctcctggccctcctgggattaatggtagtcctggtggtaaaggcgaaatgggtcccgctggcattcctggagctcctggactgatgggagcccggggtcctccaggaccagccggtgctaatggtgctcctggactgcgaggtggtgcaggtgagcctggtaagaatggtgccaaaggagagcccggaccacgtggtgaacgcggtgaggctggtattccaggtgttccaggagctaaaggcgaagatggcaaggatggatcacctggagaacctggtgcaaatgggcttccaggagctgcaggagaaaggggtgcccctgggttccgaggacctgctggaccaaatggcatcccaggagaaaagggtcctgctggagagcgtggtgctccaggccctgcagggcccagaggagctgctggagaacctggcagagatggcgtccctggaggtccaggaatgaggggcatgcccggaagtccaggaggaccaggaagtgatgggaaaccagggcctcccggaagtcaaggagaaagtggtcgaccaggtcctcctgggccatctggtccccgaggtcagcctggtgtcatgggcttccccggtcctaaaggaaatgatggtgctcctggtaagaatggagaacgaggtggccctggaggacctggccctcagggtcctcctggaaagaatggtgaaactggacctcaaggacccccagggcctactgggcctggtggtgacaaaggagacacaggaccccctggtccacaaggattacaaggcttgcctggtacaggtggtcctccaggagaaaatggaaaacctggggaaccaggtccaaagggtgatgccggtgcacctggagctccaggaggcaagggtgatgctggtgcccctggtgaacgtggacctcctggattggcaggggccccaggacttagaggtggagctggtccccctggtcccgaaggaggaaagggtgctgctggtcctcctgggccacctggtgctgctggtactcctggtctgcaaggaatgcctggagaaagaggaggtcttggaagtcctggtccaaagggtgacaagggtgaaccaggcggtccaggtgctgatggtgtcccagggaaagatggcccaaggggtcctactggtcctattggtcctcctggcccagctggccagcctggagataagggtgaaggtggtgcccccggacttccaggtatagctggacctcgtggtagccctggtgagagaggtgaaactggccctccaggacctgctggtttccctggtgctcctggacagaatggtgaacctggtggtaaaggagaaagaggggctccgggtgagaaaggtgaaggaggccctcctggagttgcaggaccccctggaggttctggacctgctggtcctcctggtccccaaggtgtcaaaggtgaacgtggcagtcctggtggacctggtgctgctggcttccctggtgctcgtggtcttcctggtcctcctggtagtaatggtaacccaggacccccaggtcccagcggttctccaggcaaggatgggcccccaggtcctgcgggtaacactggtgctcctggcagccctggagtgtctggaccaaaaggtgatgctggccaaccaggagagaagggatcgcctggtgcccagggcccaccaggagctccaggcccacttgggattgctgggatcactggagcacggggtcttgcaggaccaccaggcatgccaggtcctaggggaagccctggccctcagggtgtcaagggtgaaagtgggaaaccaggagctaacggtctcagtggagaacgtggtccccctggaccccagggtcttcctggtctggctggtacagctggtgaacctggaagagatggaaaccctggatcagatggtcttccaggccgagatggatctcctggtggcaagggtgatcgtggtgaaaatggctctcctggtgcccctggcgctcctggtcatccaggcccacctggtcctgtcggtccagctggaaagagtggtgacagaggagaaagtggccctgctggccctgctggtgctcccggtcctgctggttcccgaggtgctcctggtcctcaaggcccacgtggtgacaaaggtgaaacaggtgaacgtggagctgctggcatcaaaggacatcgaggattccctggtaatccaggtgccccaggttctccaggccctgctggtcagcagggtgcaatcggcagtccaggacctgcaggccccagaggacctgttggacccagtggacctcctggcaaagatggaaccagtggacatccaggtcccattggaccaccagggcctcgaggtaacagaggtgaaagaggatctgagggctccccaggccacccagggcaaccaggccctcctggacctcctggtgcccctggtccttgctgtggtggtgttggagccgctgccattgctgggattggaggtgaaaaagctggcggttttgccccgtattatggagatgaaccaatggatttcaaaatcaacaccgatgagattatgacttcactcaagtctgttaatggacaaatagaaagcctcattagtcctgatggttctcgtaaaaaccccgctagaaactgcagagacctgaaattctgccatcctgaactcaagagtggagaatactgggttgaccctaaccaaggatgcaaattggatgctatcaaggtattctgtaatatggaaactggggaaacatgcataagtgccaatcctttgaatgttccacggaaacactggtggacagattctagtgctgagaagaaacacgtttggtttggagagtccatggatggtggttttcagtttagctacggcaatcctgaacttcctgaagatgtccttgatgtgcagctggcattccttcgacttctctccagccgagcttcccagaacatcacatatcactgcaaaaatagcattgcatacatggatcaggccagtggaaatgtaaagaaggccctgaagctgatggggtcaaatgaaggtgaattcaaggctgaaggaaatagcaaattcacctacacagttctggaggatggttgcacgaaacacactggggaatggagcaaaacagtctttgaatatcgaacacgcaaggctgtgagactacctattgtagatattgcaccctatgacattggtggtcctgatcaagaatttggtgtggacgttggccctgtttgctttttataaaccaaactctatctgaaatcccaacaaaaaaaatttaactccatatgtgttcctcttgttctaatcttgtcaaccagtgcaagtgaccgacaaaattccagttatttatttccaaaatgtttggaaacagtataatttgacaaagaaaaatgatacttctctttttttgctgttccaccacttgttttgtcactcacgggtctggcctgccgagataagctccatacactcggcattagctgtttc

SEQ ID NO: 58815 - DNA, 4793 bp, Homo sapiens
  misc_feature (4681)..(4681): n is a, c, g, or t
  misc_feature (4701)..(4701): n is a, c, g, or t
accccagaaaactacgatagcccttatgaaacttaagggtcgaaggtggatttagcagtaaactaagagtagagtgcttagttgaacagggccctgaagcgcgtacacaccgcccgtcaccctcctcaagtatacttcaaaggacatttaactaaaacccctacgcatttatatagaggagacaagtcgtaacatggtaagtgtactggaaagtgcacttggacgaactggctgagttttatgacgggcccggtgctgaagggcagggaacaacttgatggtgctactttgaactgcttttcttttctcctttttgcacaaagagtctcatgtctgatatttagacatgatgagctttgtgcaaaaggggagctggctacttctcgctctgcttcatcccactattattttggcacaacaggaagctgttgaaggaggatgttcccatcttggtcagtcctatgcggatagagatgtctggaagccagaaccatgccaaatatgtgtctgtgactcaggatccgttctctgcgatgacataatatgtgacgatcaagaattagactgccccaacccagaaattccatttggagaatgttgtgcagtttgcccacagcctccaactgctcctactcgccctcctaatggtcaaggacctcaaggccccaagggagatccaggccctcctggtattcctgggagaaatggtgaccctggtattccaggacaaccagggtcccctggttctcctggcccccctggaatctgtgaatcatgccctactggtcctcagaactattctccccagtatgattcatatgatgtcaagtctggagtagcagtaggaggactcgcaggctatcctggaccagctggccccccaggccctcccggtccccctggtacatctggtcatcctggttcccctggatctccaggataccaaggaccccctggtgaacctgggcaagctggtccttcaggccctccaggacctcctggtgctataggtccatctggtcctgctggaaaagatggagaatcaggtagacccggacgacctggagagcgaggattgcctggacctccaggtatcaaaggtccagctgggatacctggattccctggtatgaaaggacacagaggcttcgatggacgaaatggagaaaagggtgaaacaggtgctcctggattaaagggtgaaaatggtcttccaggcgaaaatggagctcctggacccatgggtccaagaggggctcctggtgagcgaggacggccaggacttcctggggctgcaggtgctcggggtaatgacggtgctcgaggcagtgatggtcaaccaggccctcctggtcctcctggaactgccggattccctggatcccctggtgctaagggtgaagttggacctgcagggtctcctggttcaaatggtgcccctggacaaagaggagaacctggacctcagggacacgctggtgctcaaggtcctcctggccctcctgggattaatggtagtcctggtggtaaaggcgaaatgggtcccgctggcattcctggagctcctggactgatgggagcccggggtcctccaggaccagccggtgctaatggtgctcctggactgcgaggtggtgcaggtgagcctggtaagaatggtgccaaaggagagcccggaccacgtggtgaacgcggtgaggctggtattccaggtgttccaggagctaaaggcgaagatggcaaggatggatcacctggagaacctggtgcaaatgggcttccaggagctgcaggagaaaggggtgcccctgggttccgaggacctgctggaccaaatggcatcccaggagaaaagggtcctgctggagagcgtggtgctccaggccctgcagggcccagaggagctgctggagaacctggcagagatggcgtccctggaggtccaggaatgaggggcatgcccggaagtccaggaggaccaggaagtgatgggaaaccagggcctcccggaagtcaaggagaaagtggtcgaccaggtcctcctgggccatctggtccccgaggtcagcctggtgtcatgggcttccccggtcctaaaggaaatgatggtgctcctggtaagaatggagaacgaggtggccctggaggacctggccctcagggtcctcctggaaagaatggtgaaactggacctcaaggacccccagggcctactgggcctggtggtgacaaaggagacacaggaccccctggtccacaaggattacaaggcttgcctggtacaggtggtcctccaggagaaaatggaaaacctggggaaccaggtccaaagggtgatgccggtgcacctggagctccaggaggcaagggtgatgctggtgcccctggtgaacgtggacctcctggattggcaggggccccaggacttagaggtggagctggtccccctggtcccgaaggaggaaagggtgctgctggtcctcctgggccacctggtgctgctggtactcctggtctgcaaggaatgcctggagaaagaggaggtcttggaagtcctggtccaaagggtgacaagggtgaaccaggcggtccaggtgctgatggtgtcccagggaaagatggcccaaggggtcctactggtcctattggtcctcctggcccagctggccagcctggagataagggtgaaggtggtgcccccggacttccaggtatagctggacctcgtggtagccctggtgagagaggtgaaactggccctccaggacctgctggtttccctggtgctcctggacagaatggtgaacctggtggtaaaggagaaagaggggctccgggtgagaaaggtgaaggaggccctcctggagttgcaggaccccctggaggttctggacctgctggtcctcctggtccccaaggtgtcaaaggtgaacgtggcagtcctggtggacctggtgctgctggcttccctggtgctcgtggtcttcctggtcctcctggtagtaatggtaacccaggacccccaggtcccagcggttctccaggcaaggatgggcccccaggtcctgcgggtaacactggtgctcctggcagccctggagtgtctggaccaaaaggtgatgctggccaaccaggagagaagggatcgcctggtgcccagggcccaccaggagctccaggcccacttgggattgctgggatcactggagcacggggtcttgcaggaccaccaggcatgccaggtcctaggggaagccctggccctcagggtgtcaagggtgaaagtgggaaaccaggagctaacggtctcagtggagaacgtggtccccctggaccccagggtcttcctggtctggctggtacagctggtgaacctggaagagatggaaaccctggatcagatggtcttccaggccgagatggatctcctggtggcaagggtgatcgtggtgaaaatggctctcctggtgcccctggcgctcctggtcatccaggcccacctggtcctgtcggtccagctggaaagagtggtgacagaggagaaagtggccctgctggccctgctggtgctcccggtcctgctggttcccgaggtgctcctggtcctcaaggcccacgtggtgacaaaggtgaaacaggtgaacgtggagctgctggcatcaaaggacatcgaggattccctggtaatccaggtgccccaggttctccaggccctgctggtcagcagggtgcaatcggcagtccaggacctgcaggccccagaggacctgttggacccagtggacctcctggcaaagatggaaccagtggacatccaggtcccattggaccaccagggcctcgaggtaacagaggtgaaagaggatctgagggctccccaggccacccagggcaaccaggccctcctggacctcctggtgcccctggtccttgctgtggtggtgttggagccgctgccattgctgggattggaggtgaaaaagctggcggttttgccccgtattatggagatgaaccaatggatttcaaaatcaacaccgatgagattatgacttcactcaagtctgttaatggacaaatagaaagcctcattagtcctgatggttctcgtaaaaaccccgctagaaactgcagagacctgaaattctgccatcctgaactcaagagtggagaatactgggttgaccctaaccaaggatgcaaattggatgctatcaaggtattctgtaatatggaaactggggaaacatgcataagtgccaatcctttgaatgttccacggaaacactggtggacagattctagtgctgagaagaaacacgtttggtttggagagtccatggatggtggttttcagtttagctacggcaatcctgaacttcctgaagatgtccttgatgtgcagctggcattccttcgacttctctccagccgagcttcccagaacatcacatatcactgcaaaaatagcattgcatacatggatcaggccagtggaaatgtaaagaaggccctgaagctgatggggtcaaatgaaggtgaattcaaggctgaaggaaatagcaaattcacctacacagttctggaggatggttgcacgaaacacactggggaatggagcaaaacagtctttgaatatcgaacacgcaaggctgtgagactacctattgtttaaaaaggnagaaagaagaaccatgggtngtcatgacgcagagtatggtgtggacggtggccctggattgcgacagaaaacaaatatatggaaatcccacgtggatttaacaagtggctct

SEQ ID NO: 58816 - DNA, 5515 bp, Homo sapiens
accccagaaaactacgatagcccttatgaaacttaagggtcgaaggtggatttagcagtaaactaagagtagagtgcttagttgaacagggccctgaagcgcgtacacaccgcccgtcaccctcctcaagtatacttcaaaggacatttaactaaaacccctacgcatttatatagaggagacaagtcgtaacatggtaagtgtactggaaagtgcacttggacgaactggctgagttttatgacgggcccggtgctgaagggcagggaacaacttgatggtgctactttgaactgcttttcttttctcctttttgcacaaagagtctcatgtctgatatttagacatgatgagctttgtgcaaaaggggagctggctacttctcgctctgcttcatcccactattattttggcacaacaggaagctgttgaaggaggatgttcccatcttggtcagtcctatgcggatagagatgtctggaagccagaaccatgccaaatatgtgtctgtgactcaggatccgttctctgcgatgacataatatgtgacgatcaagaattagactgccccaacccagaaattccatttggagaatgttgtgcagtttgcccacagcctccaactgctcctactcgccctcctaatggtcaaggacctcaaggccccaagggagatccaggccctcctggtattcctgggagaaatggtgaccctggtattccaggacaaccagggtcccctggttctcctggcccccctggaatctgtgaatcatgccctactggtcctcagaactattctccccagtatgattcatatgatgtcaagtctggagtagcagtaggaggactcgcaggctatcctggaccagctggccccccaggccctcccggtccccctggtacatctggtcatcctggttcccctggatctccaggataccaaggaccccctggtgaacctgggcaagctggtccttcaggccctccaggacctcctggtgctataggtccatctggtcctgctggaaaagatggagaatcaggtagacccggacgacctggagagcgaggattgcctggacctccaggtatcaaaggtccagctgggatacctggattccctggtatgaaaggacacagaggcttcgatggacgaaatggagaaaagggtgaaacaggtgctcctggattaaagggtgaaaatggtcttccaggcgaaaatggagctcctggacccatgggtccaagaggggctcctggtgagcgaggacggccaggacttcctggggctgcaggtgctcggggtaatgacggtgctcgaggcagtgatggtcaaccaggccctcctggtcctcctggaactgccggattccctggatcccctggtgctaagggtgaagttggacctgcagggtctcctggttcaaatggtgcccctggacaaagaggagaacctggacctcagggacacgctggtgctcaaggtcctcctggccctcctgggattaatggtagtcctggtggtaaaggcgaaatgggtcccgctggcattcctggagctcctggactgatgggagcccggggtcctccaggaccagccggtgctaatggtgctcctggactgcgaggtggtgcaggtgagcctggtaagaatggtgccaaaggagagcccggaccacgtggtgaacgcggtgaggctggtattccaggtgttccaggagctaaaggcgaagatggcaaggatggatcacctggagaacctggtgcaaatgggcttccaggagctgcaggagaaaggggtgcccctgggttccgaggacctgctggaccaaatggcatcccaggagaaaagggtcctgctggagagcgtggtgctccaggccctgcagggcccagaggagctgctggagaacctggcagagatggcgtccctggaggtccaggaatgaggggcatgcccggaagtccaggaggaccaggaagtgatgggaaaccagggcctcccggaagtcaaggagaaagtggtcgaccaggtcctcctgggccatctggtccccgaggtcagcctggtgtcatgggcttccccggtcctaaaggaaatgatggtgctcctggtaagaatggagaacgaggtggccctggaggacctggccctcagggtcctcctggaaagaatggtgaaactggacctcaaggacccccagggcctactgggcctggtggtgacaaaggagacacaggaccccctggtccacaaggattacaaggcttgcctggtacaggtggtcctccaggagaaaatggaaaacctggggaaccaggtccaaagggtgatgccggtgcacctggagctccaggaggcaagggtgatgctggtgcccctggtgaacgtggacctcctggattggcaggggccccaggacttagaggtggagctggtccccctggtcccgaaggaggaaagggtgctgctggtcctcctgggccacctggtgctgctggtactcctggtctgcaaggaatgcctggagaaagaggaggtcttggaagtcctggtccaaagggtgacaagggtgaaccaggcggtccaggtgctgatggtgtcccagggaaagatggcccaaggggtcctactggtcctattggtcctcctggcccagctggccagcctggagataagggtgaaggtggtgcccccggacttccaggtatagctggacctcgtggtagccctggtgagagaggtgaaactggccctccaggacctgctggtttccctggtgctcctggacagaatggtgaacctggtggtaaaggagaaagaggggctccgggtgagaaaggtgaaggaggccctcctggagttgcaggaccccctggaggttctggacctgctggtcctcctggtccccaaggtgtcaaaggtgaacgtggcagtcctggtggacctggtgctgctggcttccctggtgctcgtggtcttcctggtcctcctggtagtaatggtaacccaggacccccaggtcccagcggttctccaggcaaggatgggcccccaggtcctgcgggtaacactggtgctcctggcagccctggagtgtctggaccaaaaggtgatgctggccaaccaggagagaagggatcgcctggtgcccagggcccaccaggagctccaggcccacttgggattgctgggatcactggagcacggggtcttgcaggaccaccaggcatgccaggtcctaggggaagccctggccctcagggtgtcaagggtgaaagtgggaaaccaggagctaacggtctcagtggagaacgtggtccccctggaccccagggtcttcctggtctggctggtacagctggtgaacctggaagagatggaaaccctggatcagatggtcttccaggccgagatggatctcctggtggcaagggtgatcgtggtgaaaatggctctcctggtgcccctggcgctcctggtcatccaggcccacctggtcctgtcggtccagctggaaagagtggtgacagaggagaaagtggccctgctggccctgctggtgctcccggtcctgctggttcccgaggtgctcctggtcctcaaggcccacgtggtgacaaaggtgaaacaggtgaacgtggagctgctggcatcaaaggacatcgaggattccctggtaatccaggtgccccaggttctccaggccctgctggtcagcagggtgcaatcggcagtccaggacctgcaggccccagaggacctgttggacccagtggacctcctggcaaagatggaaccagtggacatccaggtcccattggaccaccagggcctcgaggtaacagaggtgaaagaggatctgagggctccccaggccacccagggcaaccaggccctcctggacctcctggtgcccctggtccttgctgtggtggtgttggagccgctgccattgctgggattggaggtgaaaaagctggcggttttgccccgtattatggagatgaaccaatggatttcaaaatcaacaccgatgagattatgacttcactcaagtctgttaatggacaaatagaaagcctcattagtcctgatggttctcgtaaaaaccccgctagaaactgcagagacctgaaattctgccatcctgaactcaagagtggagaatactgggttgaccctaaccaaggatgcaaattggatgctatcaaggtattctgtaatatggaaactggggaaacatgcataagtgccaatcctttgaatgttccacggaaacactggtggacagattctagtgctgagaagaaacacgtttggtttggagagtccatggatggtggttttcagtttagctacggcaatcctgaacttcctgaagatgtccttgatgtgcagctggcattccttcgacttctctccagccgagcttcccagaacatcacatatcactgcaaaaatagcattgcatacatggatcaggccagtggaaatgtaaagaaggccctgaagctgatggggtcaaatgaaggtgaattcaaggctgaaggaaatagcaaattcacctacacagttctggaggatggttgcacgggtaggaaacatttttctcaatataggtcataaagcagtcagcattttagtttaatcatgcaaattattttgaatagaataaataaaattaataggatgaaataaagatagcatttggtatgaattacatacattgcatctactgattcattgcagggaatgttaaatgcaacaaaatggatcttagcctccagatgaaaaccagttgaaataaaagcatttaaaatttaaatccataatgcaaactttatcagataattgggatagttactatatgttttgaataatacctgtcacattaactcagtttgaaatatctgttttttaaaattttaaaggttaacttcaaatctctcatttgttattgttatttgtgaacaaagggaaaactcacttctaatattagcgaatttcattgtgagagacctatcctctttttaataaaccatttataaacctgttagcaatggccggaaccaggcctcctgaggatgcactggtctatagcaattgccctgctgcatttactaagaatccttacaaggcatttgtttaagaatattgtttatcaactaagaagattacagctttgaagtagagcaggtctcatatacatgaataataacatggcacgatgaatgcttctttagagtaaaaaggttttctttaacttgttaagtcagagttgtctaagtaattgtaatgtcatgatcatgtacattttgtccttttttacagaaacacactggggaatggagcaaaacagtctttgaatatcgaacacgcaaggctgtgagactacctattgtagatattgcaccctatgacattggtggtcctgatcaagaatttggtgtggacgttggccctgtttgctttttataaaccaaactctatctgaaatcccaacaaaaa

SEQ ID NO: 58817 - DNA, 4654 bp, Homo sapiens
accccagaaaactacgatagcccttatgaaacttaagggtcgaaggtggatttagcagtaaactaagagtagagtgcttagttgaacagggccctgaagcgcgtacacaccgcccgtcaccctcctcaagtatacttcaaaggacatttaactaaaacccctacgcatttatatagaggagacaagtcgtaacatggtaagtgtactggaaagtgcacttggacgaactggctgagttttatgacgggcccggtgctgaagggcagggaacaacttgatggtgctactttgaactgcttttcttttctcctttttgcacaaagagtctcatgtctgatatttagacatgatgagctttgtgcaaaaggggagctggctacttctcgctctgcttcatcccactattattttggcacaacaggaagctgttgaaggaggatgttcccatcttggtcagtcctatgcggatagagatgtctggaagccagaaccatgccaaatatgtgtctgtgactcaggatccgttctctgcgatgacataatatgtgacgatcaagaattagactgccccaacccagaaattccatttggagaatgttgtgcagtttgcccacagcctccaactgctcctactcgccctcctaatggtcaaggacctcaaggccccaagggagatccaggccctcctggtattcctgggagaaatggtgaccctggtattccaggacaaccagggtcccctggttctcctggcccccctggaatctgtgaatcatgccctactggtcctcagaactattctccccagtatgattcatatgatgtcaagtctggagtagcagtaggaggactcgcaggctatcctggaccagctggccccccaggccctcccggtccccctggtacatctggtcatcctggttcccctggatctccaggataccaaggaccccctggtgaacctgggcaagctggtccttcaggccctccaggacctcctggtgctataggtccatctggtcctgctggaaaagatggagaatcaggtagacccggacgacctggagagcgaggattgcctggacctccaggtatcaaaggtccagctgggatacctggattccctggtatgaaaggacacagaggcttcgatggacgaaatggagaaaagggtgaaacaggtgctcctggattaaagggtgaaaatggtcttccaggcgaaaatggagctcctggacccatgggtccaagaggggctcctggtgagcgaggacggccaggacttcctggggctgcaggtgctcggggtaatgacggtgctcgaggcagtgatggtcaaccaggccctcctggtcctcctggaactgccggattccctggatcccctggtgctaagggtgaagttggacctgcagggtctcctggttcaaatggtgcccctggacaaagaggagaacctggacctcagggacacgctggtgctcaaggtcctcctggccctcctgggattaatggtagtcctggtggtaaaggcgaaatgggtcccgctggcattcctggagctcctggactgatgggagcccggggtcctccaggaccagccggtgctaatggtgctcctggactgcgaggtggtgcaggtgagcctggtaagaatggtgccaaaggagagcccggaccacgtggtgaacgcggtgaggctggtattccaggtgttccaggagctaaaggcgaagatggcaaggatggatcacctggagaacctggtgcaaatgggcttccaggagctgcaggagaaaggggtgcccctgggttccgaggacctgctggaccaaatggcatcccaggagaaaagggtcctgctggagagcgtggtgctccaggccctgcagggcccagaggagctgctggagaacctggcagagatggcgtccctggaggtccaggaatgaggggcatgcccggaagtccaggaggaccaggaagtgatgggaaaccagggcctcccggaagtcaaggagaaagtggtcgaccaggtcctcctgggccatctggtccccgaggtcagcctggtgtcatgggcttccccggtcctaaaggaaatgatggtgctcctggtaagaatggagaacgaggtggccctggaggacctggccctcagggtcctcctggaaagaatggtgaaactggacctcaaggacccccagggcctactgggcctggtggtgacaaaggagacacaggaccccctggtccacaaggattacaaggcttgcctggtacaggtggtcctccaggagaaaatggaaaacctggggaaccaggtccaaagggtgatgccggtgcacctggagctccaggaggcaagggtgatgctggtgcccctggtgaacgtggacctcctggattggcaggggccccaggacttagaggtggagctggtccccctggtcccgaaggaggaaagggtgctgctggtcctcctgggccacctggtgctgctggtactcctggtctgcaaggaatgcctggagaaagaggaggtcttggaagtcctggtccaaagggtgacaagggtgaaccaggcggtccaggtgctgatggtgtcccagggaaagatggcccaaggggtcctactggtcctattggtcctcctggcccagctggccagcctggagataagggtgaaggtggtgcccccggacttccaggtatagctggacctcgtggtagccctggtgagagaggtgaaactggccctccaggacctgctggtttccctggtgctcctggacagaatggtgaacctggtggtaaaggagaaagaggggctccgggtgagaaaggtgaaggaggccctcctggagttgcaggaccccctggaggttctggacctgctggtcctcctggtccccaaggtgtcaaaggtgaacgtggcagtcctggtggacctggtgctgctggcttccctggtgctcgtggtcttcctggtcctcctggtagtaatggtaacccaggacccccaggtcccagcggttctccaggcaaggatgggcccccaggtcctgcgggtaacactggtgctcctggcagccctggagtgtctggaccaaaaggtgatgctggccaaccaggagagaagggatcgcctggtgcccagggcccaccaggagctccaggcccacttgggattgctgggatcactggagcacggggtcttgcaggaccaccaggcatgccaggtcctaggggaagccctggccctcagggtgtcaagggtgaaagtgggaaaccaggagctaacggtctcagtggagaacgtggtccccctggaccccagggtcttcctggtctggctggtacagctggtgaacctggaagagatggaaaccctggatcagatggtcttccaggccgagatggatctcctggtggcaagggtgatcgtggtgaaaatggctctcctggtgcccctggcgctcctggtcatccaggcccacctggtcctgtcggtccagctggaaagagtggtgacagaggagaaagtggccctgctggccctgctggtgctcccggtcctgctggttcccgaggtgctcctggtcctcaaggcccacgtggtgacaaaggtgaaacaggtgaacgtggagctgctggcatcaaaggacatcgaggattccctggtaatccaggtgccccaggttctccaggccctgctggtcagcagggtgcaatcggcagtccaggacctgcaggccccagaggacctgttggacccagtggacctcctggcaaagatggaaccagtggacatccaggtcccattggaccaccagggcctcgaggtaacagaggtgaaagaggatctgagggctccccaggccacccagggcaaccaggccctcctggacctcctggtgcccctggtccttgctgtggtggtgttggagccgctgccattgctgggattggaggtgaaaaagctggcggttttgccccgtattatggagatgaaccaatggatttcaaaatcaacaccgatgagattatgacttcactcaagtctgttaatggacaaatagaaagcctcattagtcctgatggttctcgtaaaaaccccgctagaaactgcagagacctgaaattctgccatcctgaactcaagagtggagaatactgggttgaccctaaccaaggatgcaaattggatgctatcaaggtattctgtaatatggaaactggggaaacatgcataagtgccaatcctttgaatgttccacggaaacactggtggacagattctagtgctgagaagaaacacgtttggtttggagagtccatggatggtggttttcagtttagctacggcaatcctgaacttcctgaagatgtccttgatgtgcagctggcattccttcgacttctctccagccgagcttcccagaacatcacatatcactgcaaaaatagcattgcatacatggatcaggccagtggaaatgtaaagaaggccctgaagctgatggggtcaaatgaaggtgaattcaaggctgaaggaaatagcaaattcacctacacagttctggaggatggttgcacgtgatcttctgcacgataggtgatcttctgcacgataggtgatcatctgcacgat

SEQ ID NO: 58818 - DNA, 4465 bp, Homo sapiens
accccagaaaactacgatagcccttatgaaacttaagggtcgaaggtggatttagcagtaaactaagagtagagtgcttagttgaacagggccctgaagcgcgtacacaccgcccgtcaccctcctcaagtatacttcaaaggacatttaactaaaacccctacgcatttatatagaggagacaagtcgtaacatggtaagtgtactggaaagtgcacttggacgaactggctgagttttatgacgggcccggtgctgaagggcagggaacaacttgatggtgctactttgaactgcttttcttttctcctttttgcacaaagagtctcatgtctgatatttagacatgatgagctttgtgcaaaaggggagctggctacttctcgctctgcttcatcccactattattttggcacaacaggaagctgttgaaggaggatgttcccatcttggtcagtcctatgcggatagagatgtctggaagccagaaccatgccaaatatgtgtctgtgactcaggatccgttctctgcgatgacataatatgtgacgatcaagaattagactgccccaacccagaaattccatttggagaatgttgtgcagtttgcccacagcctccaactgctcctactcgccctcctaatggtcaaggacctcaaggccccaagggagatccaggccctcctggtattcctgggagaaatggtgaccctggtattccaggacaaccagggtcccctggttctcctggcccccctggaatctgtgaatcatgccctactggtcctcagaactattctccccagtatgattcatatgatgtcaagtctggagtagcagtaggaggactcgcaggctatcctggaccagctggccccccaggccctcccggtccccctggtacatctggtcatcctggttcccctggatctccaggataccaaggaccccctggtgaacctgggcaagctggtccttcaggccctccaggacctcctggtgctataggtccatctggtcctgctggaaaagatggagaatcaggtagacccggacgacctggagagcgaggattgcctggacctccaggtatcaaaggtccagctgggatacctggattccctggtatgaaaggacacagaggcttcgatggacgaaatggagaaaagggtgaaacaggtgctcctggattaaagggtgaaaatggtcttccaggcgaaaatggagctcctggacccatgggtccaagaggggctcctggtgagcgaggacggccaggacttcctggggctgcaggtgctcggggtaatgacggtgctcgaggcagtgatggtcaaccaggccctcctggtcctcctggaactgccggattccctggatcccctggtgctaagggtgaagttggacctgcagggtctcctggttcaaatggtgcccctggacaaagaggagaacctggacctcagggacacgctggtgctcaaggtcctcctggccctcctgggattaatggtagtcctggtggtaaaggcgaaatgggtcccgctggcattcctggagctcctggactgatgggagcccggggtcctccaggaccagccggtgctaatggtgctcctggactgcgaggtggtgcaggtgagcctggtaagaatggtgccaaaggagagcccggaccacgtggtgaacgcggtgaggctggtattccaggtgttccaggagctaaaggcgaagatggcaaggatggatcacctggagaacctggtgcaaatgggcttccaggagctgcaggagaaaggggtgcccctgggttccgaggacctgctggaccaaatggcatcccaggagaaaagggtcctgctggagagcgtggtgctccaggccctgcagggcccagaggagctgctggagaacctggcagagatggcgtccctggaggtccaggaatgaggggcatgcccggaagtccaggaggaccaggaagtgatgggaaaccagggcctcccggaagtcaaggagaaagtggtcgaccaggtcctcctgggccatctggtccccgaggtcagcctggtgtcatgggcttccccggtcctaaaggaaatgatggtgctcctggtaagaatggagaacgaggtggccctggaggacctggccctcagggtcctcctggaaagaatggtgaaactggacctcaaggacccccagggcctactgggcctggtggtgacaaaggagacacaggaccccctggtccacaaggattacaaggcttgcctggtacaggtggtcctccaggagaaaatggaaaacctggggaaccaggtccaaagggtgatgccggtgcacctggagctccaggaggcaagggtgatgctggtgcccctggtgaacgtggacctcctggattggcaggggccccaggacttagaggtggagctggtccccctggtcccgaaggaggaaagggtgctgctggtcctcctgggccacctggtgctgctggtactcctggtctgcaaggaatgcctggagaaagaggaggtcttggaagtcctggtccaaagggtgacaagggtgaaccaggcggtccaggtgctgatggtgtcccagggaaagatggcccaaggggtcctactggtcctattggtcctcctggcccagctggccagcctggagataagggtgaaggtggtgcccccggacttccaggtatagctggacctcgtggtagccctggtgagagaggtgaaactggccctccaggacctgctggtttccctggtgctcctggacagaatggtgaacctggtggtaaaggagaaagaggggctccgggtgagaaaggtgaaggaggccctcctggagttgcaggaccccctggaggttctggacctgctggtcctcctggtccccaaggtgtcaaaggtgaacgtggcagtcctggtggacctggtgctgctggcttccctggtgctcgtggtcttcctggtcctcctggtagtaatggtaacccaggacccccaggtcccagcggttctccaggcaaggatgggcccccaggtcctgcgggtaacactggtgctcctggcagccctggagtgtctggaccaaaaggtgatgctggccaaccaggagagaagggatcgcctggtgcccagggcccaccaggagctccaggcccacttgggattgctgggatcactggagcacggggtcttgcaggaccaccaggcatgccaggtcctaggggaagccctggccctcagggtgtcaagggtgaaagtgggaaaccaggagctaacggtctcagtggagaacgtggtccccctggaccccagggtcttcctggtctggctggtacagctggtgaacctggaagagatggaaaccctggatcagatggtcttccaggccgagatggatctcctggtggcaagggtgatcgtggtgaaaatggctctcctggtgcccctggcgctcctggtcatccaggcccacctggtcctgtcggtccagctggaaagagtggtgacagaggagaaagtggccctgctggccctgctggtgctcccggtcctgctggttcccgaggtgctcctggtcctcaaggcccacgtggtgacaaaggtgaaacaggtgaacgtggagctgctggcatcaaaggacatcgaggattccctggtaatccaggtgccccaggttctccaggccctgctggtcagcagggtgcaatcggcagtccaggacctgcaggccccagaggacctgttggacccagtggacctcctggcaaagatggaaccagtggacatccaggtcccattggaccaccagggcctcgaggtaacagaggtgaaagaggatctgagggctccccaggccacccagggcaaccaggccctcctggacctcctggtgcccctggtccttgctgtggtggtgttggagccgctgccattgctgggattggaggtgaaaaagctggcggttttgccccgtattatggagatgaaccaatggatttcaaaatcaacaccgatgagattatgacttcactcaagtctgttaatggacaaatagaaagcctcattagtcctgatggttctcgtaaaaaccccgctagaaactgcagagacctgaaattctgccatcctgaactcaagagtggagaatactgggttgaccctaaccaaggatgcaaattggatgctatcaaggtattctgtaatatggaaactggggaaacatgcataagtgccaatcctttgaatgttccacggaaacactggtggacagattctagtgctgagaagaaacacgtttggtttggagagtccatggatggtggttttcagtttagctacggcaatcctgaacttcctgaagatgtccttgatgtgcagctggcattccttcgacttctctccagccgagcttcccgtcagaacggggtaccgacgctc

SEQ ID NO: 58819 - DNA, 4333 bp, Homo sapiens
accccagaaaactacgatagcccttatgaaacttaagggtcgaaggtggatttagcagtaaactaagagtagagtgcttagttgaacagggccctgaagcgcgtacacaccgcccgtcaccctcctcaagtatacttcaaaggacatttaactaaaacccctacgcatttatatagaggagacaagtcgtaacatggtaagtgtactggaaagtgcacttggacgaactggctgagttttatgacgggcccggtgctgaagggcagggaacaacttgatggtgctactttgaactgcttttcttttctcctttttgcacaaagagtctcatgtctgatatttagacatgatgagctttgtgcaaaaggggagctggctacttctcgctctgcttcatcccactattattttggcacaacaggaagctgttgaaggaggatgttcccatcttggtcagtcctatgcggatagagatgtctggaagccagaaccatgccaaatatgtgtctgtgactcaggatccgttctctgcgatgacataatatgtgacgatcaagaattagactgccccaacccagaaattccatttggagaatgttgtgcagtttgcccacagcctccaactgctcctactcgccctcctaatggtcaaggacctcaaggccccaagggagatccaggccctcctggtattcctgggagaaatggtgaccctggtattccaggacaaccagggtcccctggttctcctggcccccctggaatctgtgaatcatgccctactggtcctcagaactattctccccagtatgattcatatgatgtcaagtctggagtagcagtaggaggactcgcaggctatcctggaccagctggccccccaggccctcccggtccccctggtacatctggtcatcctggttcccctggatctccaggataccaaggaccccctggtgaacctgggcaagctggtccttcaggccctccaggacctcctggtgctataggtccatctggtcctgctggaaaagatggagaatcaggtagacccggacgacctggagagcgaggattgcctggacctccaggtatcaaaggtccagctgggatacctggattccctggtatgaaaggacacagaggcttcgatggacgaaatggagaaaagggtgaaacaggtgctcctggattaaagggtgaaaatggtcttccaggcgaaaatggagctcctggacccatgggtccaagaggggctcctggtgagcgaggacggccaggacttcctggggctgcaggtgctcggggtaatgacggtgctcgaggcagtgatggtcaaccaggccctcctggtcctcctggaactgccggattccctggatcccctggtgctaagggtgaagttggacctgcagggtctcctggttcaaatggtgcccctggacaaagaggagaacctggacctcagggacacgctggtgctcaaggtcctcctggccctcctgggattaatggtagtcctggtggtaaaggcgaaatgggtcccgctggcattcctggagctcctggactgatgggagcccggggtcctccaggaccagccggtgctaatggtgctcctggactgcgaggtggtgcaggtgagcctggtaagaatggtgccaaaggagagcccggaccacgtggtgaacgcggtgaggctggtattccaggtgttccaggagctaaaggcgaagatggcaaggatggatcacctggagaacctggtgcaaatgggcttccaggagctgcaggagaaaggggtgcccctgggttccgaggacctgctggaccaaatggcatcccaggagaaaagggtcctgctggagagcgtggtgctccaggccctgcagggcccagaggagctgctggagaacctggcagagatggcgtccctggaggtccaggaatgaggggcatgcccggaagtccaggaggaccaggaagtgatgggaaaccagggcctcccggaagtcaaggagaaagtggtcgaccaggtcctcctgggccatctggtccccgaggtcagcctggtgtcatgggcttccccggtcctaaaggaaatgatggtgctcctggtaagaatggagaacgaggtggccctggaggacctggccctcagggtcctcctggaaagaatggtgaaactggacctcaaggacccccagggcctactgggcctggtggtgacaaaggagacacaggaccccctggtccacaaggattacaaggcttgcctggtacaggtggtcctccaggagaaaatggaaaacctggggaaccaggtccaaagggtgatgccggtgcacctggagctccaggaggcaagggtgatgctggtgcccctggtgaacgtggacctcctggattggcaggggccccaggacttagaggtggagctggtccccctggtcccgaaggaggaaagggtgctgctggtcctcctgggccacctggtgctgctggtactcctggtctgcaaggaatgcctggagaaagaggaggtcttggaagtcctggtccaaagggtgacaagggtgaaccaggcggtccaggtgctgatggtgtcccagggaaagatggcccaaggggtcctactggtcctattggtcctcctggcccagctggccagcctggagataagggtgaaggtggtgcccccggacttccaggtatagctggacctcgtggtagccctggtgagagaggtgaaactggccctccaggacctgctggtttccctggtgctcctggacagaatggtgaacctggtggtaaaggagaaagaggggctccgggtgagaaaggtgaaggaggccctcctggagttgcaggaccccctggaggttctggacctgctggtcctcctggtccccaaggtgtcaaaggtgaacgtggcagtcctggtggacctggtgctgctggcttccctggtgctcgtggtcttcctggtcctcctggtagtaatggtaacccaggacccccaggtcccagcggttctccaggcaaggatgggcccccaggtcctgcgggtaacactggtgctcctggcagccctggagtgtctggaccaaaaggtgatgctggccaaccaggagagaagggatcgcctggtgcccagggcccaccaggagctccaggcccacttgggattgctgggatcactggagcacggggtcttgcaggaccaccaggcatgccaggtcctaggggaagccctggccctcagggtgtcaagggtgaaagtgggaaaccaggagctaacggtctcagtggagaacgtggtccccctggaccccagggtcttcctggtctggctggtacagctggtgaacctggaagagatggaaaccctggatcagatggtcttccaggccgagatggatctcctggtggcaagggtgatcgtggtgaaaatggctctcctggtgcccctggcgctcctggtcatccaggcccacctggtcctgtcggtccagctggaaagagtggtgacagaggagaaagtggccctgctggccctgctggtgctcccggtcctgctggttcccgaggtgctcctggtcctcaaggcccacgtggtgacaaaggtgaaacaggtgaacgtggagctgctggcatcaaaggacatcgaggattccctggtaatccaggtgccccaggttctccaggccctgctggtcagcagggtgcaatcggcagtccaggacctgcaggccccagaggacctgttggacccagtggacctcctggcaaagatggaaccagtggacatccaggtcccattggaccaccagggcctcgaggtaacagaggtgaaagaggatctgagggctccccaggccacccagggcaaccaggccctcctggacctcctggtgcccctggtccttgctgtggtggtgttggagccgctgccattgctgggattggaggtgaaaaagctggcggttttgccccgtattatggagatgaaccaatggatttcaaaatcaacaccgatgagattatgacttcactcaagtctgttaatggacaaatagaaagcctcattagtcctgatggttctcgtaaaaaccccgctagaaactgcagagacctgaaattctgccatcctgaactcaagagtggagaatactgggttgaccctaaccaaggatgcaaattggatgctatcaaggtattctgtaatatggaaactggggaaacatgcataagtgccaatcctttgaatgttccacggaaacctccagctgaaggtgacgagaagaagtcagaatcatacagttactaa

SEQ ID NO: 58820 - DNA, 4173 bp, Homo sapiens
accccagaaaactacgatagcccttatgaaacttaagggtcgaaggtggatttagcagtaaactaagagtagagtgcttagttgaacagggccctgaagcgcgtacacaccgcccgtcaccctcctcaagtatacttcaaaggacatttaactaaaacccctacgcatttatatagaggagacaagtcgtaacatggtaagtgtactggaaagtgcacttggacgaactggctgagttttatgacgggcccggtgctgaagggcagggaacaacttgatggtgctactttgaactgcttttcttttctcctttttgcacaaagagtctcatgtctgatatttagacatgatgagctttgtgcaaaaggggagctggctacttctcgctctgcttcatcccactattattttggcacaacaggaagctgttgaaggaggatgttcccatcttggtcagtcctatgcggatagagatgtctggaagccagaaccatgccaaatatgtgtctgtgactcaggatccgttctctgcgatgacataatatgtgacgatcaagaattagactgccccaacccagaaattccatttggagaatgttgtgcagtttgcccacagcctccaactgctcctactcgccctcctaatggtcaaggacctcaaggccccaagggagatccaggccctcctggtattcctgggagaaatggtgaccctggtattccaggacaaccagggtcccctggttctcctggcccccctggaatctgtgaatcatgccctactggtcctcagaactattctccccagtatgattcatatgatgtcaagtctggagtagcagtaggaggactcgcaggctatcctggaccagctggccccccaggccctcccggtccccctggtacatctggtcatcctggttcccctggatctccaggataccaaggaccccctggtgaacctgggcaagctggtccttcaggccctccaggacctcctggtgctataggtccatctggtcctgctggaaaagatggagaatcaggtagacccggacgacctggagagcgaggattgcctggacctccaggtatcaaaggtccagctgggatacctggattccctggtatgaaaggacacagaggcttcgatggacgaaatggagaaaagggtgaaacaggtgctcctggattaaagggtgaaaatggtcttccaggcgaaaatggagctcctggacccatgggtccaagaggggctcctggtgagcgaggacggccaggacttcctggggctgcaggtgctcggggtaatgacggtgctcgaggcagtgatggtcaaccaggccctcctggtcctcctggaactgccggattccctggatcccctggtgctaagggtgaagttggacctgcagggtctcctggttcaaatggtgcccctggacaaagaggagaacctggacctcagggacacgctggtgctcaaggtcctcctggccctcctgggattaatggtagtcctggtggtaaaggcgaaatgggtcccgctggcattcctggagctcctggactgatgggagcccggggtcctccaggaccagccggtgctaatggtgctcctggactgcgaggtggtgcaggtgagcctggtaagaatggtgccaaaggagagcccggaccacgtggtgaacgcggtgaggctggtattccaggtgttccaggagctaaaggcgaagatggcaaggatggatcacctggagaacctggtgcaaatgggcttccaggagctgcaggagaaaggggtgcccctgggttccgaggacctgctggaccaaatggcatcccaggagaaaagggtcctgctggagagcgtggtgctccaggccctgcagggcccagaggagctgctggagaacctggcagagatggcgtccctggaggtccaggaatgaggggcatgcccggaagtccaggaggaccaggaagtgatgggaaaccagggcctcccggaagtcaaggagaaagtggtcgaccaggtcctcctgggccatctggtccccgaggtcagcctggtgtcatgggcttccccggtcctaaaggaaatgatggtgctcctggtaagaatggagaacgaggtggccctggaggacctggccctcagggtcctcctggaaagaatggtgaaactggacctcaaggacccccagggcctactgggcctggtggtgacaaaggagacacaggaccccctggtccacaaggattacaaggcttgcctggtacaggtggtcctccaggagaaaatggaaaacctggggaaccaggtccaaagggtgatgccggtgcacctggagctccaggaggcaagggtgatgctggtgcccctggtgaacgtggacctcctggattggcaggggccccaggacttagaggtggagctggtccccctggtcccgaaggaggaaagggtgctgctggtcctcctgggccacctggtgctgctggtactcctggtctgcaaggaatgcctggagaaagaggaggtcttggaagtcctggtccaaagggtgacaagggtgaaccaggcggtccaggtgctgatggtgtcccagggaaagatggcccaaggggtcctactggtcctattggtcctcctggcccagctggccagcctggagataagggtgaaggtggtgcccccggacttccaggtatagctggacctcgtggtagccctggtgagagaggtgaaactggccctccaggacctgctggtttccctggtgctcctggacagaatggtgaacctggtggtaaaggagaaagaggggctccgggtgagaaaggtgaaggaggccctcctggagttgcaggaccccctggaggttctggacctgctggtcctcctggtccccaaggtgtcaaaggtgaacgtggcagtcctggtggacctggtgctgctggcttccctggtgctcgtggtcttcctggtcctcctggtagtaatggtaacccaggacccccaggtcccagcggttctccaggcaaggatgggcccccaggtcctgcgggtaacactggtgctcctggcagccctggagtgtctggaccaaaaggtgatgctggccaaccaggagagaagggatcgcctggtgcccagggcccaccaggagctccaggcccacttgggattgctgggatcactggagcacggggtcttgcaggaccaccaggcatgccaggtcctaggggaagccctggccctcagggtgtcaagggtgaaagtgggaaaccaggagctaacggtctcagtggagaacgtggtccccctggaccccagggtcttcctggtctggctggtacagctggtgaacctggaagagatggaaaccctggatcagatggtcttccaggccgagatggatctcctggtggcaagggtgatcgtggtgaaaatggctctcctggtgcccctggcgctcctggtcatccaggcccacctggtcctgtcggtccagctggaaagagtggtgacagaggagaaagtggccctgctggccctgctggtgctcccggtcctgctggttcccgaggtgctcctggtcctcaaggcccacgtggtgacaaaggtgaaacaggtgaacgtggagctgctggcatcaaaggacatcgaggattccctggtaatccaggtgccccaggttctccaggccctgctggtcagcagggtgcaatcggcagtccaggacctgcaggccccagagtaagtagcacagaaagatattacaggtccacatgtttcagatgtctgcatttcagaaagatattctggcattgtgatgtcatgatactttcttagggacctgttggacccagtggacctcctggcaaagatggaaccagtggacatccaggtcccattggaccaccagggcctcgaggtaacagaggtgaaagaggatctgaggtaagacatcacttatacgtatgtgtatttaatttgctacaatcttccaattttcagaaacacagcgcattatgtttaaattgaaatagagagacgcaatgcatccactcaatttagaaactgaacaatgactttaagacattctccatcacattaaaaatgtttctaccacactataacaggagaaaaatacctttttaaaaatt

SEQ ID NO: 58821 - DNA, 3407 bp, Homo sapiens
accccagaaaactacgatagcccttatgaaacttaagggtcgaaggtggatttagcagtaaactaagagtagagtgcttagttgaacagggccctgaagcgcgtacacaccgcccgtcaccctcctcaagtatacttcaaaggacatttaactaaaacccctacgcatttatatagaggagacaagtcgtaacatggtaagtgtactggaaagtgcacttggacgaactggctgagttttatgacgggcccggtgctgaagggcagggaacaacttgatggtgctactttgaactgcttttcttttctcctttttgcacaaagagtctcatgtctgatatttagacatgatgagctttgtgcaaaaggggagctggctacttctcgctctgcttcatcccactattattttggcacaacaggaagctgttgaaggaggatgttcccatcttggtcagtcctatgcggatagagatgtctggaagccagaaccatgccaaatatgtgtctgtgactcaggatccgttctctgcgatgacataatatgtgacgatcaagaattagactgccccaacccagaaattccatttggagaatgttgtgcagtttgcccacagcctccaactgctcctactcgccctcctaatggtcaaggacctcaaggccccaagggagatccaggccctcctggtattcctgggagaaatggtgaccctggtattccaggacaaccagggtcccctggttctcctggcccccctggaatctgtgaatcatgccctactggtcctcagaactattctccccagtatgattcatatgatgtcaagtctggagtagcagtaggaggactcgcaggctatcctggaccagctggccccccaggccctcccggtccccctggtacatctggtcatcctggttcccctggatctccaggataccaaggaccccctggtgaacctgggcaagctggtccttcaggccctccaggacctcctggtgctataggtccatctggtcctgctggaaaagatggagaatcaggtagacccggacgacctggagagcgaggattgcctggacctccaggtatcaaaggtccagctgggatacctggattccctggtatgaaaggacacagaggcttcgatggacgaaatggagaaaagggtgaaacaggtgctcctggattaaagggtgaaaatggtcttccaggcgaaaatggagctcctggacccatgggtccaagaggggctcctggtgagcgaggacggccaggacttcctggggctgcaggtgctcggggtaatgacggtgctcgaggcagtgatggtcaaccaggccctcctggtcctcctggaactgccggattccctggatcccctggtgctaagggtgaagttggacctgcagggtctcctggttcaaatggtgcccctggacaaagaggagaacctggacctcagggacacgctggtgctcaaggtcctcctggccctcctgggattaatggtagtcctggtggtaaaggcgaaatgggtcccgctggcattcctggagctcctggactgatgggagcccggggtcctccaggaccagccggtgctaatggtgctcctggactgcgaggtggtgcaggtgagcctggtaagaatggtgccaaaggagagcccggaccacgtggtgaacgcggtgaggctggtattccaggtgttccaggagctaaaggcgaagatggcaaggatggatcacctggagaacctggtgcaaatgggcttccaggagctgcaggagaaaggggtgcccctgggttccgaggacctgctggaccaaatggcatcccaggagaaaagggtcctgctggagagcgtggtgctccaggccctgcagggcccagaggagctgctggagaacctggcagagatggcgtccctggaggtccaggaatgaggggcatgcccggaagtccaggaggaccaggaagtgatgggaaaccagggcctcccggaagtcaaggagaaagtggtcgaccaggtcctcctgggccatctggtccccgaggtcagcctggtgtcatgggcttccccggtcctaaaggaaatgatggtgctcctggtaagaatggagaacgaggtggccctggaggacctggccctcagggtcctcctggaaagaatggtgaaactggacctcaaggacccccagggcctactgggcctggtggtgacaaaggagacacaggaccccctggtccacaaggattacaaggcttgcctggtacaggtggtcctccaggagaaaatggaaaacctggggaaccaggtccaaagggtgatgccggtgcacctggagctccaggaggcaagggtgatgctggtgcccctggtgaacgtggacctcctggattggcaggggccccaggacttagaggtggagctggtccccctggtcccgaaggaggaaagggtgctgctggtcctcctgggccacctggtgctgctggtactcctggtctgcaaggaatgcctggagaaagaggaggtcttggaagtcctggtccaaagggtgacaagggtgaaccaggcggtccaggtgctgatggtgtcccagggaaagatggcccaaggggtcctactggtcctattggtcctcctggcccagctggccagcctggagataagggtgaaggtggtgcccccggacttccaggtatagctggacctcgtggtagccctggtgagagaggtgaaactggccctccaggacctgctggtttccctggtgctcctggacagaatggtgaacctggtggtaaaggagaaagaggggctccgggtgagaaaggtgaaggaggccctcctggagttgcaggaccccctggaggttctggacctgctggtcctcctggtccccaaggtgtcaaaggtgaacgtggcagtcctggtggacctgtaagtattgatcctcttaactattattgaaaagcattaattgatatcaacctgtataaaagctgcatttgagacactagttccataaagagaatgtaaaaattgtaatcgctcattcatacatgagttatatgtaaattccaaggggaaacacaaaccataaatgactttcaggtacaatgcagatcatgccacacattatactttttgtttgttgtacagttatttgttctacttttgaaattcaaaaatatattaccatttcacagggtgctgctggcttccctggtgctcgtggtcttcctggtcctcctggtagtaatgtaagtaattgttaaagtcttttctcatcatacacttcagaaagagcattcatgtatgtataggatgagaaacttacacattgctacttatttctctagtaagtctcaaataaaattatttgaagtaagta

SEQ ID NO: 58822 - DNA, 3355 bp, Homo sapiens
accccagaaaactacgatagcccttatgaaacttaagggtcgaaggtggatttagcagtaaactaagagtagagtgcttagttgaacagggccctgaagcgcgtacacaccgcccgtcaccctcctcaagtatacttcaaaggacatttaactaaaacccctacgcatttatatagaggagacaagtcgtaacatggtaagtgtactggaaagtgcacttggacgaactggctgagttttatgacgggcccggtgctgaagggcagggaacaacttgatggtgctactttgaactgcttttcttttctcctttttgcacaaagagtctcatgtctgatatttagacatgatgagctttgtgcaaaaggggagctggctacttctcgctctgcttcatcccactattattttggcacaacaggaagctgttgaaggaggatgttcccatcttggtcagtcctatgcggatagagatgtctggaagccagaaccatgccaaatatgtgtctgtgactcaggatccgttctctgcgatgacataatatgtgacgatcaagaattagactgccccaacccagaaattccatttggagaatgttgtgcagtttgcccacagcctccaactgctcctactcgccctcctaatggtcaaggacctcaaggccccaagggagatccaggccctcctggtattcctgggagaaatggtgaccctggtattccaggacaaccagggtcccctggttctcctggcccccctggaatctgtgaatcatgccctactggtcctcagaactattctccccagtatgattcatatgatgtcaagtctggagtagcagtaggaggactcgcaggctatcctggaccagctggccccccaggccctcccggtccccctggtacatctggtcatcctggttcccctggatctccaggataccaaggaccccctggtgaacctgggcaagctggtccttcaggccctccaggacctcctggtgctataggtccatctggtcctgctggaaaagatggagaatcaggtagacccggacgacctggagagcgaggattgcctggacctccaggtatcaaaggtccagctgggatacctggattccctggtatgaaaggacacagaggcttcgatggacgaaatggagaaaagggtgaaacaggtgctcctggattaaagggtgaaaatggtcttccaggcgaaaatggagctcctggacccatgggtccaagaggggctcctggtgagcgaggacggccaggacttcctggggctgcaggtgctcggggtaatgacggtgctcgaggcagtgatggtcaaccaggccctcctggtcctcctggaactgccggattccctggatcccctggtgctaagggtgaagttggacctgcagggtctcctggttcaaatggtgcccctggacaaagaggagaacctggacctcagggacacgctggtgctcaaggtcctcctggccctcctgggattaatggtagtcctggtggtaaaggcgaaatgggtcccgctggcattcctggagctcctggactgatgggagcccggggtcctccaggaccagccggtgctaatggtgctcctggactgcgaggtggtgcaggtgagcctggtaagaatggtgccaaaggagagcccggaccacgtggtgaacgcggtgaggctggtattccaggtgttccaggagctaaaggcgaagatggcaaggatggatcacctggagaacctggtgcaaatgggcttccaggagctgcaggagaaaggggtgcccctgggttccgaggacctgctggaccaaatggcatcccaggagaaaagggtcctgctggagagcgtggtgctccaggccctgcagggcccagaggagctgctggagaacctggcagagatggcgtccctggaggtccaggaatgaggggcatgcccggaagtccaggaggaccaggaagtgatgggaaaccagggcctcccggaagtcaaggagaaagtggtcgaccaggtcctcctgggccatctggtccccgaggtcagcctggtgtcatgggcttccccggtcctaaaggaaatgatggtgctcctggtaagaatggagaacgaggtggccctggaggacctggccctcagggtcctcctggaaagaatggtgaaactggacctcaaggacccccagggcctactgggcctggtggtgacaaaggagacacaggaccccctggtccacaaggattacaaggcttgcctggtacaggtggtcctccaggagaaaatggaaaacctggggaaccaggtccaaagggtgatgccggtgcacctggagctccaggaggcaagggtgatgctggtgcccctggtgaacgtggacctcctggattggcaggggccccaggacttagaggtggagctggtccccctggtcccgaaggaggaaagggtgctgctggtcctcctgggccacctggtgctgctggtactcctggtctgcaaggaatgcctggagaaagaggaggtcttggaagtcctggtccaaagggtgacaagggtgaaccaggcggtccaggtgctgatggtgtcccagggaaagatggcccaaggggtcctactggtcctattggtcctcctggcccagctggccagcctggagataagggtgaaggtggtgcccccggacttccaggtatagctggacctcgtggtagccctggtgagagaggtgaaactggccctccaggacctgctggtttccctggtgctcctggacagaatggtgaacctggtggtaaaggagaaagaggggctccgggtgagaaaggtgaaggaggccctcctggagttgcaggaccccctggaggttctggacctgctggtcctcctggtccccaaggtgtcaaaggagtacattacttttcttgaagacctcaagagttttgtcaagagccagtagagcagacagatgctgaaagccatagtttcatggcaggctttggccagtgaacaaatcctactctgaagctagacatgtgctttgaaatgattatcatcctaatatcatgggggaaaaaataccagatttaaattatatgttttgtgctctcatttattatcatttttttctgtacaaatctattatttctagatttttgtataacatgatagacataaaattggtttatctcctccaaggcagtttgtctttttctattcctcccccttcaacctgtgtcacaaaagaccaagaacagatgtcggaaaagttgttttttcttcagtatagtttcaccttccaatacagaataagttataaataaaaggcttgtatgt

SEQ ID NO: 58823 - DNA, 2787 bp, Homo sapiens
accccagaaaactacgatagcccttatgaaacttaagggtcgaaggtggatttagcagtaaactaagagtagagtgcttagttgaacagggccctgaagcgcgtacacaccgcccgtcaccctcctcaagtatacttcaaaggacatttaactaaaacccctacgcatttatatagaggagacaagtcgtaacatggtaagtgtactggaaagtgcacttggacgaactggctgagttttatgacgggcccggtgctgaagggcagggaacaacttgatggtgctactttgaactgcttttcttttctcctttttgcacaaagagtctcatgtctgatatttagacatgatgagctttgtgcaaaaggggagctggctacttctcgctctgcttcatcccactattattttggcacaacaggaagctgttgaaggaggatgttcccatcttggtcagtcctatgcggatagagatgtctggaagccagaaccatgccaaatatgtgtctgtgactcaggatccgttctctgcgatgacataatatgtgacgatcaagaattagactgccccaacccagaaattccatttggagaatgttgtgcagtttgcccacagcctccaactgctcctactcgccctcctaatggtcaaggacctcaaggccccaagggagatccaggccctcctggtattcctgggagaaatggtgaccctggtattccaggacaaccagggtcccctggttctcctggcccccctggaatctgtgaatcatgccctactggtcctcagaactattctccccagtatgattcatatgatgtcaagtctggagtagcagtaggaggactcgcaggctatcctggaccagctggccccccaggccctcccggtccccctggtacatctggtcatcctggttcccctggatctccaggataccaaggaccccctggtgaacctgggcaagctggtccttcaggccctccaggacctcctggtgctataggtccatctggtcctgctggaaaagatggagaatcaggtagacccggacgacctggagagcgaggattgcctggacctccaggtatcaaaggtccagctgggatacctggattccctggtatgaaaggacacagaggcttcgatggacgaaatggagaaaagggtgaaacaggtgctcctggattaaagggtgaaaatggtcttccaggcgaaaatggagctcctggacccatgggtccaagaggggctcctggtgagcgaggacggccaggacttcctggggctgcaggtgctcggggtaatgacggtgctcgaggcagtgatggtcaaccaggccctcctggtcctcctggaactgccggattccctggatcccctggtgctaagggtgaagttggacctgcagggtctcctggttcaaatggtgcccctggacaaagaggagaacctggacctcagggacacgctggtgctcaaggtcctcctggccctcctgggattaatggtagtcctggtggtaaaggcgaaatgggtcccgctggcattcctggagctcctggactgatgggagcccggggtcctccaggaccagccggtgctaatggtgctcctggactgcgaggtggtgcaggtgagcctggtaagaatggtgccaaaggagagcccggaccacgtggtgaacgcggtgaggctggtattccaggtgttccaggagctaaaggcgaagatggcaaggatggatcacctggagaacctggtgcaaatgggcttccaggagctgcaggagaaaggggtgcccctgggttccgaggacctgctggaccaaatggcatcccaggagaaaagggtcctgctggagagcgtggtgctccaggccctgcagggcccagaggagctgctggagaacctggcagagatggcgtccctggaggtccaggaatgaggggcatgcccggaagtccaggaggaccaggaagtgatgggaaaccagggcctcccggaagtcaaggagaaagtggtcgaccaggtcctcctgggccatctggtccccgaggtcagcctggtgtcatgggcttccccggtcctaaaggaaatgatggtgctcctggtaagaatggagaacgaggtggccctggaggacctggccctcagggtcctcctggaaagaatggtgaaactggacctcaaggacccccagggcctactgggcctggtggtgacaaaggagacacaggaccccctggtccacaaggattacaaggcttgcctggtacaggtggtcctccaggagaaaatggaaaacctggggaaccaggtccaaagggtgatgccggtgcacctggagctccaggaggcaagggtgatgctggtgcccctggtgaacgtggacctcctggattggcaggggccccaggacttagaggtggagctggtccccctggtcccgaaggaggaaagggtgctgctggtcctcctgggccacctggtgctgctggtactcctggtctgcaaggaatgcctggagaaagaggaggtcttggaagtcctggtccaaagggtgacaagggtgaaccaggcggtccaggtgctgatggtgtcccagggaaagatggcccaaggtgaactagggagcagagagaggagtggggaagtgtcagacctctggcctatgggagtcatggagagctgaaaagaatgaaaacatcatacaaacattgttatttcaggaaatgtgactttcctatgaggattttaaaaatcctaaaggcattcaactt

SEQ ID NO: 58824 - DNA, 674 bp, Homo sapiens
cccatataagaatcaggaaacgaagacttagaagtatgtaatgtgccaatgatccctgaatttagtaccctgttagattagggtaagggaagttgaagagtttagaatgactcccagttgtctataatgggtgattggggcagattgggatgttcagttttagaattaagtttaaataccagtccaagtaaagatgttagaatgctatgcaaatctggagttaaggggagagagctaagctagagataaatacttctagttaaagagtggtcattaaaagccaggagaggccgagtgcggtggctcacgcctataatcccagcactttgggaggcctaagtgggcggatcacgaggtcaggagattgagactgtgttggcccacagagtagagaccactcacacaatgggagaaaatatctgcaaactacgcatctgacaaagcactagtatccagaatctacaaggactcaacaaatcagcaataaaaaaccccaaataatcccattaaaaagtgggcaaaggacatgaatagacatttctgaaaaggatatataaaaatggccaacatattaaaaaaatgctcaacatcataatcatcagggaaatgcaacttaaagccacagtgagataccaccttaatcccagctacacaggagacacaagggaacaccg

SEQ ID NO: 58825 - DNA, 412 bp, Homo sapiens
cccatataagaatcaggaaacgaagacttagaagtatgtaatgtgccaatgatccctgaatttagtaccctgttagattagggtaagggaagttgaagagtttagaatgactcccagttgtctataatgggtgattggggcagattgggatgttcagttttagaattaagtttaaataccagtccaagtaaagatgttagaatgctatgcaaatctggagttaaggggagagagctaagctagagataaatacttctagttaaagagtggtcattaaaagccaggagaggccgagtgcggtggctcacgcctataatcccagcactttgggaggcctaagtgggcggatcacgaggtcaggagattgagaccatcctggctaacacggtgaaaccctgtctctactaaaaat

SEQ ID NO: 58826 - DNA, 356 bp, Homo sapiens
gggatagcattaggagatatacctaatgctaaatgacgagttaatcggtgcagcacaccagcatggcacatgtatacatatgtaactaacctgcacattgtgcacatgtaccctaaaacttaaagtataataataataaaaaaaataaaataagagctagtttgaattagaaagcaacagacaccaggaaaaatcttgtcaggaaaaagaatagatatttgatgagtagcagcattgagttcaccagcagcaggcacctgaaaagacattgcggcgggggttttggccaaaacatgtctgtctgccctctaagcagggtggccttcttacctcatgtatttctgatttgattttct

SEQ ID NO: 58827 - DNA, 611 bp, Homo sapiens
tggaatgtagctaaagcagtgcttggagggcaaattatagtttaaatgcttttattataaaggaagaaaagtctaaatgtcagtaaccaaagtttctaccttaggaagctagaacaagaacagcaaagtaaacctggagtaagtacaagtaaggaaacaatagagtaggaatcaatgatgtggaaaacagataatagagaaactttaaaaagccaaaatctggttctttggtaagatcaacaacagtaataaacccttatcttcagtgaacaagaaattgacaatgcgacatgttgtaatagtaaaggaataaagtacatagtgtggaacacagaggctgatctgaatttggttttcaaaggtggtttcagagaggtggtaaaatttgtgtttggctttcaagaattagtgtaagtttttcctgatacagattgggaaaaagaatattctgagaggaaataagagcaaaataattttatttttcaggcttttggcatatttagaaccgtatttttatttttttgagacagaggctgcagtgagccaagattgcgattgcgccactttactccagccttggcaaaagagtgaaaatccgtctcaaaaaaaaa

SEQ ID NO: 58828 - DNA, 574 bp, Homo sapiens
tggaatgtagctaaagcagtgcttggagggcaaattatagtttaaatgcttttattataaaggaagaaaagtctaaatgtcagtaaccaaagtttctaccttaggaagctagaacaagaacagcaaagtaaacctggagtaagtacaagtaaggaaacaatagagtaggaatcaatgatgtggaaaacagataatagagaaactttaaaaagccaaaatctggttctttggtaagatcaacaacagtaataaacccttatcttcagtgaacaagaaattgacaatgcgacatgttgtaatagtaaaggaataaagtacatagtgtggaacacagaggctgatctgaatttggttttcaaaggtggtttcagagaggtggtaaaatttgtgtttggctttcaagaattagtgtaagtttttcctgatacagattgggaaaaagaatattctgagaggaaataagagcaaaataattttatttttcaggcttttggcatatttagaaccgtatttttatttttttgagacagagtcttgctggagtccatcggtgcaatctcggctcactgtaacc

SEQ ID NO: 58829 - DNA, 215 bp, Homo sapiens
tcagaaacacaagagccgaaaacgccggtaagttgccaaagctggtggaggggaggggaagagtgggcagaaataccaggggtgcaaactccagtggccccggggcaagcaggtaacaaccagctgggtgcaccagcacacatgagctactggccctggttttagagggagaggtggacaatggccaggtggagagagccctctcacagcatcca

SEQ ID NO: 58830 - DNA, 596 bp, Homo sapiens
  misc_feature (47)..(47): n is a, c, g, or t
gacagcgcagggggaacccagggagcgcgatgggctgcagggctgcntcagggctcctgccaggagtggccgtggtcctcctgctgctgctgcagagcacacagtcagtctacatccagtaccaaggcttccgggtccagctggaatccatgaagaagctgagtgacctggaggcacagtgggcacccagcccccgcctgcaggcccagagcctcctgcccgccgtgtgccaccaccctgctctgcctcaggaccttcagcctgtctgcgcctcgcaggaggcttccagcatcttcaagaccctgaggaccatcgctaacgacgactgtgagctgtgtgtgaacgttgcgtgtaccggctgcctctgagatagccctgggtaccctgagcccaccagggacacctcgcccttcagcccaccaccctggcaggcttccatccccgtccatgctcaagatgggtccctggccaccatggtcatcaccacccttccagggcctgagcagctggatctggtacaaagcaatcggacatagagttggagggggaggcccctgaggcagcccagctcctgaataaagattctacaacacacg

SEQ ID NO: 58831 - DNA, 5035 bp, Homo sapiens
cgcccagcgcagccggagtatccacctcgatgaccacgggctgagccccgcgccgccaccatgtccgtggccttcgcgtctgcccggccaagaggcaaaggggaggttacgcagcaaaccatccagaagatgctggacgagaaccaccacctgatccagtgcatcctggagtaccagagcaagggcaagacggccgagtgcacgcagtaccagcagatcctgcaccggaacctggtatacctggccacgatcgcagactccaaccagaacatgcagtccctgcttcctgccccgcccacgcagaacatgaacctgggccctggagccctgactcagagcggctccagccagggcctgcactctcagggcagcctgagtgacgccatcagcacgggcctgccaccctcctccctcctgcagggccagattggcaacgggccgagccacgtgtccatgcagcagacggcgcctaacacgctgcccaccacctccatgagcatctctgggcccggctacagccacgcgggacccgcctcgcagggcgtccccatgcaggggcaaggcaccatcggcaactacgtgtctcggaccaacatcaacatgcagtccaacccagtctccatgatgcagcagcaggcggccacgtcgcactacagctcggcgcagggcggcagccagcactaccagggccagtcgtccatcgccatgatggggcagggcagccaggggagcagcatgatggggcagcggcccatggcgccctaccggccctcccagcaaggctcttcccagcagtacctgggccaggaggagtactatggcgagcagtacagccacagccagggcgccgcggagcccatgggccagcagtactaccccgacggccatggcgattacgcctaccagcagtcatcctacacggagcagagctacgaccggtccttcgaggagtccacgcagcactactatgaggggggaaactcccagtacagccagcagcaggccgggtaccagcagggtgccgcgcagcagcagacgtactcccagcagcagtaccccagccagcagagctaccccgggcagcagcagggctacgggtctgcccagggagccccgtcacagtaccccggctaccagcaaggccaaggccagcagtacggaagctaccgagcaccgcagacagcgccgtctgcccagcagcagcggccctacggctatgaacagggccagtatggaaattaccagcagtaagggacacacattctggctggagcccttgtggtagcgtgttcatccaggggccggatgggctggcggcagctctggtgaattgtgacatgttggttacctgttcgcccagtgccacgtctgcatgtgaagcgtgctcatttcatgctgggtatgacgccgagcgcacaccactggcgtgagacagcgcttggtggtgtgatacttttggtgctgtgtatagtattgtatgtcggtacacggagaggtatcctttttttgtcccccgcccccttctcaatgtttctagctagctttgggggtcattttgtcatcagagcattctgtgcccagggacaggacagatctcgaggacaccacagtccacctgttcccgtcaacagacgttaggtctcattttcctcctcatgcagtgttgtagtgtgggttgtcaacttttctttaactggctacgccacagctggacacacatgcagcccctggagggcagcctcttcctgtgcctcgatggggtgggtgggagggcatcttctgtgcgttgggtcagtttctgttacgtaacgaaaaggataaacatctcccacgggagaggccacagatggccacttccagagcttgcccattgcctgtctctcgccaattccgtttatccaaaaaggtacatgtttttgtattaaaaagtaaacagggatcagtgactgtattccaaataaatatgaatccctaagggccgtggacaaattgcctaacccagggccagcggtattgctgaaggaaaggggcagctctctgggaagtgggccctcagagattactctggctttgacccttgtttagctgatggtcatttctgggattggaatatttaataagcccaattctaagttgataggtaattttaaatattcaaaccaaatcttcccaacagttggcaagttgtttattttatattatttcttccaggacctacttgctcagatctccaagcaagcatttcttttcttttagggatgtctgaaagtcacatccagttacattactgtgttctttctaatgaaaagtaaaggttttatatagagaaacttgagtaatttttacatttctaagacattaaatcccatttaaattctgtgtgaacattaaagacagcacacttgcaaaagtatggtcaaaggaaaaaaatcccacatttcaattaacaagtagcatggacatttgatcaacctttagttggaataataatattcatatttgctatgaatccttttaaaaaaatctttggataaatgctgacagatttccaagaactaccaagaaaatacaagagatatccaatgcttgatatatgaggcctagtaataacgatatttctctttaattgatgttttgttttaaaagttaaaagtaattcttggcgtggtggttcacgcctgtaatcccagcactttgggaggccgaagcgggcggatcacctgaggtcgggagttcgagaccagcctgaccaacatggagaaaccccgtccctactaaaaatacaaaattagccaggtatggtggtgcatacctgtaatcccagctactcgggaacctgaggcaggagaatggcttgaacccaggagacagaggttgtggtggggcaagatcgcaccattgcacccgagcctaggcaacaagagtgaaattccgtctcaaaaaaataaataaataaataaataaataagttaaaattaattctttatccagagtcgggtgctttagaatttataagtcacttatgtgttttgcttgaattaattctgacagcccctatgaggaaatctggaggcaggtaacagttcccattttagagatgaagaactgaggcacagattaaaggacttgcctgtgttgaataccagtcctgttctaggacattctcccctctcctaggagacggatgtcacgcacaaatggggagagaagtgtttattttgtaggcactaagggtttctaaaacccttaacactggtaagggctcaaaaataaacgtatgtgttcatattcgatcaccgaaatgagagttcttaattgctaattgacaaacgcgttagcaatttcagttagggagtcatctcccttgattgtgttcttttcctgtcaattttcatagacctaatttgcaaactcaatcggggactaaaatttcccactgaaaatgttaaacattttagataactgtgaagatagtttatttttattccttgccaatctgggaatatgccttttttgtgtgtttgtgtgtttttttaagtgctgtattaataatactttctgaaagaaaaggacacttaccccaaaacttcaatctgaaatgtcttacattaagaatatcttgaatgttgtgtatatattttaaaaagcactttgcaaaatagtttgtacatttatttcctaatttatacatgatttttggtgttaatatatttaatgattaataacagaatgtttatttaatgtgctgtccatttttatgtaatattatggggaaagtgatgccagcagttccttttcattattctatcttctgtcatatgaatgttgagcaaagcttaggccaacatgaattgtttgtgaagtgtggttgatggtgctttgtttttttctgactacttctatggaaggccagtgaagaagcaaaggaagacatgaaaattgacgctcattcttcttcctattgttccctgacatccagcaaattgtgaatttgaaaaatgatggccagttttcagaagtgctgacaaattcatattggtatgcaaaagctcatcacccattaaggtttgttgttgaatcaacagtactcagcatattaaaacagtacatcagaactcatgccaacagtctttatgatgggattaaggtggacaagatctcctaagatctgtgaatgggattaaggtggacaagatctcctaagatctgaaaagaaaccttaatacgctcatatggttggagtgttaagtgaacctctgattttgtcagggtttttctacgtgtaggcgtgaatagggggcaccccttcaaaactgtacaaagaagacgactgttttccatttccatttaaacatttttagccacttcatttctatttattgaacaggtcaaatttgtcttgttatttgtgagtacagtacatttaaaaaacatccttatcggttatttttttttcagtcggagtttgacgtataaattgtttatgcttttggtgtaatctcttaataaactggttcttcaaaaaaaaaaaaaaaaaaaaaaaaaaaaaaaaaaaaaaaaaaaaaaaaaaaaaaaaaaaaaaaaaaaaaaaaaaaaaaaaaaaaaaaaaaatcaatagtatgattatacatatcacaacactgaaccgaacaatcacaatatatccaaaatatacactaacatctgcctacgcatttccctcacctccccaccaccaacttcctaactcgacacgcaacctctccatactccatagacccaacatacataaaagcacacagcaacacacaccacatctcacaccttctacatacaaagacagctccaactacagacccaaaccacaatgacacacctcttcactatcactctcctctctcacaatctctcgtcatacacaatccatcgctcattacatcatactccccatctgtctcaactccgctacccacacacatttctccctctcgtacactcaccatatgatccaccacacaccaccgtgatcatcctccctcctaactgtaacacacaa

SEQ ID NO: 58832 - DNA, 4800 bp, Homo sapiens
cccacctcggcctcccaaagtgctgggattacaggcatgagccactgctcccggccacttatttattagtcacttaatcattaatagtgctgttgatagcaactcttcccaaagtcacttgaagggttggggtgtcttcaccttcagaagtggtgacctggctccccagtgcctgacaccactccctgctccccatgccagggccgagccacgtgtccatgcagcagacggcgcctaacacgctgcccaccacctccatgagcatctctgggcccggctacagccacgcgggacccgcctcgcagggcgtccccatgcaggggcaaggcaccatcggcaactacgtgtctcggaccaacatcaacatgcagtccaacccagtctccatgatgcagcagcaggcggccacgtcgcactacagctcggcgcagggcggcagccagcactaccagggccagtcgtccatcgccatgatggggcagggcagccaggggagcagcatgatggggcagcggcccatggcgccctaccggccctcccagcaaggctcttcccagcagtacctgggccaggaggagtactatggcgagcagtacagccacagccagggcgccgcggagcccatgggccagcagtactaccccgacggccatggcgattacgcctaccagcagtcatcctacacggagcagagctacgaccggtccttcgaggagtccacgcagcactactatgaggggggaaactcccagtacagccagcagcaggccgggtaccagcagggtgccgcgcagcagcagacgtactcccagcagcagtaccccagccagcagagctaccccgggcagcagcagggctacgggtctgcccagggagccccgtcacagtaccccggctaccagcaaggccaaggccagcagtacggaagctaccgagcaccgcagacagcgccgtctgcccagcagcagcggccctacggctatgaacagggccagtatggaaattaccagcagtaagggacacacattctggctggagcccttgtggtagcgtgttcatccaggggccggatgggctggcggcagctctggtgaattgtgacatgttggttacctgttcgcccagtgccacgtctgcatgtgaagcgtgctcatttcatgctgggtatgacgccgagcgcacaccactggcgtgagacagcgcttggtggtgtgatacttttggtgctgtgtatagtattgtatgtcggtacacggagaggtatcctttttttgtcccccgcccccttctcaatgtttctagctagctttgggggtcattttgtcatcagagcattctgtgcccagggacaggacagatctcgaggacaccacagtccacctgttcccgtcaacagacgttaggtctcattttcctcctcatgcagtgttgtagtgtgggttgtcaacttttctttaactggctacgccacagctggacacacatgcagcccctggagggcagcctcttcctgtgcctcgatggggtgggtgggagggcatcttctgtgcgttgggtcagtttctgttacgtaacgaaaaggataaacatctcccacgggagaggccacagatggccacttccagagcttgcccattgcctgtctctcgccaattccgtttatccaaaaaggtacatgtttttgtattaaaaagtaaacagggatcagtgactgtattccaaataaatatgaatccctaagggccgtggacaaattgcctaacccagggccagcggtattgctgaaggaaaggggcagctctctgggaagtgggccctcagagattactctggctttgacccttgtttagctgatggtcatttctgggattggaatatttaataagcccaattctaagttgataggtaattttaaatattcaaaccaaatcttcccaacagttggcaagttgtttattttatattatttcttccaggacctacttgctcagatctccaagcaagcatttcttttcttttagggatgtctgaaagtcacatccagttacattactgtgttctttctaatgaaaagtaaaggttttatatagagaaacttgagtaatttttacatttctaagacattaaatcccatttaaattctgtgtgaacattaaagacagcacacttgcaaaagtatggtcaaaggaaaaaaatcccacatttcaattaacaagtagcatggacatttgatcaacctttagttggaataataatattcatatttgctatgaatccttttaaaaaaatctttggataaatgctgacagatttccaagaactaccaagaaaatacaagagatatccaatgcttgatatatgaggcctagtaataacgatatttctctttaattgatgttttgttttaaaagttaaaagtaattcttggcgtggtggttcacgcctgtaatcccagcactttgggaggccgaagcgggcggatcacctgaggtcgggagttcgagaccagcctgaccaacatggagaaaccccgtccctactaaaaatacaaaattagccaggtatggtggtgcatacctgtaatcccagctactcgggaacctgaggcaggagaatggcttgaacccaggagacagaggttgtggtggggcaagatcgcaccattgcacccgagcctaggcaacaagagtgaaattccgtctcaaaaaaataaataaataaataaataaataagttaaaattaattctttatccagagtcgggtgctttagaatttataagtcacttatgtgttttgcttgaattaattctgacagcccctatgaggaaatctggaggcaggtaacagttcccattttagagatgaagaactgaggcacagattaaaggacttgcctgtgttgaataccagtcctgttctaggacattctcccctctcctaggagacggatgtcacgcacaaatggggagagaagtgtttattttgtaggcactaagggtttctaaaacccttaacactggtaagggctcaaaaataaacgtatgtgttcatattcgatcaccgaaatgagagttcttaattgctaattgacaaacgcgttagcaatttcagttagggagtcatctcccttgattgtgttcttttcctgtcaattttcatagacctaatttgcaaactcaatcggggactaaaatttcccactgaaaatgttaaacattttagataactgtgaagatagtttatttttattccttgccaatctgggaatatgccttttttgtgtgtttgtgtgtttttttaagtgctgtattaataatactttctgaaagaaaaggacacttaccccaaaacttcaatctgaaatgtcttacattaagaatatcttgaatgttgtgtatatattttaaaaagcactttgcaaaatagtttgtacatttatttcctaatttatacatgatttttggtgttaatatatttaatgattaataacagaatgtttatttaatgtgctgtccatttttatgtaatattatggggaaagtgatgccagcagttccttttcattattctatcttctgtcatatgaatgttgagcaaagcttaggccaacatgaattgtttgtgaagtgtggttgatggtgctttgtttttttctgactacttctatggaaggccagtgaagaagcaaaggaagacatgaaaattgacgctcattcttcttcctattgttccctgacatccagcaaattgtgaatttgaaaaatgatggccagttttcagaagtgctgacaaattcatattggtatgcaaaagctcatcacccattaaggtttgttgttgaatcaacagtactcagcatattaaaacagtacatcagaactcatgccaacagtctttatgatgggattaaggtggacaagatctcctaagatctgtgaatgggattaaggtggacaagatctcctaagatctgaaaagaaaccttaatacgctcatatggttggagtgttaagtgaacctctgattttgtcagggtttttctacgtgtaggcgtgaatagggggcaccccttcaaaactgtacaaagaagacgactgttttccatttccatttaaacatttttagccacttcatttctatttattgaacaggtcaaatttgtcttgttatttgtgagtacagtacatttaaaaaacatccttatcggttatttttttttcagtcggagtttgacgtataaattgtttatgcttttggtgtaatctcttaataaactggttcttcaaaaaaaaaaaaaaaaaaaaaaaaaaaaaaaaaaaaaaaaaaaaaaaaaaaaaaaaaaaaaaaaaaaaaaaaaaaaaaaaaaaaaaaaaaatcaatagtatgattatacatatcacaacactgaaccgaacaatcacaatatatccaaaatatacactaacatctgcctacgcatttccctcacctccccaccaccaacttcctaactcgacacgcaacctctccatactccatagacccaacatacataaaagcacacagcaacacacaccacatctcacaccttctacatacaaagacagctccaactacagacccaaaccacaatgacacacctcttcactatcactctcctctctcacaatctctcgtcatacacaatccatcgctcattacatcatactccccatctgtctcaactccgctacccacacacatttctccctctcgtacactcaccatatgatccaccacacaccaccgtgatcatcctccctcctaactgtaacacacaa

SEQ ID NO: 58833 - DNA, 5414 bp, Homo sapiens
cgcccagcgcagccggagtatccacctcgatgaccacgggctgagccccgcgccgccaccatgtccgtggccttcgcgtctgcccggccaagaggcaaaggggaggttacgcagcaaaccatccagaagtttttgaagaatgccggccagtcatcgagtgcccttggtttgggtacaaggtgcgttttcctaacttgcgggtctgaaagtgcgtccattcccccttcacgcctggttgcggtttcggcggactagaatttctacgcagaagtctccctcaggatcagaccgtagcccttccggaaacctccatgatgctggacgagaaccaccacctgatccagtgcatcctggagtaccagagcaagggcaagacggccgagtgcacgcagtgagtgcccgccatacaccggaacacttggagggtgtcatgcagagtctaagcacagaggccagatacgtcccaagagtcccccagcacagagatcagataagtcccaggagtccccagcacggaggccagatatgtcccaggagtcccctgcacagaggccagatatgtcccaggagtcccccagcacggaggtaccagcagatcctgcaccggaacctggtatacctggccacgatcgcagactccaaccagaacatgcagtccctgcttcctgccccgcccacgcagaacatgaacctgggccctggagccctgactcagagcggctccagccagggcctgcactctcagggcagcctgagtgacgccatcagcacgggcctgccaccctcctccctcctgcagggccagattggcaacgggccgagccacgtgtccatgcagcagacggcgcctaacacgctgcccaccacctccatgagcatctctgggcccggctacagccacgcgggacccgcctcgcagggcgtccccatgcaggggcaaggcaccatcggcaactacgtgtctcggaccaacatcaacatgcagtccaacccagtctccatgatgcagcagcaggcggccacgtcgcactacagctcggcgcagggcggcagccagcactaccagggccagtcgtccatcgccatgatggggcagggcagccaggggagcagcatgatggggcagcggcccatggcgccctaccggccctcccagcaaggctcttcccagcagtacctgggccaggaggagtactatggcgagcagtacagccacagccagggcgccgcggagcccatgggccagcagtactaccccgacggccatggcgattacgcctaccagcagtcatcctacacggagcagagctacgaccggtccttcgaggagtccacgcagcactactatgaggggggaaactcccagtacagccagcagcaggccgggtaccagcagggtgccgcgcagcagcagacgtactcccagcagcagtaccccagccagcagagctaccccgggcagcagcagggctacgggtctgcccagggagccccgtcacagtaccccggctaccagcaaggccaaggccagcagtacggaagctaccgagcaccgcagacagcgccgtctgcccagcagcagcggccctacggctatgaacagggccagtatggaaattaccagcagtaagggacacacattctggctggagcccttgtggtagcgtgttcatccaggggccggatgggctggcggcagctctggtgaattgtgacatgttggttacctgttcgcccagtgccacgtctgcatgtgaagcgtgctcatttcatgctgggtatgacgccgagcgcacaccactggcgtgagacagcgcttggtggtgtgatacttttggtgctgtgtatagtattgtatgtcggtacacggagaggtatcctttttttgtcccccgcccccttctcaatgtttctagctagctttgggggtcattttgtcatcagagcattctgtgcccagggacaggacagatctcgaggacaccacagtccacctgttcccgtcaacagacgttaggtctcattttcctcctcatgcagtgttgtagtgtgggttgtcaacttttctttaactggctacgccacagctggacacacatgcagcccctggagggcagcctcttcctgtgcctcgatggggtgggtgggagggcatcttctgtgcgttgggtcagtttctgttacgtaacgaaaaggataaacatctcccacgggagaggccacagatggccacttccagagcttgcccattgcctgtctctcgccaattccgtttatccaaaaaggtacatgtttttgtattaaaaagtaaacagggatcagtgactgtattccaaataaatatgaatccctaagggccgtggacaaattgcctaacccagggccagcggtattgctgaaggaaaggggcagctctctgggaagtgggccctcagagattactctggctttgacccttgtttagctgatggtcatttctgggattggaatatttaataagcccaattctaagttgataggtaattttaaatattcaaaccaaatcttcccaacagttggcaagttgtttattttatattatttcttccaggacctacttgctcagatctccaagcaagcatttcttttcttttagggatgtctgaaagtcacatccagttacattactgtgttctttctaatgaaaagtaaaggttttatatagagaaacttgagtaatttttacatttctaagacattaaatcccatttaaattctgtgtgaacattaaagacagcacacttgcaaaagtatggtcaaaggaaaaaaatcccacatttcaattaacaagtagcatggacatttgatcaacctttagttggaataataatattcatatttgctatgaatccttttaaaaaaatctttggataaatgctgacagatttccaagaactaccaagaaaatacaagagatatccaatgcttgatatatgaggcctagtaataacgatatttctctttaattgatgttttgttttaaaagttaaaagtaattcttggcgtggtggttcacgcctgtaatcccagcactttgggaggccgaagcgggcggatcacctgaggtcgggagttcgagaccagcctgaccaacatggagaaaccccgtccctactaaaaatacaaaattagccaggtatggtggtgcatacctgtaatcccagctactcgggaacctgaggcaggagaatggcttgaacccaggagacagaggttgtggtggggcaagatcgcaccattgcacccgagcctaggcaacaagagtgaaattccgtctcaaaaaaataaataaataaataaataaataagttaaaattaattctttatccagagtcgggtgctttagaatttataagtcacttatgtgttttgcttgaattaattctgacagcccctatgaggaaatctggaggcaggtaacagttcccattttagagatgaagaactgaggcacagattaaaggacttgcctgtgttgaataccagtcctgttctaggacattctcccctctcctaggagacggatgtcacgcacaaatggggagagaagtgtttattttgtaggcactaagggtttctaaaacccttaacactggtaagggctcaaaaataaacgtatgtgttcatattcgatcaccgaaatgagagttcttaattgctaattgacaaacgcgttagcaatttcagttagggagtcatctcccttgattgtgttcttttcctgtcaattttcatagacctaatttgcaaactcaatcggggactaaaatttcccactgaaaatgttaaacattttagataactgtgaagatagtttatttttattccttgccaatctgggaatatgccttttttgtgtgtttgtgtgtttttttaagtgctgtattaataatactttctgaaagaaaaggacacttaccccaaaacttcaatctgaaatgtcttacattaagaatatcttgaatgttgtgtatatattttaaaaagcactttgcaaaatagtttgtacatttatttcctaatttatacatgatttttggtgttaatatatttaatgattaataacagaatgtttatttaatgtgctgtccatttttatgtaatattatggggaaagtgatgccagcagttccttttcattattctatcttctgtcatatgaatgttgagcaaagcttaggccaacatgaattgtttgtgaagtgtggttgatggtgctttgtttttttctgactacttctatggaaggccagtgaagaagcaaaggaagacatgaaaattgacgctcattcttcttcctattgttccctgacatccagcaaattgtgaatttgaaaaatgatggccagttttcagaagtgctgacaaattcatattggtatgcaaaagctcatcacccattaaggtttgttgttgaatcaacagtactcagcatattaaaacagtacatcagaactcatgccaacagtctttatgatgggattaaggtggacaagatctcctaagatctgtgaatgggattaaggtggacaagatctcctaagatctgaaaagaaaccttaatacgctcatatggttggagtgttaagtgaacctctgattttgtcagggtttttctacgtgtaggcgtgaatagggggcaccccttcaaaactgtacaaagaagacgactgttttccatttccatttaaacatttttagccacttcatttctatttattgaacaggtcaaatttgtcttgttatttgtgagtacagtacatttaaaaaacatccttatcggttatttttttttcagtcggagtttgacgtataaattgtttatgcttttggtgtaatctcttaataaactggttcttcaaaaaaaaaaaaaaaaaaaaaaaaaaaaaaaaaaaaaaaaaaaaaaaaaaaaaaaaaaaaaaaaaaaaaaaaaaaaaaaaaaaaaaaaaaatcaatagtatgattatacatatcacaacactgaaccgaacaatcacaatatatccaaaatatacactaacatctgcctacgcatttccctcacctccccaccaccaacttcctaactcgacacgcaacctctccatactccatagacccaacatacataaaagcacacagcaacacacaccacatctcacaccttctacatacaaagacagctccaactacagacccaaaccacaatgacacacctcttcactatcactctcctctctcacaatctctcgtcatacacaatccatcgctcattacatcatactccccatctgtctcaactccgctacccacacacatttctccctctcgtacactcaccatatgatccaccacacaccaccgtgatcatcctccctcctaactgtaacacacaa

SEQ ID NO: 58834 - DNA, 4746 bp, Homo sapiens
cccacctcggcctcccaaagtgctgggattacaggcatgagccactgctcccggccacttatttattagtcacttaatcattaatagtgctgttgatagcaactcttcccaaagtcacttgaagggttggggtgtcttcaccttcagaagtggtgacctggctccccagtgcctgacaccactccctgctccccatgccagggccgagccacgtgtccatgcagcagacggcgcctaacacgctgcccaccacctccatgagcatctctgggcccggctacagccacgcgggacccgcctcgcagggcgtccccatgcaggggcaaggcaccatcggcaactacgtgtctcggaccaacatcaacatgcagtccaacccagtctccatgatgcagcagcaggcggccacgtcgcactacagctcggcgcagggcggcagccagcactaccagggccagtcgtccatcgccatgatggggcagggcagccaggggagcagcatgatggggcagcggcccatggcgccctaccggccctcccagcaaggctcttcccagcagtacctgggccaggaggagtactatggcgagcagtacagccacagccagggcgccgcggagcccatgggccagcagtactaccccgacggccatggcgattacgcctaccagcagtcatcctacacggagcagagctacgaccggtccttcgaggagtccacgcagcactactatgaggggggaaactcccagtacagccagcagcaggccgggtaccagcagggtgccgcgcagcagcagacgtactcccagcagcagtaccccagccagcagagctaccccgggcagcagcagggctacgggtctgcccagggagccccgtcacagtaccccggctaccagcaaggccaaggccagcagtacggaagctaccgagcaccgcagacagcgccgtctgcccagcagcagcggccctacggctatgaacagggccagtatggaaattaccagcagtaagggacacacattctggctggagcccttgtggtagcgtgttcatccaggggccggatgggctggcggcagctctggtgaattgtgacatgttggttacctgttcgcccagtgccacgtctgcatgtgaagcgtgctcatttcatgctgggtatgacgccgagcgcacaccactggcgtgagacagcgcttggtggtgtgatacttttggtgctgtgtatagtattgtatgtcggtacacggagaggtatcctttttttgtcccccgcccccttctcaatgtttctagctagctttgggggtcattttgtcatcagagcattctgtgcccagggacaggacagatctcgaggacaccacagtccacctgttcccgtcaacagacgttaggtctcattttcctcctcatgcagtgttgtagtgtgggttgtcaacttttctttaactggctacgccacagctggacacacatgcagcccctggagggcagcctcttcctgtgcctcgatggggtgggtgggagggcatcttctgtgcgttgggtcagtttctgttacgtaacgaaaaggataaacatctcccacgggagaggccacagatggccacttccagagcttgcccattgcctgtctctcgccaattccgtttatccaaaaaggtacatgtttttgtattaccgtggacaaattgcctaacccagggccagcggtattgctgaaggaaaggggcagctctctgggaagtgggccctcagagattactctggctttgacccttgtttagctgatggtcatttctgggattggaatatttaataagcccaattctaagttgataggtaattttaaatattcaaaccaaatcttcccaacagttggcaagttgtttattttatattatttcttccaggacctacttgctcagatctccaagcaagcatttcttttcttttagggatgtctgaaagtcacatccagttacattactgtgttctttctaatgaaaagtaaaggttttatatagagaaacttgagtaatttttacatttctaagacattaaatcccatttaaattctgtgtgaacattaaagacagcacacttgcaaaagtatggtcaaaggaaaaaaatcccacatttcaattaacaagtagcatggacatttgatcaacctttagttggaataataatattcatatttgctatgaatccttttaaaaaaatctttggataaatgctgacagatttccaagaactaccaagaaaatacaagagatatccaatgcttgatatatgaggcctagtaataacgatatttctctttaattgatgttttgttttaaaagttaaaagtaattcttggcgtggtggttcacgcctgtaatcccagcactttgggaggccgaagcgggcggatcacctgaggtcgggagttcgagaccagcctgaccaacatggagaaaccccgtccctactaaaaatacaaaattagccaggtatggtggtgcatacctgtaatcccagctactcgggaacctgaggcaggagaatggcttgaacccaggagacagaggttgtggtggggcaagatcgcaccattgcacccgagcctaggcaacaagagtgaaattccgtctcaaaaaaataaataaataaataaataaataagttaaaattaattctttatccagagtcgggtgctttagaatttataagtcacttatgtgttttgcttgaattaattctgacagcccctatgaggaaatctggaggcaggtaacagttcccattttagagatgaagaactgaggcacagattaaaggacttgcctgtgttgaataccagtcctgttctaggacattctcccctctcctaggagacggatgtcacgcacaaatggggagagaagtgtttattttgtaggcactaagggtttctaaaacccttaacactggtaagggctcaaaaataaacgtatgtgttcatattcgatcaccgaaatgagagttcttaattgctaattgacaaacgcgttagcaatttcagttagggagtcatctcccttgattgtgttcttttcctgtcaattttcatagacctaatttgcaaactcaatcggggactaaaatttcccactgaaaatgttaaacattttagataactgtgaagatagtttatttttattccttgccaatctgggaatatgccttttttgtgtgtttgtgtgtttttttaagtgctgtattaataatactttctgaaagaaaaggacacttaccccaaaacttcaatctgaaatgtcttacattaagaatatcttgaatgttgtgtatatattttaaaaagcactttgcaaaatagtttgtacatttatttcctaatttatacatgatttttggtgttaatatatttaatgattaataacagaatgtttatttaatgtgctgtccatttttatgtaatattatggggaaagtgatgccagcagttccttttcattattctatcttctgtcatatgaatgttgagcaaagcttaggccaacatgaattgtttgtgaagtgtggttgatggtgctttgtttttttctgactacttctatggaaggccagtgaagaagcaaaggaagacatgaaaattgacgctcattcttcttcctattgttccctgacatccagcaaattgtgaatttgaaaaatgatggccagttttcagaagtgctgacaaattcatattggtatgcaaaagctcatcacccattaaggtttgttgttgaatcaacagtactcagcatattaaaacagtacatcagaactcatgccaacagtctttatgatgggattaaggtggacaagatctcctaagatctgtgaatgggattaaggtggacaagatctcctaagatctgaaaagaaaccttaatacgctcatatggttggagtgttaagtgaacctctgattttgtcagggtttttctacgtgtaggcgtgaatagggggcaccccttcaaaactgtacaaagaagacgactgttttccatttccatttaaacatttttagccacttcatttctatttattgaacaggtcaaatttgtcttgttatttgtgagtacagtacatttaaaaaacatccttatcggttatttttttttcagtcggagtttgacgtataaattgtttatgcttttggtgtaatctcttaataaactggttcttcaaaaaaaaaaaaaaaaaaaaaaaaaaaaaaaaaaaaaaaaaaaaaaaaaaaaaaaaaaaaaaaaaaaaaaaaaaaaaaaaaaaaaaaaaaatcaatagtatgattatacatatcacaacactgaaccgaacaatcacaatatatccaaaatatacactaacatctgcctacgcatttccctcacctccccaccaccaacttcctaactcgacacgcaacctctccatactccatagacccaacatacataaaagcacacagcaacacacaccacatctcacaccttctacatacaaagacagctccaactacagacccaaaccacaatgacacacctcttcactatcactctcctctctcacaatctctcgtcatacacaatccatcgctcattacatcatactccccatctgtctcaactccgctacccacacacatttctccctctcgtacactcaccatatgatccaccacacaccaccgtgatcatcctccctcctaactgtaacacacaa

SEQ ID NO: 58835 - DNA, 5220 bp, Homo sapiens
cgcccagcgcagccggagtatccacctcgatgaccacgggctgagccccgcgccgccaccatgtccgtggccttcgcgtctgcccggccaagaggcaaaggggaggttacgcagcaaaccatccagaagtttttgaagaatgccggccagtcatcgagtgcccttggtttgggtacaaggtgcgttttcctaacttgcgggtctgaaagtgcgtccattcccccttcacgcctggttgcggtttcggcggactagaatttctacgcagaagtctccctcaggatcagaccgtagcccttccggaaacctccatgatgctggacgagaaccaccacctgatccagtgcatcctggagtaccagagcaagggcaagacggccgagtgcacgcagtaccagcagatcctgcaccggaacctggtatacctggccacgatcgcagactccaaccagaacatgcagtccctgcttcctgccccgcccacgcagaacatgaacctgggccctggagccctgactcagagcggctccagccagggcctgcactctcagggcagcctgagtgacgccatcagcacgggcctgccaccctcctccctcctgcagggccagattggcaacgggccgagccacgtgtccatgcagcagacggcgcctaacacgctgcccaccacctccatgagcatctctgggcccggctacagccacgcgggacccgcctcgcagggcgtccccatgcaggggcaaggcaccatcggcaactacgtgtctcggaccaacatcaacatgcagtccaacccagtctccatgatgcagcagcaggcggccacgtcgcactacagctcggcgcagggcggcagccagcactaccagggccagtcgtccatcgccatgatggggcagggcagccaggggagcagcatgatggggcagcggcccatggcgccctaccggccctcccagcaaggctcttcccagcagtacctgggccaggaggagtactatggcgagcagtacagccacagccagggcgccgcggagcccatgggccagcagtactaccccgacggccatggcgattacgcctaccagcagtcatcctacacggagcagagctacgaccggtccttcgaggagtccacgcagcactactatgaggggggaaactcccagtacagccagcagcaggccgggtaccagcagggtgccgcgcagcagcagacgtactcccagcagcagtaccccagccagcagagctaccccgggcagcagcagggctacgggtctgcccagggagccccgtcacagtaccccggctaccagcaaggccaaggccagcagtacggaagctaccgagcaccgcagacagcgccgtctgcccagcagcagcggccctacggctatgaacagggccagtatggaaattaccagcagtaagggacacacattctggctggagcccttgtggtagcgtgttcatccaggggccggatgggctggcggcagctctggtgaattgtgacatgttggttacctgttcgcccagtgccacgtctgcatgtgaagcgtgctcatttcatgctgggtatgacgccgagcgcacaccactggcgtgagacagcgcttggtggtgtgatacttttggtgctgtgtatagtattgtatgtcggtacacggagaggtatcctttttttgtcccccgcccccttctcaatgtttctagctagctttgggggtcattttgtcatcagagcattctgtgcccagggacaggacagatctcgaggacaccacagtccacctgttcccgtcaacagacgttaggtctcattttcctcctcatgcagtgttgtagtgtgggttgtcaacttttctttaactggctacgccacagctggacacacatgcagcccctggagggcagcctcttcctgtgcctcgatggggtgggtgggagggcatcttctgtgcgttgggtcagtttctgttacgtaacgaaaaggataaacatctcccacgggagaggccacagatggccacttccagagcttgcccattgcctgtctctcgccaattccgtttatccaaaaaggtacatgtttttgtattaaaaagtaaacagggatcagtgactgtattccaaataaatatgaatccctaagggccgtggacaaattgcctaacccagggccagcggtattgctgaaggaaaggggcagctctctgggaagtgggccctcagagattactctggctttgacccttgtttagctgatggtcatttctgggattggaatatttaataagcccaattctaagttgataggtaattttaaatattcaaaccaaatcttcccaacagttggcaagttgtttattttatattatttcttccaggacctacttgctcagatctccaagcaagcatttcttttcttttagggatgtctgaaagtcacatccagttacattactgtgttctttctaatgaaaagtaaaggttttatatagagaaacttgagtaatttttacatttctaagacattaaatcccatttaaattctgtgtgaacattaaagacagcacacttgcaaaagtatggtcaaaggaaaaaaatcccacatttcaattaacaagtagcatggacatttgatcaacctttagttggaataataatattcatatttgctatgaatccttttaaaaaaatctttggataaatgctgacagatttccaagaactaccaagaaaatacaagagatatccaatgcttgatatatgaggcctagtaataacgatatttctctttaattgatgttttgttttaaaagttaaaagtaattcttggcgtggtggttcacgcctgtaatcccagcactttgggaggccgaagcgggcggatcacctgaggtcgggagttcgagaccagcctgaccaacatggagaaaccccgtccctactaaaaatacaaaattagccaggtatggtggtgcatacctgtaatcccagctactcgggaacctgaggcaggagaatggcttgaacccaggagacagaggttgtggtggggcaagatcgcaccattgcacccgagcctaggcaacaagagtgaaattccgtctcaaaaaaataaataaataaataaataaataagttaaaattaattctttatccagagtcgggtgctttagaatttataagtcacttatgtgttttgcttgaattaattctgacagcccctatgaggaaatctggaggcaggtaacagttcccattttagagatgaagaactgaggcacagattaaaggacttgcctgtgttgaataccagtcctgttctaggacattctcccctctcctaggagacggatgtcacgcacaaatggggagagaagtgtttattttgtaggcactaagggtttctaaaacccttaacactggtaagggctcaaaaataaacgtatgtgttcatattcgatcaccgaaatgagagttcttaattgctaattgacaaacgcgttagcaatttcagttagggagtcatctcccttgattgtgttcttttcctgtcaattttcatagacctaatttgcaaactcaatcggggactaaaatttcccactgaaaatgttaaacattttagataactgtgaagatagtttatttttattccttgccaatctgggaatatgccttttttgtgtgtttgtgtgtttttttaagtgctgtattaataatactttctgaaagaaaaggacacttaccccaaaacttcaatctgaaatgtcttacattaagaatatcttgaatgttgtgtatatattttaaaaagcactttgcaaaatagtttgtacatttatttcctaatttatacatgatttttggtgttaatatatttaatgattaataacagaatgtttatttaatgtgctgtccatttttatgtaatattatggggaaagtgatgccagcagttccttttcattattctatcttctgtcatatgaatgttgagcaaagcttaggccaacatgaattgtttgtgaagtgtggttgatggtgctttgtttttttctgactacttctatggaaggccagtgaagaagcaaaggaagacatgaaaattgacgctcattcttcttcctattgttccctgacatccagcaaattgtgaatttgaaaaatgatggccagttttcagaagtgctgacaaattcatattggtatgcaaaagctcatcacccattaaggtttgttgttgaatcaacagtactcagcatattaaaacagtacatcagaactcatgccaacagtctttatgatgggattaaggtggacaagatctcctaagatctgtgaatgggattaaggtggacaagatctcctaagatctgaaaagaaaccttaatacgctcatatggttggagtgttaagtgaacctctgattttgtcagggtttttctacgtgtaggcgtgaatagggggcaccccttcaaaactgtacaaagaagacgactgttttccatttccatttaaacatttttagccacttcatttctatttattgaacaggtcaaatttgtcttgttatttgtgagtacagtacatttaaaaaacatccttatcggttatttttttttcagtcggagtttgacgtataaattgtttatgcttttggtgtaatctcttaataaactggttcttcaaaaaaaaaaaaaaaaaaaaaaaaaaaaaaaaaaaaaaaaaaaaaaaaaaaaaaaaaaaaaaaaaaaaaaaaaaaaaaaaaaaaaaaaaaatcaatagtatgattatacatatcacaacactgaaccgaacaatcacaatatatccaaaatatacactaacatctgcctacgcatttccctcacctccccaccaccaacttcctaactcgacacgcaacctctccatactccatagacccaacatacataaaagcacacagcaacacacaccacatctcacaccttctacatacaaagacagctccaactacagacccaaaccacaatgacacacctcttcactatcactctcctctctcacaatctctcgtcatacacaatccatcgctcattacatcatactccccatctgtctcaactccgctacccacacacatttctccctctcgtacactcaccatatgatccaccacacaccaccgtgatcatcctccctcctaactgtaacacacaa

SEQ ID NO: 58836 - DNA, 3988 bp, Homo sapiens
cccacctcggcctcccaaagtgctgggattacaggcatgagccactgctcccggccacttatttattagtcacttaatcattaatagtgctgttgatagcaactcttcccaaagtcacttgaagggttggggtgtcttcaccttcagaagtggtgacctggctccccagtgcctgacaccactccctgctccccatgccagggccgagccacgtgtccatgcagcagacggcgcctaacacgctgcccaccacctccatgagcatctctgggcccggctacagccacgcgggacccgcctcgcagggcgtccccatgcaggggcaaggcaccatcggcaactacgtgtctcggaccaacatcaacatgcagtccaacccagtctccatgatgcagcagcaggcggccacgtcgcactacagctcggcgcagggcggcagccagcactaccagggccagtcgtccatcgccatgatggggcagggcagccaggggagcagcatgatggggcagcggcccatggcgccctaccggccctcccagcaaggctcttcccagcagtacctgggccaggaggagtactatggcgagcagtacagccacagccagggcgccgcggagcccatgggccagcagtactaccccgacggccatggcgattacgcctaccagcagtcatcctacacggagcagagctacgaccggtccttcgaggagtccacgcagcactactatgaggggggaaactcccagtacagccagcagcaggccgggtaccagcagggtgccgcgcagcagcagacgtactcccagcagcagtaccccagccagcagagctaccccgggcagcagcagggctacgggtctgcccagggagccccgtcacagtaccccggctaccagcaaggccaaggccagcagtacggaagctaccgagcaccgcagacagcgccgtctgcccagcagcagcggccctacggctatgaacagggccagtatggaaattaccagcagtaagggacacacattctggctggagcccttgtggtagcgtgttcatccaggggccggatgggctggcggcagctctggtgaattgtgacatgttggttacctgttcgcccagtgccacgtctgcatgtgaagcgtgctcatttcatgctgggacctacttgctcagatctccaagcaagcatttcttttcttttagggatgtctgaaagtcacatccagttacattactgtgttctttctaatgaaaagtaaaggttttatatagagaaacttgagtaatttttacatttctaagacattaaatcccatttaaattctgtgtgaacattaaagacagcacacttgcaaaagtatggtcaaaggaaaaaaatcccacatttcaattaacaagtagcatggacatttgatcaacctttagttggaataataatattcatatttgctatgaatccttttaaaaaaatctttggataaatgctgacagatttccaagaactaccaagaaaatacaagagatatccaatgcttgatatatgaggcctagtaataacgatatttctctttaattgatgttttgttttaaaagttaaaagtaattcttggcgtggtggttcacgcctgtaatcccagcactttgggaggccgaagcgggcggatcacctgaggtcgggagttcgagaccagcctgaccaacatggagaaaccccgtccctactaaaaatacaaaattagccaggtatggtggtgcatacctgtaatcccagctactcgggaacctgaggcaggagaatggcttgaacccaggagacagaggttgtggtggggcaagatcgcaccattgcacccgagcctaggcaacaagagtgaaattccgtctcaaaaaaataaataaataaataaataaataagttaaaattaattctttatccagagtcgggtgctttagaatttataagtcacttatgtgttttgcttgaattaattctgacagcccctatgaggaaatctggaggcaggtaacagttcccattttagagatgaagaactgaggcacagattaaaggacttgcctgtgttgaataccagtcctgttctaggacattctcccctctcctaggagacggatgtcacgcacaaatggggagagaagtgtttattttgtaggcactaagggtttctaaaacccttaacactggtaagggctcaaaaataaacgtatgtgttcatattcgatcaccgaaatgagagttcttaattgctaattgacaaacgcgttagcaatttcagttagggagtcatctcccttgattgtgttcttttcctgtcaattttcatagacctaatttgcaaactcaatcggggactaaaatttcccactgaaaatgttaaacattttagataactgtgaagatagtttatttttattccttgccaatctgggaatatgccttttttgtgtgtttgtgtgtttttttaagtgctgtattaataatactttctgaaagaaaaggacacttaccccaaaacttcaatctgaaatgtcttacattaagaatatcttgaatgttgtgtatatattttaaaaagcactttgcaaaatagtttgtacatttatttcctaatttatacatgatttttggtgttaatatatttaatgattaataacagaatgtttatttaatgtgctgtccatttttatgtaatattatggggaaagtgatgccagcagttccttttcattattctatcttctgtcatatgaatgttgagcaaagcttaggccaacatgaattgtttgtgaagtgtggttgatggtgctttgtttttttctgactacttctatggaaggccagtgaagaagcaaaggaagacatgaaaattgacgctcattcttcttcctattgttccctgacatccagcaaattgtgaatttgaaaaatgatggccagttttcagaagtgctgacaaattcatattggtatgcaaaagctcatcacccattaaggtttgttgttgaatcaacagtactcagcatattaaaacagtacatcagaactcatgccaacagtctttatgatgggattaaggtggacaagatctcctaagatctgtgaatgggattaaggtggacaagatctcctaagatctgaaaagaaaccttaatacgctcatatggttggagtgttaagtgaacctctgattttgtcagggtttttctacgtgtaggcgtgaatagggggcaccccttcaaaactgtacaaagaagacgactgttttccatttccatttaaacatttttagccacttcatttctatttattgaacaggtcaaatttgtcttgttatttgtgagtacagtacatttaaaaaacatccttatcggttatttttttttcagtcggagtttgacgtataaattgtttatgcttttggtgtaatctcttaataaactggttcttcaaaaaaaaaaaaaaaaaaaaaaaaaaaaaaaaaaaaaaaaaaaaaaaaaaaaaaaaaaaaaaaaaaaaaaaaaaaaaaaaaaaaaaaaaaatcaatagtatgattatacatatcacaacactgaaccgaacaatcacaatatatccaaaatatacactaacatctgcctacgcatttccctcacctccccaccaccaacttcctaactcgacacgcaacctctccatactccatagacccaacatacataaaagcacacagcaacacacaccacatctcacaccttctacatacaaagacagctccaactacagacccaaaccacaatgacacacctcttcactatcactctcctctctcacaatctctcgtcatacacaatccatcgctcattacatcatactccccatctgtctcaactccgctacccacacacatttctccctctcgtacactcaccatatgatccaccacacaccaccgtgatcatcctccctcctaactgtaacacacaa

SEQ ID NO: 58837 - DNA, 3529 bp, Homo sapiens
  misc_feature (117)..(117): n is a, c, g, or t
  misc_feature (122)..(123): n is a, c, g, or t
  misc_feature (131)..(131): n is a, c, g, or t
  misc_feature (142)..(143): n is a, c, g, or t
  misc_feature (147)..(147): n is a, c, g, or t
  misc_feature (152)..(153): n is a, c, g, or t
  misc_feature (156)..(156): n is a, c, g, or t
  misc_feature (167)..(167): n is a, c, g, or t
  misc_feature (178)..(179): n is a, c, g, or t
  misc_feature (183)..(183): n is a, c, g, or t
  misc_feature (187)..(188): n is a, c, g, or t
cagtggtccattacaaagatgggtaatgcagccatgggaccagcatagatggatatccgcccttggtgccttcgggccttacagctaaggtgctaccagcagtccctgagcaggagnagtannatgccgancagtacagcannagcnagggnngcngcgagcccatnggccagcagtnntacnccgnnggccatggcgattacgcctaccagcagtcatcctacacggagcagagctacgaccggtccttcgaggagtccacgcagcactactatgaggggggaaactcccagtacagccagcagcaggccgggtaccagcagggtgccgcgcagcagcagacgtactcccagcagcagtaccccagccagcagagctaccccgggcagcagcagggctacgggtctgcccagggagccccgtcacagtaccccggctaccagcaaggccaaggccagcagtacggaagctaccgagcaccgcagacagcgccgtctgcccagcagcagcggccctacggctatgaacagggccagtatggaaattaccagcagtaagggacacacattctggctggagcccttgtggtagcgtgttcatccaggggccggatgggctggcggcagctctggtgaattgtgacatgttggttacctgttcgcccagtgccacgtctgcatgtgaagcgtgctcatttcatgctgggacctacttgctcagatctccaagcaagcatttcttttcttttagggatgtctgaaagtcacatccagttacattactgtgttctttctaatgaaaagtaaaggttttatatagagaaacttgagtaatttttacatttctaagacattaaatcccatttaaattctgtgtgaacattaaagacagcacacttgcaaaagtatggtcaaaggaaaaaaatcccacatttcaattaacaagtagcatggacatttgatcaacctttagttggaataataatattcatatttgctatgaatccttttaaaaaaatctttggataaatgctgacagatttccaagaactaccaagaaaatacaagagatatccaatgcttgatatatgaggcctagtaataacgatatttctctttaattgatgttttgttttaaaagttaaaagtaattcttggcgtggtggttcacgcctgtaatcccagcactttgggaggccgaagcgggcggatcacctgaggtcgggagttcgagaccagcctgaccaacatggagaaaccccgtccctactaaaaatacaaaattagccaggtatggtggtgcatacctgtaatcccagctactcgggaacctgaggcaggagaatggcttgaacccaggagacagaggttgtggtggggcaagatcgcaccattgcacccgagcctaggcaacaagagtgaaattccgtctcaaaaaaataaataaataaataaataaataagttaaaattaattctttatccagagtcgggtgctttagaatttataagtcacttatgtgttttgcttgaattaattctgacagcccctatgaggaaatctggaggcaggtaacagttcccattttagagatgaagaactgaggcacagattaaaggacttgcctgtgttgaataccagtcctgttctaggacattctcccctctcctaggagacggatgtcacgcacaaatggggagagaagtgtttattttgtaggcactaagggtttctaaaacccttaacactggtaagggctcaaaaataaacgtatgtgttcatattcgatcaccgaaatgagagttcttaattgctaattgacaaacgcgttagcaatttcagttagggagtcatctcccttgattgtgttcttttcctgtcaattttcatagacctaatttgcaaactcaatcggggactaaaatttcccactgaaaatgttaaacattttagataactgtgaagatagtttatttttattccttgccaatctgggaatatgccttttttgtgtgtttgtgtgtttttttaagtgctgtattaataatactttctgaaagaaaaggacacttaccccaaaacttcaatctgaaatgtcttacattaagaatatcttgaatgttgtgtatatattttaaaaagcactttgcaaaatagtttgtacatttatttcctaatttatacatgatttttggtgttaatatatttaatgattaataacagaatgtttatttaatgtgctgtccatttttatgtaatattatggggaaagtgatgccagcagttccttttcattattctatcttctgtcatatgaatgttgagcaaagcttaggccaacatgaattgtttgtgaagtgtggttgatggtgctttgtttttttctgactacttctatggaaggccagtgaagaagcaaaggaagacatgaaaattgacgctcattcttcttcctattgttccctgacatccagcaaattgtgaatttgaaaaatgatggccagttttcagaagtgctgacaaattcatattggtatgcaaaagctcatcacccattaaggtttgttgttgaatcaacagtactcagcatattaaaacagtacatcagaactcatgccaacagtctttatgatgggattaaggtggacaagatctcctaagatctgtgaatgggattaaggtggacaagatctcctaagatctgaaaagaaaccttaatacgctcatatggttggagtgttaagtgaacctctgattttgtcagggtttttctacgtgtaggcgtgaatagggggcaccccttcaaaactgtacaaagaagacgactgttttccatttccatttaaacatttttagccacttcatttctatttattgaacaggtcaaatttgtcttgttatttgtgagtacagtacatttaaaaaacatccttatcggttatttttttttcagtcggagtttgacgtataaattgtttatgcttttggtgtaatctcttaataaactggttcttcaaaaaaaaaaaaaaaaaaaaaaaaaaaaaaaaaaaaaaaaaaaaaaaaaaaaaaaaaaaaaaaaaaaaaaaaaaaaaaaaaaaaaaaaaaatcaatagtatgattatacatatcacaacactgaaccgaacaatcacaatatatccaaaatatacactaacatctgcctacgcatttccctcacctccccaccaccaacttcctaactcgacacgcaacctctccatactccatagacccaacatacataaaagcacacagcaacacacaccacatctcacaccttctacatacaaagacagctccaactacagacccaaaccacaatgacacacctcttcactatcactctcctctctcacaatctctcgtcatacacaatccatcgctcattacatcatactccccatctgtctcaactccgctacccacacacatttctccctctcgtacactcaccatatgatccaccacacaccaccgtgatcatcctccctcctaactgtaacacacaa

SEQ ID NO: 58838 - DNA, 2392 bp, Homo sapiens
tggtcttgaactcctgacctcaaatgatccacccacctcggccccagcactttgggaggccgaagcgggcggatcacctgaggtcgggagttcgagaccagcctgaccaacatggagaaaccccgtccctactaaaaatacaaaattagccaggtatggtggtgcatacctgtaatcccagctactcgggaacctgaggcaggagaatggcttgaacccaggagacagaggttgtggtggggcaagatcgcaccattgcacccgagcctaggcaacaagagtgaaattccgtctcaaaaaaataaataaataaataaataaataagttaaaattaattctttatccagagtcgggtgctttagaatttataagtcacttatgtgttttgcttgaattaattctgacagcccctatgaggaaatctggaggcaggtaacagttcccattttagagatgaagaactgaggcacagattaaaggacttgcctgtgttgaataccagtcctgttctaggacattctcccctctcctaggagacggatgtcacgcacaaatggggagagaagtgtttattttgtaggcactaagggtttctaaaacccttaacactggtaagggctcaaaaataaacgtatgtgttcatattcgatcaccgaaatgagagttcttaattgctaattgacaaacgcgttagcaatttcagttagggagtcatctcccttgattgtgttcttttcctgtcaattttcatagacctaatttgcaaactcaatcggggactaaaatttcccactgaaaatgttaaacattttagataactgtgaagatagtttatttttattccttgccaatctgggaatatgccttttttgtgtgtttgtgtgtttttttaagtgctgtattaataatactttctgaaagaaaaggacacttaccccaaaacttcaatctgaaatgtcttacattaagaatatcttgaatgttgtgtatatattttaaaaagcactttgcaaaatagtttgtacatttatttcctaatttatacatgatttttggtgttaatatatttaatgattaataacagaatgtttatttaatgtgctgtccatttttatgtaatattatggggaaagtgatgccagcagttccttttcattattctatcttctgtcatatgaatgttgagcaaagcttaggccaacatgaattgtttgtgaagtgtggttgatggtgctttgtttttttctgactacttctatggaaggccagtgaagaagcaaaggaagacatgaaaattgacgctcattcttcttcctattgttccctgacatccagcaaattgtgaatttgaaaaatgatggccagttttcagaagtgctgacaaattcatattggtatgcaaaagctcatcacccattaaggtttgttgttgaatcaacagtactcagcatattaaaacagtacatcagaactcatgccaacagtctttatgatgggattaaggtggacaagatctcctaagatctgtgaatgggattaaggtggacaagatctcctaagatctgaaaagaaaccttaatacgctcatatggttggagtgttaagtgaacctctgattttgtcagggtttttctacgtgtaggcgtgaatagggggcaccccttcaaaactgtacaaagaagacgactgttttccatttccatttaaacatttttagccacttcatttctatttattgaacaggtcaaatttgtcttgttatttgtgagtacagtacatttaaaaaacatccttatcggttatttttttttcagtcggagtttgacgtataaattgtttatgcttttggtgtaatctcttaataaactggttcttcaaaaaaaaaaaaaaaaaaaaaaaaaaaaaaaaaaaaaaaaaaaaaaaaaaaaaaaaaaaaaaaaaaaaaaaaaaaaaaaaaaaaaaaaaaatcaatagtatgattatacatatcacaacactgaaccgaacaatcacaatatatccaaaatatacactaacatctgcctacgcatttccctcacctccccaccaccaacttcctaactcgacacgcaacctctccatactccatagacccaacatacataaaagcacacagcaacacacaccacatctcacaccttctacatacaaagacagctccaactacagacccaaaccacaatgacacacctcttcactatcactctcctctctcacaatctctcgtcatacacaatccatcgctcattacatcatactccccatctgtctcaactccgctacccacacacatttctccctctcgtacactcaccatatgatccaccacacaccaccgtgatcatcctccctcctaactgtaacacacaa

SEQ ID NO: 58839 - DNA, 405 bp, Homo sapiens
aaacatttttagccacttcatttctatttattgaacaggtcaaatttgtcttgttatttgtgagtacagtacatttaaaaaacatccttatcggttatttttttttcagtcggagtttgacgtataaattgtttatgcttttggtgtaatctcttaataaactggttcttcaaaaatcatcctataaagtgagttttcatgaagttaacgggattttggtgtgatgtgttttgcaaatacttattaccgagaccaggtagatcgtcacctcggctcccgggcagagttcgcgtgcgtccgcaccggattccccgcggcggcaaggcgaagccagggtaagggcggtggggacggcgccccggggctgccctgcggtccccactgcctgctctgcgttgccccgta

SEQ ID NO: 58840 - DNA, 406 bp, Homo sapiens
ggtaacaggtttttaccaacaattgcttgtagctaatgtagaacatacttgagaaaatggcttctgtgaaagaccagttagtaccaaaataatctggcccagaaaaatagccaccattcttgactacattaatagaaatagaataacccccaaagggagatgagaagcattctaaagtgcactgatcatgagtttctatgtgatgatttgtgtccatttggagctccagtgctttaaagctgaaatgaaccctggcctttcaccaccctccctgcccatagtatggtatatcctcttattccttccctcttagcttactgagagtgtaatttccaaccagttaagccaaagaggactattttctagaaaaggagagagagaatgaattagcagataaatgaagagt

SEQ ID NO: 58841 - DNA, 496 bp, Homo sapiens
aaaaatcaaaaggactggttcagaaagtttctggattgctgaacacatgtaagatcgtggagggtctcactttgtcaaccaggatagagtacagtggcatgaacatggctcacagctgcctcaacctctcaagctccagcgatcctccctcagcctcctgagtagctgggaccacaaggatgcgccaccacccctggctagttctgttcattttttgtagggacaaggcctcactatgttgtccatgactcaagcaatccttctgcctcagccttccaaagtgctgggagtacaggcgtttgagtcaccgtgcctggccagatcttggtttctaatgccattatccaataaaaggaatggggactccttggagaaatgactgattctaggagccgggcaggaaatatgcaagatgagcctggagcattttgtagtaccacaaagtaggaaagtattaaaatacacacacacacacacacacacacacacacacaca

SEQ ID NO: 58842 - DNA, 301 bp, Homo sapiens
cttcatatttttatagctggggtcaaaatatgcaatttaaaaataaatatatccatttgcctattcttacatttatgaatataaaaataaaatctaagaaacataatgctgccaactaatagtagtggaggaaaggaagctgagagaaagataaatatattaatttaatcattactcagaaaaggcagtaaaagatactatctatagcaggcatcaataaatatgaaccatgagccaaatcaggcttaccacctgattttgtagataaagttcattgaaacacagttacagtgtctttcaa

SEQ ID NO: 58843 - DNA, 364 bp, Homo sapiens
gctccactgaccagctgttccctgtctctccttctccttgagcctccctcttccctgagacacaataatattaaaatttggccaatcaataactcaacaatggtgtctaataattgttcaggtgcgaggaagaggcatacatctctcactttaaatcaaaagctagaaatgattaagcttagtgaggaaggcatgtcaaaagccgagacagaccaaaagctaggccttttgtgccagttagctaagatgtgactataaagaaaagctgtcgaaggaaatttagaatggtactccagggaacacacaaatgataaggaagcaaaacagccttactactgggatatggagaaaagtttcagcttgg

SEQ ID NO: 58844 - DNA, 359 bp, Homo sapiens
ttggttaagaccaaagtcagatcactccctcctagctccaaacctgcagtggctcccaattctctcagcatacaaacccagatcctcaggctgccatttctgggctgaatcctgtccctgctgtctgatcccaccagacataatggaggcctgaggttccctgaacactcctagtttagccttaagttaagtatttgcacatgctggttcctatgcctgagataatgttccacatttcatcccattgcttgccagaaatagaaacccttccacataattccaaaacagaatttacaacacagagctttgggtgactgcaggacctccaagaacggtaggcagaagggacactgaagagt

SEQ ID NO: 58845 - DNA, 376 bp, Homo sapiens
aaaaaacttctggatccgcaggaatcagtggccaacagtccttgctgggttcagatatcttcagggaaatatcggtggtggtggtattcatgtttgaccttcagtgtgtatctaacacccagtagttctattatcaggtctcatttgtagattatgaatatatatgtctgtagatcatgagtatatgtgtctaaaggctacattgtggagcttatggtgcttgtgttctggtgacaaacttgttaaaacaaagttctgtggctaggcacagtggctcatgtctgtaatcccaacactttggaaagccggggcgggaggatcacttgagccctggagttcgagagcagcgtgggcaatatagtgagaacctgtgttt

SEQ ID NO: 58846 - DNA, 397 bp, Homo sapiens
agccataagctaccttgttgagggttaattagaaatactactcaattctgaccacagggagaatggcctgcaatgaggttttaagcattcatgtattcattcaaaaaatatttattgagcaccaactatgtgataagcagaggtctaaactttttggatacataagtgtacaaaagaaccaaaaattccagccatatttatcagaatatactgtgctttgtgttttagttgaatcagggctttgcccaagtgtcgctctctacaaggcactgtgggacaatattgttggaatacccaagacatggaaggcatggtctctgatatcaaagtagcaatttcaccaaagttgtcagatttaggggttagcatcccagcccttgtgacaccagcagtgctt

SEQ ID NO: 58847 - DNA, 208 bp, Homo sapiens
gaaccaatttctagtgcagcttatagaaataaaccatagtagtttacagccaaattgcaaattatagcttgtggcttttctcaatttatagtattaactactcttaaaaatttactattttgtcacataaaatatgatttagaatacttatgaaatatttgacttcttttgtacctaaggcatgatctcaccaataaagagatcttaa

SEQ ID NO: 58848 - DNA, 2223 bp, Homo sapiens
ctggtgctgaggtgctctagaggatccgccaggtagattgcccaccataattgtatttgaaaacaattcagtattcctttgttttatctattatttatttttgagagagggtctcactctgtcacctaggctggagtgcagtggcacaatcacagctcattgcagccttgacctccctggattcaggtgatcctcccaccttcacctcctgagtaccttggactacaggcatgtgccaccacacccaggtaatttttgtattttttgccatgttgcccaggctggtctctcttaactcttgggctcaggtgatctgaccatctcggtctcccaaagttctgggattacaggagtgagccatactgtgttgtgttttagttgaaagggatatacacgtgtattttagaaatatgaaacaggataagaattacattaaaatcacccaagatcccaaccaccattaaagagtttgtgtaaatcttctggtctcttttctgtatacactttttaaatactggggtcatatttttattggtttatatgctatgttaaacatttttagcatttcctcctgttcttaagtctgttaagaggatagctccatcatattctgtgttctgcaaattatttctggacatttaaattgtaagaaaatggtcactgttaactaggctgcagtgattatcatttgttcataaatctttgtgaagatctttgggtactgccttacattaaaatctttttcaatttgaccagtaaaagtggcatgttagtaacattgtcattttcagtgttagattatgtagtactaagtttattttattttatttttgagacagagtcttgcactgtcgcccaggctggagtgcagtggcgccatctcagctcactgcaacctccacctcccaggttcaagcgattcttctgcctcagcctcccgagtagctgggattacaggcacccaccacgatgcccagctaattttttgtatttttagtagagacagggtttcactatgttgtccaggctggtctcgaacgcctgacctcatgatccacctgcctcggcctcccaaagtgttgggattacaggcatgagccaccctgcccgacctagtaatacttttttttttttttttttttaatgaacttaaatgtttagaatggtaagttcacggctccctaaggagtgttccttttggattgctctgtttggctccctccctgaaatcctatagtcagccactggtcccctcagagagttttacctctgatctttggggtgattctttgttcatatttatctgattggctttgttcttccaaaagtgtctgcacaggactgctaagagaacctaggcaagtcatttaatttttctgggcttcagtttactcattagcttcttttagttcccagatgctattactggaaagaataactagtaatggataaaaacctacataaatatttcctattttgccatcaaagtgctgggttcattttggtgtatttggcatccaagtacaaattaacagtttcccaaaatcctgattctttgacttttttatcttgatgatggaaaggaaggacacgtttacttgctttagtttctttccccttaactacccacttgctgagaggggtaggagcagggattggctttagagaaacaagatacagtgtagattagctaatgtttgcgcttaacaaaacttgtcctgtttaacttacctgagggttctgcagcctaccgcagtaattttagttcagctgttttcagatatattgccttgtatcttcgttctttcgtctcctatcctttttagaaatttatcacctgtttctctttcagcctgacttacaaaatctaatttttggcctaaaaatttcccctagcttggtactagtccttttatttctgcctgtgattatattttaaaattaaacttaaatgaatctaattcattggatataaaaaaaaaaagtaagtggcttgctttgcttactctggttttccatcctcattcctggatataatcaagattgcagtaggctaacaatctaatgctgaaaacaagaatgaaaaacataccatcttttcaagttactttggacccatagagagaaagtggattggtacttaataccttccctgaatttaacagaattgatgtggactgtacataaaatatgttgaaaaataaaactatttttttggcaaaa

SEQ ID NO: 58849 - DNA, 1271 bp, Homo sapiens
gtgtccccagaagtggccttgaaccgaatatctccaatggacagggctggggagcccacagggctggtgcggcgggagtcagtggaggcgaagatgcagagtgccagctggaaggtcagaatacgctccaccaccatggcctggccctgcgttgtgttgttggtagagcgcgttgtctaccctgtaccgaagacagaggctgtggggacagcctaggggcctggatctattgcctacttagagagaggccaactcagacacagccgtgtatgctcccagcagcaacggaggttcagctccgcctgcagggacagaaagacatggtctggaaatggatgccacttctgctgcttctggtctgtgtagccaccatgtgcagtgcccaggacaggactgatctcctcaatgtctgtatggatgccaagcaccacaagacaaagccaggtcctgaggacaagctgcatgaccaatgcagtccctggaagaagaatgcctgctgcacagccagcaccagccaggagctgcacaaggacacctcccgcctgtacaactttaactgggaccactgcggcaagatggagcccgcctgcaagcgccacttcatccaggacacctgtctctatgagtgctcacccaacctggggccctggatccagcaggtgaatcagagctggcgcaaagaacgcttcctggatgtgcccttatgcaaagaggactgtcagcgctggtgggaggattgtcacacctcccacacgtgcaagagcaactggcacagaggatgggactggacctcaggagttaacaagtgcccagctggggctctctgccgcacctttgagtcctacttccccactccagctgccctttgtgaaggcctctggagtcactcatacaaggtcagcaactacagccgagggagcggccgctgcatccagatgtggtttgattcagcccagggcaaccccaacgaggaagtggcgaggttctatgctgcagccatgcatgtgaatgctggtgagatgcttcatgggactgggggtctcctgctcagtctggccctgatgctgcaactctggctccttggctgagttcagtcctcccagactacctgccctcagcttggataaccaggctgggctcagctcagctcccacaaatgacagccccttaagcatgcttctattagtcacctaaccctctgtcacccagtctgttgctgctccatggtggggccaagagtcacttctaataaacagactgttttctaataa

SEQ ID NO: 58850 - DNA, 1213 bp, Homo sapiens
gaatcaattcctccaaaccgcaagaacagtaacatttattattcaaaaaaacaaaaaccagattataggatatgacatttggtataacaataatgttattgaaaaatggaaaaatgatccattaatggcttgggctaaaaattcgggggacagcctaggggcctggatctattgcctacttagagagaggccaactcagacacagccgtgtatgctcccagcagcaacggaggttcagctccgcctgcagggacagaaagacatggtctggaaatggatgccacttctgctgcttctggtctgtgtagccaccatgtgcagtgcccaggacaggactgatctcctcaatgtctgtatggatgccaagcaccacaagacaaagccaggtcctgaggacaagctgcatgaccaatgcagtccctggaagaagaatgcctgctgcacagccagcaccagccaggagctgcacaaggacacctcccgcctgtacaactttaactgggaccactgcggcaagatggagcccgcctgcaagcgccacttcatccaggacacctgtctctatgagtgctcacccaacctggggccctggatccagcaggtgaatcagagctggcgcaaagaacgcttcctggatgtgcccttatgcaaagaggactgtcagcgctggtgggaggattgtcacacctcccacacgtgcaagagcaactggcacagaggatgggactggacctcaggagttaacaagtgcccagctggggctctctgccgcacctttgagtcctacttccccactccagctgccctttgtgaaggcctctggagtcactcatacaaggtcagcaactacagccgagggagcggccgctgcatccagatgtggtttgattcagcccagggcaaccccaacgaggaagtggcgaggttctatgctgcagccatgcatgtgaatgctggtgagatgcttcatgggactgggggtctcctgctcagtctggccctgatgctgcaactctggctccttggctgagttcagtcctcccagactacctgccctcagcttggataaccaggctgggctcagctcagctcccacaaatgacagccccttaagcatgcttctattagtcacctaaccctctgtcacccagtctgttgctgctccatggtggggccaagagtcacttctaataaacagactgttttctaataa

SEQ ID NO: 58851 - DNA, 1462 bp, Homo sapiens
gtgtccccagaagtggccttgaaccgaatatctccaatggacagggctggggagcccacagggctggtgcggcgggagtcagtggaggcgaagatgcagagtgccagctggaaggtcagaatacgctccaccaccatggcctggccctgcgttgtgttgttggtagagcgcgttgtctaccctgtaccgaagacagaggctgtggggacagcctaggggcctggatctattgcctacttagagagaggccaactcagacacagccgtgtatgctcccagcagcaacggaggttcagctccgcctgcagggacagaaagacatggtctggaaatggatgccacttctgctgcttctggtctgtgtagccaccatgtgcagtgcccaggacaggactgatctcctcaatgtctgtatggatgccaagcaccacaagacaaagccaggtcctgaggacaagctgcatgaccaatgcagtccctggaagaagaatgcctgctgcacagccagcaccagccaggagctgcacaaggacacctcccgcctgtacaactttaactgggaccactgcggcaagatggagcccgcctgcaagcgccacttcatccaggacacctgtctctatgagtgctcacccaacctggggccctggatccagcaggtgaatcagagctggcgcaaagaacgcttcctggatgtgcccttatgcaaagaggactgtcagcgctggtgggaggattgtcacacctcccacacgtgcaagagcaactggcacagaggatgggactggacctcaggagttaacaagtgcccagctggggctctctgccgcacctttgagtcctacttccccactccagctgccctttgtgaaggcctctggagtcactcatacaaggtcagcaactacagccgagggagcggccgctgcatccagatgtggtttgattcagcccagggcaaccccaacgaggaagtggcgaggttctatgctgcagccatgcatgtgaatgctggtgagatgcttcatgggactgggggtctcctgctcagtctggccctgatgctgcaactctggctccttggctgagttcagtcctcccagactacctgccctcagcttggataaccaggctgggctcagctcagctcccacaaatgacagccccttaagcatgcttctattagtcacctaaccctctgtcacccagtctgttgctgctccatggtggggccaagagtcacttctaataaacagactgttttctaataaaaaaaaaaaaaaaaaaaaaaaaaaacaaaaaacaaaaaaaaaaaaaacaaacatcacaaaaaacacactacacaactcaaccaacccccgcgcccacaacaaactaataacgggggcccaaattgggcctttttgggcaaattcccctaatggggggccttttactcacggggccccttttacccggggcg

SEQ ID NO: 58852 - DNA, 1551 bp, Homo sapiens
caaaactacttaaaaaacactgctctttccatttccgtatcatttaaccaaacaccatcctgtgggttctgtcacttgatcctcatgctgatctgagaactcggcagagctgggtcactgccttccccaaggctaacctggtttctaagctggcacaagaccccaggtgatctatcatctaaccacagagcccttgctggacagagggtgaagacattatgtgtccctggctctgttcagggaagcagaggatagacctgaagaatttaattacttgtcatagataaagcctagagaaaaggtgagggcgcaaagtatctcctccaaattgggaagactcccccagggctcactcactaacgccagttctcctgagcctttaaagcctgggggtgagggagccctcctggtcaaccctctctaccctagcctcagggagcttcagggccccagcattgaaggaacagggtctgacctcatttgccaccgtagggatggggagactgaggcaggaggtgaatgggctcccagcttggagccctttcccctcaggacttggtttccctaccctagctcctccgcctgcagggacagaaagacatggtctggaaatggatgccacttctgctgcttctggtctgtgtagccaccatgtgcagtgcccaggacaggactgatctcctcaatgtctgtatggatgccaagcaccacaagacaaagccaggtcctgaggacaagctgcatgaccaatgcagtccctggaagaagaatgcctgctgcacagccagcaccagccaggagctgcacaaggacacctcccgcctgtacaactttaactgggaccactgcggcaagatggagcccgcctgcaagcgccacttcatccaggacacctgtctctatgagtgctcacccaacctggggccctggatccagcaggtgaatcagagctggcgcaaagaacgcttcctggatgtgcccttatgcaaagaggactgtcagcgctggtgggaggattgtcacacctcccacacgtgcaagagcaactggcacagaggatgggactggacctcaggagttaacaagtgcccagctggggctctctgccgcacctttgagtcctacttccccactccagctgccctttgtgaaggcctctggagtcactcatacaaggtcagcaactacagccgagggagcggccgctgcatccagatgtggtttgattcagcccagggcaaccccaacgaggaagtggcgaggttctatgctgcagccatgcatgtgaatgctggtgagatgcttcatgggactgggggtctcctgctcagtctggccctgatgctgcaactctggctccttggctgagttcagtcctcccagactacctgccctcagcttggataaccaggctgggctcagctcagctcccacaaatgacagccccttaagcatgcttctattagtcacctaaccctctgtcacccagtctgttgctgctccatggtggggccaagagtcacttctaataaacagactgttttctaataa

SEQ ID NO: 58853 - DNA, 1242 bp, Homo sapiens
gtgtccccagaagtggccttgaaccgaatatctccaatggacagggctggggagcccacagggctggtgcggcgggagtcagtggaggcgaagatgcagagtgccagctggaaggtcagaatacgctccaccaccatggcctggccctgcgttgtgttgttggtagagcgcgttgtctaccctgtaccgaagacagaggctgtggggacagcctaggggcctggatctattgcctacttagagagaggccaactcagacacagccgtctccgcctgcagggacagaaagacatggtctggaaatggatgccacttctgctgcttctggtctgtgtagccaccatgtgcagtgcccaggacaggactgatctcctcaatgtctgtatggatgccaagcaccacaagacaaagccaggtcctgaggacaagctgcatgaccaatgcagtccctggaagaagaatgcctgctgcacagccagcaccagccaggagctgcacaaggacacctcccgcctgtacaactttaactgggaccactgcggcaagatggagcccgcctgcaagcgccacttcatccaggacacctgtctctatgagtgctcacccaacctggggccctggatccagcaggtgaatcagagctggcgcaaagaacgcttcctggatgtgcccttatgcaaagaggactgtcagcgctggtgggaggattgtcacacctcccacacgtgcaagagcaactggcacagaggatgggactggacctcaggagttaacaagtgcccagctggggctctctgccgcacctttgagtcctacttccccactccagctgccctttgtgaaggcctctggagtcactcatacaaggtcagcaactacagccgagggagcggccgctgcatccagatgtggtttgattcagcccagggcaaccccaacgaggaagtggcgaggttctatgctgcagccatgcatgtgaatgctggtgagatgcttcatgggactgggggtctcctgctcagtctggccctgatgctgcaactctggctccttggctgagttcagtcctcccagactacctgccctcagcttggataaccaggctgggctcagctcagctcccacaaatgacagccccttaagcatgcttctattagtcacctaaccctctgtcacccagtctgttgctgctccatggtggggccaagagtcacttctaataaacagactgttttctaataa

SEQ ID NO: 58854 - DNA, 1208 bp, Homo sapiens
gtgtccccagaagtggccttgaaccgaatatctccaatggacagggctggggagcccacagggctggtgcggcgggagtcagtggaggcgaagatgcagagtgccagctggaaggtcagaatacgctccaccaccatggcctggccctgcgttgtgttgttggtagagcgcgttgtctaccctgtaccgaagacagaggctgtggggacagcctaggggcctggatctattgcctacttagagagaggccaactcagacacagccgtgtatgctcccagcagcaacggaggttcagctccgcctgcagggacagaaagacatggtctggaaatggatgccacttctgctgcttctggtctgtgtagccaccatgtgcagtgcccaggacaggactgatctcctcaatgtctgtatggatgccaagcaccacaagacaaagccaggtcctgaggacaagctgcatgaccaatgcagtccctggaagaagaatgcctgctgcacagccagcaccagccaggagctgcacaaggacacctcccgcctgtacaactttaactgggaccactgcggcaagatggagcccgcctgcaagcgccacttcatccaggacacctgtctctatgagtgctcacccaacctggggccctggatccagcaggtgaatcagagctggcgcaaagaacgcttcctggatgtgcccttatgcaaagaggactgtcagcgctggtgggaggattgtcacacctcccacacgtgcaagagcaactggcacagaggatgggactggacctcagctgccctttgtgaaggcctctggagtcactcatacaaggtcagcaactacagccgagggagcggccgctgcatccagatgtggtttgattcagcccagggcaaccccaacgaggaagtggcgaggttctatgctgcagccatgcatgtgaatgctggtgagatgcttcatgggactgggggtctcctgctcagtctggccctgatgctgcaactctggctccttggctgagttcagtcctcccagactacctgccctcagcttggataaccaggctgggctcagctcagctcccacaaatgacagccccttaagcatgcttctattagtcacctaaccctctgtcacccagtctgttgctgctccatggtggggccaagagtcacttctaataaacagactgttttctaataa

SEQ ID NO: 58855 - DNA, 1466 bp, Homo sapiens
caaaactacttaaaaaacactgctctttccatttccgtatcatttaaccaaacaccatcctgtgggttctgtcacttgatcctcatgctgatctgagaactcggcagagctgggtcactgccttccccaaggctaacctggtttctaagctggcacaagaccccaggtgatctatcatctaaccacagagcccttgctggacagagggtgaagacattatgtgtccctggctctgttcagggaagcagaggatagacctgaagaatttaattacttgtcatagataaagcctagagaaaaggtgagggcgcaaagtatctcctccaaattgggaagactcccccagggctcactcactaacgccagttctcctgagcctttaaagcctgggggtgagggagccctcctggtcaaccctctctaccctagcctcagggagcttcagggccccagcattgaaggaacagggtctgacctcatttgccaccgtagggatggggagactgaggcaggaggtgaatgggctcccagcttggagccctttcccctcaggacttggtttccctaccctagctcctccgcctgcagggacagaaagacatggtctggaaatggatgccacttctgctgcttctggtctgtgtagccaccatgtgcagtgcccaggacaggactgatctcctcaatgtctgtatggatccagcaccagccaggagctgcacaaggacacctcccgcctgtacaactttaactgggaccactgcggcaagatggagcccgcctgcaagcgccacttcatccaggacacctgtctctatgagtgctcacccaacctggggccctggatccagcaggtgaatcagagctggcgcaaagaacgcttcctggatgtgcccttatgcaaagaggactgtcagcgctggtgggaggattgtcacacctcccacacgtgcaagagcaactggcacagaggatgggactggacctcaggagttaacaagtgcccagctggggctctctgccgcacctttgagtcctacttccccactccagctgccctttgtgaaggcctctggagtcactcatacaaggtcagcaactacagccgagggagcggccgctgcatccagatgtggtttgattcagcccagggcaaccccaacgaggaagtggcgaggttctatgctgcagccatgcatgtgaatgctggtgagatgcttcatgggactgggggtctcctgctcagtctggccctgatgctgcaactctggctccttggctgagttcagtcctcccagactacctgccctcagcttggataaccaggctgggctcagctcagctcccacaaatgacagccccttaagcatgcttctattagtcacctaaccctctgtcacccagtctgttgctgctccatggtggggccaagagtcacttctaataaacagactgttttctaataa

SEQ ID NO: 58856 - DNA, 401 bp, Homo sapiens
caaccatctgcgtggcaggagctatcacactggagcctcgcagtagccaaggagagacgccaatgagggaatcatttttccacttggtgaaatacatttttgccccgtgaaagcaagaggagggcctgtcttggataggtggagtggtcctaggtcctactagatggaaacctcaggactcggaagaggttcaccttcggagcgagtccccctaaggccagccgtaggatctgcattgagttcagcaagcggaggcgacttccccagggccacacagccatggagggctgcggctcagttgctgactgctccagctcaccctcacgtccatgaggtttctgctccaaaatgctattgctaagaaaaatgttccaaacacgacccattggctgaccacaggt

SEQ ID NO: 58857 - DNA, 494 bp, Homo sapiens
tgaaattctcatccttccatgtattggaacagttttcttaaccatatctagaagtttacataaaaatttagaaagaaatttaccacatttgaaatttatgcaggagactatatttctgaagcatttgaacaaattaattagctttgttgttcaactcattgggctaaagaagccaaaagcaatgggttttaatgtagtcgaagccaaattatatttatgaaagaaatattctgtgttataaccaccaaatacagcccaattctgactagatgatggaagaacctgtcccatcagaggtccagcatgaggtccagcagaggtccaccagaggagttcagcaatttgctgctcttagggcagggatcaattccttaatatcttaggaagactaggtattgacagtaatggtgacaaagcaatgaaaaggaaaggaagaagtgataagacatggcagcaagctgaagtatgatgagtaaagaataggaatcaaagta

SEQ ID NO: 58858 - DNA, 410 bp, Homo sapiens
aaggactctgaagaactgtgaaggacttcatgcctctgtggttgggtggtcaaggtcatgagatactcagaggatctctgcaagcaactgcctgcaggaaagcagctgccttcttgggatttgctgattcattttgacttttttttttagtttttctctagcttcacttccagctgttgcagacacaagagatgaatgtctgtttgatcaagaggaaaggagtaaactttgttctctcgtattatttctctgcattagtgaatgtgcttgcttcctaaatcctcattagcaaagtatcttcttatgaagaaatctgttctgtccttgccactggatccatctctataaagactctagcaaaaagttctataggcacaatctaataatatgcaaaaataaatgcatcttaa

SEQ ID NO: 58859 - DNA, 4077 bp, Homo sapiens
tcctctgcgtcccgccccgggagtggctgcgaggctaggcgagccgggaaagggggcgccgcccagccccgagccccgcgccccgtgccccgagcccggagccccctgcccgcggcggcaccatgcgcgccgagccggcgtgaccggctccgcccgcggccgccccgcagctagcccggcgctctcgccggccacacggagcggcgcccgggagctatgagccatgaagccgcccggcagcagctcgcggcagccgcccctggcgggctgcagccttgccggcgcttcctgcggcccccaacgcggccccgccggctcggtgcctgccagcgccccggcccgcacgccgccctgccgcctgcttctcgtccttctcctgctgcctccgctcgccgcctcgtcccggccccgcgcctggggggctgctgcgcccagcgctccgcattggaatgaaactgcagaaaaaaatttgggagtcctggcagatgaagacaatacattgcaacagaatagcagcagtaatatcagttacagcaatgcaatgcagaaagaaatcacactgccttcaagactcatatattacatcaaccaagactcggaaagcccttatcacgttcttgacacaaaggcaagacaccagcaaaaacataataaggctgtccatctggcccaggcaagcttccagattgaagccttcggctccaaattcattcttgacctcatactgaacaatggtttgttgtcttctgattatgtggagattcactacgaaaatgggaaaccacagtactctaagggtggagagcactgttactaccatggaagcatcagaggcgtcaaagactccaaggtggctctgtcaacctgcaatggacttcatggcatgtttgaagatgataccttcgtgtatatgatagagccactagagctggttcatgatgagaaaagcacaggtcgaccacatataatccagaaaaccttggcaggacagtattctaagcaaatgaagaatctcactatggaaagaggtgaccagtggccctttctctctgaattacagtggttgaaaagaaggaagagagcagtgaatccatcacgtggtatatttgaagaaatgaaatatttggaacttatgattgttaatgatcacaaaacgtataagaagcatcgctcttctcatgcacataccaacaactttgcaaagtccgtggtcaaccttgtggattctatttacaaggagcagctcaacaccagggttgtcctggtggctgtagagacctggactgagaaggatcagattgacatcaccaccaaccctgtgcagatgctccatgagttctcaaaataccggcagcgcattaagcagcatgctgatgctgtgcacctcatctcgcgggtgacatttcactataagagaagcagtctgagttactttggaggtgtctgttctcgcacaagaggagttggtgtgaatgagtatggtcttccaatggcagtggcacaagtattatcgcagagcctggctcaaaaccttggaatccaatgggaaccttctagcagaaagccaaaatgtgactgcacagaatcctggggtggctgcatcatggaggaaacaggggtgtcccattctcgaaaattttcaaagtgcagcattttggagtatagagactttttacagagaggaggtggagcctgccttttcaacaggccaacaaagctatttgagcccacggaatgtggaaatggatacgtggaagctggggaggagtgtgattgtggttttcatgtggaatgctatggattatgctgtaagaaatgttccctctccaacggggctcactgcagcgacgggccctgctgtaacaatacctcatgtctttttcagccacgagggtatgaatgccgggatgctgtgaacgagtgtgatattactgaatattgtactggagactctggtcagtgcccaccaaatcttcataagcaagacggatatgcatgcaatcaaaatcagggccgctgctacaatggcgagtgcaagaccagagacaaccagtgtcagtacatctggggaacaaaggctgcagggtctgacaagttctgctatgaaaagctgaatacagaaggcactgagaagggaaactgcgggaaggatggagaccggtggattcagtgcagcaaacatgatgtgttctgtggattcttactctgtaccaatcttactcgagctccacgtattggtcaacttcagggtgagatcattccaacttccttctaccatcaaggccgggtgattgactgcagtggtgcccatgtagttttagatgatgatacggatgtgggctatgtagaagatggaacgccatgtggcccgtctatgatgtgtttagatcggaagtgcctacaaattcaagccctaaatatgagcagctgtccactcgattccaagggtaaagtctgttcgggccatggggtgtgtagtaatgaagccacctgcatttgtgatttcacctgggcagggacagattgcagtatccgggatccagttaggaaccttcacccccccaaggatgaaggacccaagggtcctagtgccaccaatctcataataggctccatcgctggtgccatcctggtagcagctattgtccttgggggcacaggctggggatttaaaaatgtcaagaagagaaggttcgatcctactcagcaaggccccatctgaatcagctgcgctggatggacaccgccttgcactgttggattctgggtatgacatactcgcagcagtgttactggaactattaagtttgtaaacaaaacctttgggtggtaatgactacggagctaaagttggggtgacaaggatggggtaaaagaaaactgtctcttttggaaataatgtcaaagaacacctttcaccacctgtcagtaaacgggggagggggcaaaagaccatgctataaaaagaattgttccagaatcttttttttccctaatggacgaaggaacaacacacacacaaaaattaaatgcaataaaggaatcattaaaaaaaatagtaaatgattttttttccctcagcctgctggcacttaatatcttctaaatgatttggcatgatttttttttctttactaccgatgacaaactccagtggcatgaagatctaattttcaaaagggtaaaaactgcatggcatatatacaacaagctagcaagccaattctcagcaaaacctgcaacagaattcctaaagtgaagatgacagatgaacacaaagaagctgcctgggcctcttcacttaaacatgtccccacaccccatcctctcggagccccacttcttaccccccacctcccaccctctataatccccactccccattggagaccaggccagggcagaactccacggaccttgctcttgttgattcactttccccattgtgttttctcctggactgagcatcctttggaaatgggagctggaatttgaacaatgatgctattgtatagttcttttataaatgtaaatatggaaataagagattttgacacatcattttcacttgtctgtattgagatattttccttgtaaaggttctctgtaaacttgagttgattttttgctccccatcttttttgtttcttgtctctctttctctgtctctgtccttctctcttgtaacgtgttatacaatgactcttgggcttgcttaaaaagacagatatagccacagatgcagggagtttgggcacaaaacacgtgcagtttaaagttggtgtgcgttaaaccaaaaataaaaggggggacataaacaacaaaataacccatatcaaagacacaaaattatgtaaatggaaatatatgtactaagtttcgaaaattttttgatgtcattataaacctatgtaaataatgtaagaaagtagacaccctttcagattaatcacaaaagtgccaagctcatgattttggttttcggttttgacaattttctttccctgtctttaatgtgaaaggaggataaacttaaagccttaaataaaaaaatttttttaaatgttaaaagcttgg

SEQ ID NO: 58860 - DNA, 2512 bp, Homo sapiens
ttctcagtgccttctgtattcagcttttcatagcagaacttgtcggaccctgcaggaaggatggagaccggtggattcagtgcagcattttggagtatagagactttttacagagaggaggtggagcctgccttttcaacaggccaacaaagctatttgagcccacggaatgtggaaatggatacgtggaagctggggaggagtgtgattgtggttttcatgtggaatgctatggattatgctgtaagaaatgttccctctccaacggggctcactgcagcgacgggccctgctgtaacaatacctcatgtctttttcagccacgagggtatgaatgccgggatgctgtgaacgagtgtgatattactgaatattgtactggagactctggtcagtgcccaccaaatcttcataagcaagacggatatgcatgcaatcaaaatcagggccgctgctacaatggcgagtgcaagaccagagacaaccagtgtcagtacatctggggaacaaaggctgcagggtctgacaagttctgctatgaaaagctgaatacagaaggcactgagaagggaaactgcgggaaggatggagaccggtggattcagtgcagcaaacatgatgtgttctgtggattcttactctgtaccaatcttactcgagctccacgtattggtcaacttcagggtgagatcattccaacttccttctaccatcaaggccgggtgattgactgcagtggtgcccatgtagttttagatgatgatacggatgtgggctatgtagaagatggaacgccatgtggcccgtctatgatgtgtttagatcggaagtgcctacaaattcaagccctaaatatgagcagctgtccactcgattccaagggtaaagtctgttcgggccatggggtgtgtagtaatgaagccacctgcatttgtgatttcacctgggcagggacagattgcagtatccgggatccagttaggaaccttcacccccccaaggatgaaggacccaagggtcctagtgccaccaatctcataataggctccatcgctggtgccatcctggtagcagctattgtccttgggggcacaggctggggatttaaaaatgtcaagaagagaaggttcgatcctactcagcaaggccccatctgaatcagctgcgctggatggacaccgccttgcactgttggattctgggtatgacatactcgcagcagtgttactggaactattaagtttgtaaacaaaacctttgggtggtaatgactacggagctaaagttggggtgacaaggatggggtaaaagaaaactgtctcttttggaaataatgtcaaagaacacctttcaccacctgtcagtaaacgggggagggggcaaaagaccatgctataaaaagaattgttccagaatcttttttttccctaatggacgaaggaacaacacacacacaaaaattaaatgcaataaaggaatcattaaaaaaaatagtaaatgattttttttccctcagcctgctggcacttaatatcttctaaatgatttggcatgatttttttttctttactaccgatgacaaactccagtggcatgaagatctaattttcaaaagggtaaaaactgcatggcatatatacaacaagctagcaagccaattctcagcaaaacctgcaacagaattcctaaagtgaagatgacagatgaacacaaagaagctgcctgggcctcttcacttaaacatgtccccacaccccatcctctcggagccccacttcttaccccccacctcccaccctctataatccccactccccattggagaccaggccagggcagaactccacggaccttgctcttgttgattcactttccccattgtgttttctcctggactgagcatcctttggaaatgggagctggaatttgaacaatgatgctattgtatagttcttttataaatgtaaatatggaaataagagattttgacacatcattttcacttgtctgtattgagatattttccttgtaaaggttctctgtaaacttgagttgattttttgctccccatcttttttgtttcttgtctctctttctctgtctctgtccttctctcttgtaacgtgttatacaatgactcttgggcttgcttaaaaagacagatatagccacagatgcagggagtttgggcacaaaacacgtgcagtttaaagttggtgtgcgttaaaccaaaaataaaaggggggacataaacaacaaaataacccatatcaaagacacaaaattatgtaaatggaaatatatgtactaagtttcgaaaattttttgatgtcattataaacctatgtaaataatgtaagaaagtagacaccctttcagattaatcacaaaagtgccaagctcatgattttggttttcggttttgacaattttctttccctgtctttaatgtgaaaggaggataaacttaaagccttaaataaaaaaatttttttaaatgttaaaagcttgg

SEQ ID NO: 58861 - DNA, 3766 bp, Homo sapiens
tcctctgcgtcccgccccgggagtggctgcgaggctaggcgagccgggaaagggggcgccgcccagccccgagccccgcgccccgtgccccgagcccggagccccctgcccgcggcggcaccatgcgcgccgagccggcgtgaccggctccgcccgcggccgccccgcagctagcccggcgctctcgccggccacacggagcggcgcccgggagctatgagccatgaagccgcccggcagcagctcgcggcagccgcccctggcgggctgcagccttgccggcgcttcctgcggcccccaacgcggccccgccggctcggtgcctgccagcgccccggcccgcacgccgccctgccgcctgcttctcgtccttctcctgctgcctccgctcgccgcctcgtcccggccccgcgcctggggggctgctgcgcccagcgctccgcattggaatgaaactgcagaaaaaaatttgggagtcctggcagatgaagacaatacattgcaacagaatagcagcagtaatatcagttacagcaatgcaatgcagaaagaaatcacactgccttcaagactcatatattacatcaaccaagactcggaaagcccttatcacgttcttgacacaaaggcaagacaccagcaaaaacataataaggctgtccatctggcccaggcaagcttccagattgaagccttcggctccaaattcattcttgacctcatactgaacaatggtttgttgtcttctgattatgtggagattcactacgaaaatgggaaaccacagtactctaagggtggagagcactgttactaccatggaagcatcagaggcgtcaaagactccaaggtggctctgtcaacctgcaatggacttcatggcatgtttgaagatgataccttcgtgtatatgatagagccactagagctggttcatgatgagaaaagcacaggtcgaccacatataatccagaaaaccttggcaggacagtattctaagcaaatgaagaatctcactatggaaagaggtgaccagtggccctttctctctgaattacagtggttgaaaagaaggaagagagcagtgaatccatcacgtggtatatttgaagaaatgaaatatttggaacttatgattgttaatgatcacaaaacgtataagaagcatcgctcttctcatgcacataccaacaactttgcaaagtccgtggtcaaccttgtggattctatttacaaggagcagctcaacaccagggttgtcctggtggctgtagagacctggactgagaaggatcagattgacatcaccaccaaccctgtgcagatgctccatgagttctcaaaataccggcagcgcattaagcagcatgctgatgctgtgcacctcatctcgcgggtgacatttcactataagagaagcagtctgagttactttggaggtgtctgttctcgcacaagaggagttggtgtgaatgagtatggtcttccaatggcagtggcacaagtattatcgcagagcctggctcaaaaccttggaatccaatgggaaccttctagcagaaagccaaaatgtgactgcacagaatcctggggtggctgcatcatggaggaaacaggggtgtcccattctcgaaaattttcaaagtgcagcattttggagtatagagactttttacagagaggaggtggagcctgccttttcaacaggccaacaaagctatttgagcccacggaatgtggaaatggatacgtggaagctggggaggagtgtgattgtggttttcatgtggaatgctatggattatgctgtaagaaatgttccctctccaacggggctcactgcagcgacgggccctgctgtaacaatacctcatgtctttttcagccacgagggtatgaatgccgggatgctgtgaacgagtgtgatattactgaatattgtactggagactctggtcagtgcccaccaaatcttcataagcaagacggatatgcatgcaatcaaaatcagggccgctgctacaatggcgagtgcaagaccagagacaaccagtgtcagtacatctggggaacaaaggctgcagggtctgacaagttctgctatgaaaagctgaatacagaaggcactgagaagggaaactgcgggaaggatggagaccggtggattcagtgcagcaaacatgatgtgttctgtggattcttactctgtaccaatcttactcgagctccacgtattggtcaacttcagggtgagatcattccaacttccttctaccatcaaggccgggtgattgactgcagtggtgcccatgtagttttagatgatgatacggatgtgggctatgtagaagatggaacgccatgtggcccgtctatgatgtgtttagatcggaagtgcctacaaattcaagccctaaatatgagcagctgtccactcgattccaagggtaaagtctgttcgggccatggggtgtgtagtaatgaagccacctgcatttgtgatttcacctgggcagggacagattgcagtatccgggatccagttaggaaccttcacccccccaaggatgaaggacccaagggtcctagtgccaccaatctcataataggctccatcgctggtgccatcctggtagcagctattgtccttgggggcacaggctggggatttaaaaatgtcaagaagagaaggttcgatcctactcagcaaggccccatctgaatcagctgcgctggatggacaccgccttgcactgttggattctgggtatgacatactcgcagcagtgttactggaactattaagtttgtaaacaaaacctttgggtggtaatgactacggagctaaagttggggtgacaaggatgggggtaaaaactgcatggcatatatacaacaagctagcaagccaattctcagcaaaacctgcaacagaattcctaaagtgaagatgacagatgaacacaaagaagctgcctgggcctcttcacttaaacatgtccccacaccccatcctctcggagccccacttcttaccccccacctcccaccctctataatccccactccccattggagaccaggccagggcagaactccacggaccttgctcttgttgattcactttccccattgtgttttctcctggactgagcatcctttggaaatgggagctggaatttgaacaatgatgctattgtatagttcttttataaatgtaaatatggaaataagagattttgacacatcattttcacttgtctgtattgagatattttccttgtaaaggttctctgtaaacttgagttgattttttgctccccatcttttttgtttcttgtctctctttctctgtctctgtccttctctcttgtaacgtgttatacaatgactcttgggcttgcttaaaaagacagatatagccacagatgcagggagtttgggcacaaaacacgtgcagtttaaagttggtgtgcgttaaaccaaaaataaaaggggggacataaacaacaaaataacccatatcaaagacacaaaattatgtaaatggaaatatatgtactaagtttcgaaaattttttgatgtcattataaacctatgtaaataatgtaagaaagtagacaccctttcagattaatcacaaaagtgccaagctcatgattttggttttcggttttgacaattttctttccctgtctttaatgtgaaaggaggataaacttaaagccttaaataaaaaaatttttttaaatgttaaaagcttgg

SEQ ID NO: 58862 - DNA, 2635 bp, Homo sapiens
tcctctgcgtcccgccccgggagtggctgcgaggctaggcgagccgggaaagggggcgccgcccagccccgagccccgcgccccgtgccccgagcccggagccccctgcccgcggcggcaccatgcgcgccgagccggcgtgaccggctccgcccgcggccgccccgcagctagcccggcgctctcgccggccacacggagcggcgcccgggagctatgagccatgaagccgcccggcagcagctcgcggcagccgcccctggcgggctgcagccttgccggcgcttcctgcggcccccaacgcggccccgccggctcggtgcctgccagcgccccggcccgcacgccgccctgccgcctgcttctcgtccttctcctgctgcctccgctcgccgcctcgtcccggccccgcgcctggggggctgctgcgcccagcgctccgcattggaatgaaactgcagaaaaaaatttgggagtcctggcagatgaagacaatacattgcaacagaatagcagcagtaatatcagttacagcaatgcaatgcagaaagaaatcacactgccttcaagactcatatattacatcaaccaagactcggaaagcccttatcacgttcttgacacaaaggcaagacaccagcaaaaacataataaggctgtccatctggcccaggcaagcttccagattgaagccttcggctccaaattcattcttgacctcatactgaacaatggtttgttgtcttctgattatgtggagattcactacgaaaatgggaaaccacagtactctaagggtggagagcactgttactaccatggaagcatcagaggcgtcaaagactccaaggtggctctgtcaacctgcaatggacttcatggcatgtttgaagatgataccttcgtgtatatgatagagccactagagctggttcatgatgagaaaagcacaggtcgaccacatataatccagaaaaccttggcaggacagtattctaagcaaatgaagaatctcactatggaaagaggtgaccagtggccctttctctctgaattacagtggttgaaaagaaggaagagagcagtgaatccatcacgtggtatatttgaagaaatgaaatatttggaacttatgattgttaatgatcacaaaacgtataagaagcatcgctcttctcatgcacataccaacaactttgcaaagtccgtggtcaaccttgtggattctatttacaaggagcagctcaacaccagggttgtcctggtggctgtagagacctggactgagaaggatcagattgacatcaccaccaaccctgtgcagatgctccatgagttctcaaaataccggcagcgcattaagcagcatgctgatgctgtgcacctcatctcgcgggtgacatttcactataagagaagcagtctgagttactttggaggtgtctgttctcgcacaagaggagttggtgtgaatgagtatggtcttccaatggcagtggcacaagtattatcgcagagcctggctcaaaaccttggaatccaatgggaaccttctagcagaaagccaaaatgtgactgcacagaatcctggggtggctgcatcatggaggaaacaggggtgtcccattctcgaaaattttcaaagtgcagcattttggagtatagagactttttacagagaggaggtggagcctgccttttcaacaggccaacaaagctatttgagcccacggaatgtggaaatggatacgtggaagctggggaggagtgtgattgtggttttcatgtggaatgctatggattatgctgtaagaaatgttccctctccaacggggctcactgcagcgacgggccctgctgtaacaatacctcatgtcttcatcctctcggagccccacttcttaccccccacctcccaccctctataatccccactccccattggagaccaggccagggcagaactccacggaccttgctcttgttgattcactttccccattgtgttttctcctggactgagcatcctttggaaatgggagctggaatttgaacaatgatgctattgtatagttcttttataaatgtaaatatggaaataagagattttgacacatcattttcacttgtctgtattgagatattttccttgtaaaggttctctgtaaacttgagttgattttttgctccccatcttttttgtttcttgtctctctttctctgtctctgtccttctctcttgtaacgtgttatacaatgactcttgggcttgcttaaaaagacagatatagccacagatgcagggagtttgggcacaaaacacgtgcagtttaaagttggtgtgcgttaaaccaaaaataaaaggggggacataaacaacaaaataacccatatcaaagacacaaaattatgtaaatggaaatatatgtactaagtttcgaaaattttttgatgtcattataaacctatgtaaataatgtaagaaagtagacaccctttcagattaatcacaaaagtgccaagctcatgattttggttttcggttttgacaattttctttccctgtctttaatgtgaaaggaggataaacttaaagccttaaataaaaaaatttttttaaatgttaaaagcttgg

SEQ ID NO: 58863 - DNA, 350 bp, Homo sapiens
ggacagattgcagtatccgggatccagttaggaaccttcacccccccaaggatgaaggacccaagggtttgtgtgattttggtttcaattcatggaatactgaattcgttgacactgttccaatgcaccagtataacattctaattgacttaagaggagacacataagaatatctgtttttgcctttaaagtatataatttatgttactgccaaattaaggattctgatatatcatatttttaaaatgtgtttgaattacttcttagtctagaactgagattgggaagaagtaaatatacacattttctttaatacagtattctttttctctttaaaccttattctcttt

SEQ ID NO: 58864 - DNA, 3986 bp, Homo sapiens
tcctctgcgtcccgccccgggagtggctgcgaggctaggcgagccgggaaagggggcgccgcccagccccgagccccgcgccccgtgccccgagcccggagccccctgcccgcggcggcaccatgcgcgccgagccggcgtgaccggctccgcccgcggccgccccgcagctagcccggcgctctcgccggccacacggagcggcgcccgggagctatgagccatgaagccgcccggcagcagctcgcggcagccgcccctggcgggctgcagccttgccggcgcttcctgcggcccccaacgcggccccgccggctcggtgcctgccagcgccccggcccgcacgccgccctgccgcctgcttctcgtccttctcctgctgcctccgctcgccgcctcgtcccggccccgcgcctggggggctgctgcgcccagcgctccgcattggaatgaaactgcagaaaaaaatttgggagtcctggcagatgaagacaatacattgcaacagaatagcagcagtaatatcagttacagcaatgcaatgcagaaagaaatcacactgccttcaagactcatatattacatcaaccaagactcggaaagcccttatcacgttcttgacacaaaggcaagacaccagcaaaaacataataaggctgtccatctggcccaggcaagcttccagattgaagccttcggctccaaattcattcttgacctcatactgaacaatggtttgttgtcttctgattatgtggagattcactacgaaaatgggaaaccacagtactctaagggtggagagcactgttactaccatggaagcatcagaggcgtcaaagactccaaggtggctctgtcaacctgcaatggacttcatggcatgtttgaagatgataccttcgtgtatatgatagagccactagagctggttcatgatgagaaaagcacaggtcgaccacatataatccagaaaaccttggcaggacagtattctaagcaaatgaagaatctcactatggaaagaggtgaccagtggccctttctctctgaattacagtggttgaaaagaaggaagagagcagtgaatccatcacgtggtatatttgaagaaatgaaatatttggaacttatgattgttaatgatcacaaaacgtataagaagcatcgctcttctcatgcacataccaacaactttgcaaagtccgtggtcaaccttgtggattctatttacaaggagcagctcaacaccagggttgtcctggtggctgtagagacctggactgagaaggatcagattgacatcaccaccaaccctgtgcagatgctccatgagttctcaaaataccggcagcgcattaagcagcatgctgatgctgtgcacctcatctcgcgggtgacatttcactataagagaagcagtctgagttactttggaggtgtctgttctcgcacaagaggagttggtgtgaatgagtatggtcttccaatggcagtggcacaagtattatcgcagagcctggctcaaaaccttggaatccaatgggaaccttctagcagaaagccaaaatgtgactgcacagaatcctggggtggctgcatcatggaggaaacaggggtgtcccattctcgaaaattttcaaagtgcagcattttggagtatagagactttttacagagaggaggtggagcctgccttttcaacaggccaacaaagctatttgagcccacggaatgtggaaatggatacgtggaagctggggaggagtgtgattgtggttttcatgtggaatgctatggattatgctgtaagaaatgttccctctccaacggggctcactgcagcgacgggccctgctgtaacaatacctcatgtctttttcagccacgagggtatgaatgccgggatgctgtgaacgagtgtgatattactgaatattgtactggagactctggtcagtgcccaccaaatcttcataagcaagacggatatgcatgcaatcaaaatcagggccgctgctacaatggcgagtgcaagaccagagacaaccagtgtcagtacatctggggaacaaaggctgcagggtctgacaagttctgctatgaaaagctgaatacagaaggcactgagaagggaaactgcgggaaggatggagaccggtggattcagtgcagcaaacatgatgtgttctgtggattcttactctgtaccaatcttactcgagctccacgtattggtcaacttcagggtgagatcattccaacttccttctaccatcaaggccgggtgattgactgcagtggtgcccatgtagttttagatgatgatacggatgtgggctatgtagaagatggaacgccatgtggcccgtctatgatgtgtttagatcggaagtgcctacaaattcaagccctaaatatgagcagctgtccactcgattccaagggtaaagtctgttcgggccatggggtgtgtagtaatgaagccacctgcatttgtgatttcacctgggcagggacagattgcagtatccgggatccagttaggaaccttcacccccccaaggatgaaggacccaaggaaatgtcaagaagagaaggttcgatcctactcagcaaggccccatctgaatcagctgcgctggatggacaccgccttgcactgttggattctgggtatgacatactcgcagcagtgttactggaactattaagtttgtaaacaaaacctttgggtggtaatgactacggagctaaagttggggtgacaaggatggggtaaaagaaaactgtctcttttggaaataatgtcaaagaacacctttcaccacctgtcagtaaacgggggagggggcaaaagaccatgctataaaaagaattgttccagaatcttttttttccctaatggacgaaggaacaacacacacacaaaaattaaatgcaataaaggaatcattaaaaaaaatagtaaatgattttttttccctcagcctgctggcacttaatatcttctaaatgatttggcatgatttttttttctttactaccgatgacaaactccagtggcatgaagatctaattttcaaaagggtaaaaactgcatggcatatatacaacaagctagcaagccaattctcagcaaaacctgcaacagaattcctaaagtgaagatgacagatgaacacaaagaagctgcctgggcctcttcacttaaacatgtccccacaccccatcctctcggagccccacttcttaccccccacctcccaccctctataatccccactccccattggagaccaggccagggcagaactccacggaccttgctcttgttgattcactttccccattgtgttttctcctggactgagcatcctttggaaatgggagctggaatttgaacaatgatgctattgtatagttcttttataaatgtaaatatggaaataagagattttgacacatcattttcacttgtctgtattgagatattttccttgtaaaggttctctgtaaacttgagttgattttttgctccccatcttttttgtttcttgtctctctttctctgtctctgtccttctctcttgtaacgtgttatacaatgactcttgggcttgcttaaaaagacagatatagccacagatgcagggagtttgggcacaaaacacgtgcagtttaaagttggtgtgcgttaaaccaaaaataaaaggggggacataaacaacaaaataacccatatcaaagacacaaaattatgtaaatggaaatatatgtactaagtttcgaaaattttttgatgtcattataaacctatgtaaataatgtaagaaagtagacaccctttcagattaatcacaaaagtgccaagctcatgattttggttttcggttttgacaattttctttccctgtctttaatgtgaaaggaggataaacttaaagccttaaataaaaaaatttttttaaatgttaaaagcttgg

SEQ ID NO: 58865 - DNA, 1514 bp, Homo sapiens
ctctggaactagcattattgtcattatcatcaccattctgtcatcatcatctgattaatattgtggattttccccctctgcttgcatcttcttttgactcactctggaagaaatgtcaagaagagaaggttcgatcctactcagcaaggccccatctgaatcagctgcgctggatggacaccgccttgcactgttggattctgggtatgacatactcgcagcagtgttactggaactattaagtttgtaaacaaaacctttgggtggtaatgactacggagctaaagttggggtgacaaggatggggtaaaagaaaactgtctcttttggaaataatgtcaaagaacacctttcaccacctgtcagtaaacgggggagggggcaaaagaccatgctataaaaagaattgttccagaatcttttttttccctaatggacgaaggaacaacacacacacaaaaattaaatgcaataaaggaatcattaaaaaaaatagtaaatgattttttttccctcagcctgctggcacttaatatcttctaaatgatttggcatgatttttttttctttactaccgatgacaaactccagtggcatgaagatctaattttcaaaagggtaaaaactgcatggcatatatacaacaagctagcaagccaattctcagcaaaacctgcaacagaattcctaaagtgaagatgacagatgaacacaaagaagctgcctgggcctcttcacttaaacatgtccccacaccccatcctctcggagccccacttcttaccccccacctcccaccctctataatccccactccccattggagaccaggccagggcagaactccacggaccttgctcttgttgattcactttccccattgtgttttctcctggactgagcatcctttggaaatgggagctggaatttgaacaatgatgctattgtatagttcttttataaatgtaaatatggaaataagagattttgacacatcattttcacttgtctgtattgagatattttccttgtaaaggttctctgtaaacttgagttgattttttgctccccatcttttttgtttcttgtctctctttctctgtctctgtccttctctcttgtaacgtgttatacaatgactcttgggcttgcttaaaaagacagatatagccacagatgcagggagtttgggcacaaaacacgtgcagtttaaagttggtgtgcgttaaaccaaaaataaaaggggggacataaacaacaaaataacccatatcaaagacacaaaattatgtaaatggaaatatatgtactaagtttcgaaaattttttgatgtcattataaacctatgtaaataatgtaagaaagtagacaccctttcagattaatcacaaaagtgccaagctcatgattttggttttcggttttgacaattttctttccctgtctttaatgtgaaaggaggataaacttaaagccttaaataaaaaaatttttttaaatgttaaaagcttgg

SEQ ID NO: 58866 - DNA, 239 bp, Homo sapiens
cttcactatcctccaaaccactacttaaaagagcaacatggaacttctatttctagtttgattactgtaaacatggaaattatgtataattttagacaatttagttaatatgactatttaaatgtatataaaattatcccttttggctgatggctgaatttttagaaaagatttccttaaaagttgaaagcttggtggtactagcagaggtctctctggatattttgaagtcgtaatgg

SEQ ID NO: 58867 - DNA, 373 bp, Homo sapiens
agttctcatgcatattcctatattctacaagcacactgattcctgcactatggccagccctgttcttgtggaattgaacctaagggcaagaagggcaagtcaacagttaggggtcatgtgatgagtgctgtaataggggatatatatggctcagaagtggcacagggtggtcagttcaattcagcaggggagagggctaagaagacttcacagagtgtcatatacttgagtgtggtttgtttatttgctatctattactgcctaagaaattattccaaaattttaacagagatttcaaaactccccatgccaaagctacggccatagcaattaaataagaatttctgggaataaactcagtcatcagctattt

SEQ ID NO: 58868 - DNA, 344 bp, Homo sapiens
acatctactaagttcaaggcctaggtgcataggattcatggagcttactgtctagtggggatctgacagggaaacagatgctctgatgcaatggtacataatcactggttcaaacttgcaccaagaaacagagaagactaatcctgtcatgcaacctccaaggaaggtacctttctttaacttcaagtcatctcaattgtaagagcattcattaaattcttttggtttggggcagtggaaagcaattctgactagtctagataaaacccaagaatttgttggaagactatggacacatctcacaaagtcagaagaaaaaatcagaatttaagaaggaacaaaaa

SEQ ID NO: 58869 - DNA, 2080 bp, Homo sapiens
ggaaatccagagggcaggggtggccggcacagcagacgtaccctccctcgctgcctgcctgcggcctgccctgcatgcaggatggccctgaggaaaggaggcctggccctggcgctgctgctgctgtcctgggtggcactgggcccccgcagcctggagggagcagaccccggaacgccgggggaagccgagggcccagcgtgcccggccgcctgtgtctgcagctacgatgacgacgcggatgagctcagcgtcttctgcagctccaggaacctcacgcgcctgcctgacggagtcccgggcggcacccaagccctgtggctggacggcaacaacctctcgtccgtccccccggcagccttccagaacctctccagcctgggcttcctcaacctgcagggcggccagctgggcagcctggagccacaggcgctgctgggcctagagaacctgtgccacctgcacctggagcggaaccagctgcgcagcctggcactcggcacgtttgcacacacgcccgcgctggcctcgctcggcctcagcaacaaccgtctgagcaggctggaggacgggctcttcgagggcctcggcagcctctgggacctcaacctcggctggaatagcctggcggtgctccccgatgcggcgttccgcggcctgggcagcctgcgcgagctggtgctggcgggcaacaggctggcctacctgcagcccgcgctcttcagcggcctggccgagctccgggagctggacctgagcaggaacgcgctgcgggccatcaaggcaaacgtgttcgtgcagctgccccggctccagaaactctacctggaccgcaacctcatcgctgccgtggccccgggcgccttcctgggcctgaaggcgctgcgatggctggacctgtcccacaaccgcgtggctggcctcctggaggacacgttccccggtctgctgggcctgcgtgtgctgcggctgtcccacaacgccatcgccagcctgcggccccgcaccttcaaggacctgcacttcctggaggagctgcagctgggccacaaccgcatccggcagctggctgagcgcagctttgagggcctggggcagcttgaggtgctcacgctagaccacaaccagctccaggaggtcaaggcgggcgctttcctcggcctcaccaacgtggcggtcatgaacctctctgggaactgtctccggaaccttccggagcaggtgttccggggcctgggcaagctgcacagcctgcacctggagggcagctgcctgggacgcatccgcccgcacaccttcaccggcctctcggggctccgccgactcttcctcaaggacaacggcctcgtgggcattgaggagcagagcctgtgggggctggcggagctgctggagctcgacctgacctccaaccagctcacgcacctgccccaccgcctcttccagggcctgggcaagctggagtacctgctgctctcccgcaaccgcctggcagagctgccggcggacgccctgggccccctgcagcgggccttctggctggacgtctcgcacaaccgcctggaggcattgcccaacagcctcttggcaccactggggcggctgcgctacctcagcctcaggaacaactcactgcggaccttcacgccgcagcccccgggcctggagcgcctgtggctggagggtaacccctgggactgtggctgccctctcaaggcgctgcgggacttcgccctgcagaaccccagtgctgtgccccgcttcgtccaggccatctgtgagggggacgattgccagccgcccgcgtacacctacaacaacatcacctgtgccagcccgcccgaggtcgtggggctcgacctgcgggacctcagcgaggcccactttgctccctgctgaccaggtccccggactcaagccccggactcaggcccccacctggctcaccttgtgctggggacaggtcctcagtgtcctcaggggcctgcccagtgcacttgctggaagacgcaagggcctgatggggtggaaggcatggcggcccccccagctgtcatcaattaaaggcaaaggcaatcga

SEQ ID NO: 58870 - DNA, 248 bp, Homo sapiens
ctacacctttctacagattctttgttccaaatgatattttaacaaagcttcagcctacaacagtcaggtaatactgatgaagaggctagcttcactgggaaaacaagacaaaacattacgtcagaggaggaggaacaggtgagtaggacagggttggagggtcatcaaatggataataataaactagaaattttctttttttttttctaggaggcccctgtaagtatttctatcaagagtgttactga

SEQ ID NO: 58871 - DNA, 321 bp, Homo sapiens
tgaatatagggttggactaagagtattctaggttaaagaaactgtgagcttagagttggcaaaacctcaaatggttttgcctgtggacagtgagtgatataccttggcttggagaggctgtgccctgtgtactccagaatctggcagttagagaagctgaaggggtgggttactgccttgaatacaggctgagatatttatagtgtagtcattaacagttgagcactgatcaatactgttttaattgattaatctttttgttgctggttttttccttgatgaattcctcttccctggttcctttcatacagtagggtactc

SEQ ID NO: 58872 - DNA, 550 bp, Homo sapiens
gatgtaattgacatctatagatgactttattaaacagtagcaggttacatgttcttctcaaagtcatataaaacatttacccacatagaccacattctgggctataaaatacaacttaacaacatttaaaagaatgaaaataatgtaatgtctactctcagaccacaatgaaattaaactagatattaataacagaaaggtagttggaaaatcccaatatacttggagattgaacaatacaattttatttgtttattcttctcaagagaaaattaaaatattttaaactaaatgaaaatgaaagccaggcatggtggtgcactcctgtagtgctactcgagaggctgaggtgggaggatcacttgagcccaggagttcgaggttatagtaagttatgatcgcaccactgcactccagcctgagcatcagagtgatatcctgtctctaaaaaagaaaaaaaaattatatgaaaaacacaacttaccaaatttgtgggatgcagtaaaagcagtgcttacagggaaatttttgtagcattgaatgcgtatat

SEQ ID NO: 58873 - DNA, 585 bp, Homo sapiens
gctggggaggtagcacaatttggcagcattcggttaaatatcacgttgaaaaccaactcggctttttaagaaacacctctcccaggagaacattatatacacacacaccgcatcaatattcgccgtccacatccgttctgccacccctcccagccccaacagagctttctctggaatgaaactaacaaaattcaagatcctcagtttgcatctctgttctgatggattacatgtctgataatcaaccagaatgtcaagtcaagaacaatgattgagtatcaagtgcatgttcactgggcatcaagtgcatattcattgcatgcaagggaggcttgtctggaagaggcctaatgagcaagaaatgttcacctcagctctcacgggaaagctgtttatggccccagtaatcaaactgagaggccagataatccaaagatgaaaatggacctcccaaatgggtcaagctgaagaccagccagccactccctgaccttcagagcttgccacgttagtaatgtgtataataaagtgttgctatcttaacatcatgggactattcaggatactttaaaatgtagcagtgaa

SEQ ID NO: 58874 - DNA, 490 bp, Homo sapiens
ccatttccctgggctattgcaatggtcttccaataagttttctcatatctagtcttttttcttctattcaccctgccttattagtgccagagttatccttccaaaacacagatatggtcaggtcatagcattactgaaaacattttcaaacttttaaagatttctcatattctagaaactcaagagttgttttttctctacagtttccccataataaagtatgagttttttaccattgacattctggcatattctgactccttctggtttttttcaccattgttcaattggcagaagaagtaagagttcctttgttctgatcgtttgtcactgtatttacatgtgtgagttctgtatagtagtctgacttacgtaaccaattagttgtgtatgtattagcatattgtgagactttgaggtgatgtcttagtcatatttataatccattataatgatcagattttaataaatgctgcttgatttgaattga

SEQ ID NO: 58875 - DNA, 551 bp, Homo sapiens
ataaagcgggacaacacagaacttcccagttacaccaggcatcctggcccaaagtttcccaaatccaggcggctagaggcccactgcttcccaactaccagctgagggggtccgtcccgagaagggagaagaggccgaagaggaaacatgaacttctatttactcctagcgagcagcattctgtgtgccttgattgtcttctggaaatatcgccgctttcagagaaacactggcgaaatgtcatcaaattcaactgctcttgcactagtgagaccctcttcttctgggttaattaacagcaatacagacaacaatcttgcagtctacgacctctctcgggatattttaaataatttcccacactcaatagccaggcagaagcgaatattggtaaacctcagtatggtggaaaacaagctggttgaactggaacatactctacttagcaagggtttcagaggtgcatcacctcaccggaaatccacctaaaagcgtacaggatgtaatgccagtggtggaaatcattaaagacactttgagtagattcattt

SEQ ID NO: 58876 - DNA, 774 bp, Homo sapiens
acgttaaaaaaaaacccagagtgactgacggttggacagttatatactcagacaacttttcccacaagtggggcaagtctgcttgcttacctgtgcatatatgtgctgtgtgcatgcacatgatgttgctcatgctttggatatgaatgtatgtgctcctttgatcatgttgggttcttgacacaatgtcatttttcagcattaaaattcccatcacctagcagaagtgttccctttaagatccatttccgcttggcttgttgtgcataaacattccattgggattgattgcttgtgtcaaattaattttttcccttcccaggaacagtgtctgccatgtgcaaaatggggggaaatccccaggcctctagccaaatgcaaagctcagatataggggtaaagtcaggcttgggtcaagaattgttctagataagccacagagcctgcacctggatacttaatgctaacctttccaatatgctttgtgactgtttctaggcaacaggaaaaccctaggctgggtagagatggctgcatatgagaggcttgggttttttcagcatcagctgcagtaccacatcctcctctatatcttccttttcctgctttgtttaaaaggctgcagaggctgggtgttgtggctcccacctataatcccagtactttgggaggccaaggtgggaggatcacttgagcccgggagttcaagaccaacatgggcaacatagcaagaccccatcacttaaaaataaaaataaaaataaaaataaaaat

SEQ ID NO: 58877 - DNA, 487 bp, Homo sapiens
ttcagtcttcaggtatagcctaaggaggttgttttttttggtttgtttttaacttggaaggtagatcgcataaaatatccccactctatctagattttaccagccactcaccgcttatgtttgtaagcttagtgtttctggacagatggagtagagagaggaattacccaccatcttgcattcttctccctttcttctctgcattaagaatggcagtgtagggccaggcagcgtggctcatacctataatcctagcactttgggaggccaaggtggatggatcacttgagctcaggagttcaagaccagcctaagcaacatggcgaaaccctgtctctactaaaaaatttttttaaattaaaaaaaaaattagccaggcttgggggcacatgcctgtagtcccagatacttggggagctgatgcaggaagatcacttgcacccaggggttcaaggctacagtgagccatgtttgtgccattgcactc

SEQ ID NO: 58878 - DNA, 590 bp, Homo sapiens
atgaaagttctgagctaattaagaaaaaaatacataaggtttatggacatcaaaatgtcaccttgatggttgatatggcagatcttgaagaatgtcatttttgtctggaggcaatctagtcctgaccccgaaatccttcccctccagtgagtctcagccagcataggactgagacagacttccctagtaagactgccctcttgagactcacaatactgaaagagaacaatggctgctctctatggagctgctgactcccagtagaaagggaagaagcatgccctgtttctccttacaacaaaggtaagtcattccactcctcatgggggtcaggaagtaagtgaacagcaagagaagctacacagactgcacccactattggaaagacacaccagccatggagaagtgtcctctcttttctcgagttaggaggcaaaaattatttatgtgaggacctgaaatccatggctattcgacatcacatctatccattgcacaaatatttatttgagcagctaccatgtgccacgtgtatatttgctgagaatgtacactctgtgttcatgccccttgaagtctgtgggtcacac

SEQ ID NO: 58879 - DNA, 1309 bp, Homo sapiens
ttgactaaactaataaagttatttaattgaccaaatttttatatgtagtttccaggagtcttaactataaaccacagatttcttctttcccctctgtcacccaccaccttctggtatacttatacagcctacttgcattattgtaattttaaaccattttcagtttcagatgctttagaaatagaccagttgtttttgtggtatattgcaacaacgggaagattatattaccaataaaatgagattaaaaaattagagcttttcccttaattacataatgtttacaaacttggtgtagatgtgaccgtgttattcataataacaatcctttgtgtggcacagggcatcatgggaaaataatggagtcccagggggtagaaggcactcttttttgaccagtttctgtctccaataaagcaggactatagggatcgtgcctgaccctgaaaaagtgttggagacttttatcttttactctttataactgtgttatttcccactagcctggactggaaagcagccttggactgcattggaaccctgactgctcggtttacagtaccaaggccccagttttctgagaacccacctcatcctagatcaagtctgctttagagtgcattttagaatgcacagtgacctgctaaaacagaaaaaggatgtgaatggatagtgacatgtatggatggcaggacttggcacctgaccatggcatttggggcttctctttccctttgaaatgcaccattactttaaaaacggatctaatatcagttattgattcaccttacgtatggccaaaatgttataatgcatgttttgcaagtgctttatgcaaatgcttagagcaatcagtgtggttttcttacccctgtcaaccacctctggttttctttcctcttttactgttttcttataaaagagaccttgagtatgcttctctcttctgaattgtattttgggtcttttatctccatataactctttatagtttgtattttgctgagaactttgatgtctggaacctacagttgatccttttttgtggagagcaagaaaaatctggatgtgctggtcaaggaatcctctgagaattatggacactgggggaggaaagtgtatgtcagggaggagaactagaaggagaatgtattattcacaggaagcctaagatgaaaaatattggcaaaagagattgggaaataggtagttatggaattcctaataactagggaatctgacctaagacctttgttttttcatgagtgtagtggaatttaaactgtgcatgttatacaaaaaaaaaaaa

SEQ ID NO: 58880 - DNA, 348 bp, Homo sapiens
cgagatgagagggaattcacacttgcaaagaaatagaagtagaatagatagcaattcacaattcattgtgtcccaaacttaagtggaaataaaagaaaaatggtacctatagcatttaacattatgtcactacatcttccatgtatacaaaatagacagctaattgtagaatgtggaccattttttactaatctgttatttaacagttgattattgagcaaacttatgtatcaggcatttaaaaattctaaagcacttggtgttaaacattgaaaaagatgttgtcccatccttcaaggagcttaattatgcaatcatcaatattttcaaaataaagccaattgtttt

SEQ ID NO: 58881 - DNA, 159 bp, Homo sapiens
gtgaaattaaatatagcattttatttggaacaagccatcctaactcaatttccctccccagcattgccacagagagaccttccatttggcagctgaaagatgcgctgagctctaggctggacgtaggacttctttccacgctcttggtaatgcatctgc

SEQ ID NO: 58882 - DNA, 522 bp, Homo sapiens
gctaatcccattcacaacggtcctaccatcatgacctcattacctcccaaagaccacacctccaaataccaccacattgccattaagcttcaacatatgaatttaagggggaaacaaacatccagtccattgcagattgttctgataatatgtgtgcccagggcattgcccccacagcaaagagcgacattggaaggcaaaccaatgtcaggtttcctaatgtgcacggagtcatccctggaagagtgagtccggtgatcttaccagctaattgcattgagctaccccaccttggggatctacctgccaaggagaacagaacaccactggctttgatacccatctctcaacaatgatggaagaatgctggaaatttacctgctctggtagctctctctaagttcatcttccttgtatggactttctttttttattgctctcaaatacttgtattattaaatatctcatttaaaatttctttaaaatacattaaaagtacatttaaagagtacattttaagag

SEQ ID NO: 58883 - DNA, 389 bp, Homo sapiens
cattggcaaccaagcagctgcccaaccagctcattatgacctaaaaagaaaaaaggagctttgcaaggaagctttgcaagcacgccagctcctgaatttcatgagcagtgggcagctgaatggtgagttctcgcctgagcttggcttgaaatgcacgtaagaatgaaaggggcctccagcacagtccacctcttgccactctgttatagtgctgtgccctgggatattcaggaaagttacgctgttccatcatctcctgcagccgagaaacacaattgattttcctggcctcatttctgttataaagaacaatttcccccagggatccccagagaactaaaatggagaaaatgtcattcatattttaccatgcaagccaaagcctaatt

SEQ ID NO: 58884 - DNA, 412 bp, Homo sapiens
gccttgagtttcttccaataaagcactgttacctgaaaaatgcccatcagaacagaattgctccacctttgaatggttctgtctataggaaagtcttttctaataggagcccaagtctcttttcctgcagctttcacacactggggccactctgaacaaatttagtggtttgacaggaatgattaggggtggggatgggactcagaaacctctgcagggtgcctagtaagtgctagacatcttgcatgcattaagtcgtaaaccagaaaactccagagagacctttgctgtggatattactgtcccatgttgcggatgaggaaaggggctctgggaagtctgcaggttgcccaggacacaggtccacccagctctcatctagcctgtcttctggtttcccttcagatggctg

SEQ ID NO: 58885 - DNA, 291 bp, Homo sapiens
tacctactagggtgacagtttgacaagggttaaaggtacactcccttattatcctcattcatcttctctgccttgcatactctgcattctattggtctgggggaaatgcctggagctgagacagctcagtggtagaaaaagtccgtttcccgctgtggtgttctgcggcagtgccagcctctctgcgtggcctagcactgccctgcccttcttagcattaggccctcattgtgggtagtgctgacaaaattgttcacaggcaaagcaaagcaaagcaagctcttaagcaga

SEQ ID NO: 58886 - DNA, 2198 bp, Homo sapiens
  misc_feature (513)..(513): n is a, c, g, or t
  misc_feature (808)..(808): n is a, c, g, or t
gtgtggagcttctgagatctgtggaggtttttctctgcaaatgcaggaagaaatcaggtggatggatgcataattatggccctgctcctggtctctttgctggcattcctgagcttgggctcaggatgtcatcatcggatctgtcactgctctaacagggtttttctctgccaagagagcaaggtgacagagattccttctgacctcccgaggaatgccattgaactgaggtttgtcctcaccaagcttcgagtcatccaaaaaggtgcattttcaggatttggggacctggagaaaatagagatctctcagaatgatgtcttggaggtgatagaggcagatgtgttctccaaccttcccaaattacatgaaattagaattgaaaaggccaacaacctgctctacatcaaccctgaggccttccagaaccttcccaaccttcaatatctgttaatatccaacacaggtattaagcaccttccagatgttcacaagattcattctctccaaaangttttacttgacattcaagataacataaacatccacacaattgaaagaaattctttcgtggggctgagctttgaaagtgtgattctatggctgaataagaatgggattcaagaaatacacaactgtgcattcaatggaacccaactagatgagctgaatctaagcgataataataatttagaagaattgcctaatgatgttttccacggagcctctggaccagtcattctctctgagcttcatccaatttgcaacaaatctattttaaggcaagaagttgattatatgactcagnctaggggtcagagatcctctctggcagaagacaatgagtccagctacagcagaggatttgacatgacgtacactgagtttgactatgacttatgcaatgaagtggttgacgtgacctgctcccctaagccagatgcattcaacccatgtgaagatatcatggggtacaacatcctcagagtcctgatatggtttatcagcatcctggccatcactgggaacatcatagtgctagtgatcctaactaccagccaatataaactcacagtccccaggttccttatgtgcaacctggcctttgctgatctctgcattggaatctacctgctgctcattgcatcagttgatatccataccaagagccaatatcacaactatgccattgactggcaaactggggcaggctgtgatgctgctggctttttcactgtctttgccagtgagctgtcagtctacactctgacagctatcaccttggaaagatggcataccatcacgcatgccatgcagctggactgcaaggtgcagctccgccatgctgccagtgtcatggtgatgggctggatttttgcttttgcagctgccctctttcccatctttggcatcagcagctacatgaaggtgagcatctgcctgcccatggatattgacagccctttgtcacagctgtatgtcatgtccctccttgtgctcaatgtcctggcctttgtggtcatctgtggctgctatatccacatctacctcacagtgcggaaccccaacatcgtgtcctcctctagtgacaccaggatcgccaagcgcatggccatgctcatcttcactgacttcctctgcatggcacccatttctttctttgccatttctgcctccctcaaggtgcccctcatcactgtgtccaaagcaaagattctgctggttctgtttcaccccatcaactcctgtgccaaccccttcctctatgccatctttaccaaaaactttcgcagagatttcttcattctgctgagcaagtgtggctgctatgaaatgcaagcccaaatttataggacagaaacttcatccactgtccacaacacccatccaaggaatggccactgctcttcagctcccagagtcaccagtggttccacttacatacttgtccctctaagtcatttagcccaaaactaaaacacaatgtgaaaatgtatctgagtattgaatgataattcagtccttgcctttgaagggtatgtcacaaggagctgacagtgcttctacacatttcatctaatttaatattcctggcatacctttaaggtaaattggtcaggaactattaattccatgtgatacattaggaagctgaattattagtaacaacaataataattaaagaatgcaatactgta

SEQ ID NO: 58887 - DNA, 2384 bp, Homo sapiens
  misc_feature (513)..(513): n is a, c, g, or t
  misc_feature (994)..(994): n is a, c, g, or t
gtgtggagcttctgagatctgtggaggtttttctctgcaaatgcaggaagaaatcaggtggatggatgcataattatggccctgctcctggtctctttgctggcattcctgagcttgggctcaggatgtcatcatcggatctgtcactgctctaacagggtttttctctgccaagagagcaaggtgacagagattccttctgacctcccgaggaatgccattgaactgaggtttgtcctcaccaagcttcgagtcatccaaaaaggtgcattttcaggatttggggacctggagaaaatagagatctctcagaatgatgtcttggaggtgatagaggcagatgtgttctccaaccttcccaaattacatgaaattagaattgaaaaggccaacaacctgctctacatcaaccctgaggccttccagaaccttcccaaccttcaatatctgttaatatccaacacaggtattaagcaccttccagatgttcacaagattcattctctccaaaangttttacttgacattcaagataacataaacatccacacaattgaaagaaattctttcgtggggctgagctttgaaagtgtgattctatggctgaataagaatgggattcaagaaatacacaactgtgcattcaatggaacccaactagatgagctgaatctaagcgataataataatttagaagaattgcctaatgatgttttccacggagcctctggaccagtcattctagatatttcaagaacaaggatccattccctgcctagctatggcttagaaaatcttaagaagctgagggccaggtcgacttacaacttaaaaaagctgcctactctggaaaagcttgtcgccctcatggaagccagcctcacctatcccagccattgctgtgcctttgcaaactggagacggcaaatctctgagcttcatccaatttgcaacaaatctattttaaggcaagaagttgattatatgactcagnctaggggtcagagatcctctctggcagaagacaatgagtccagctacagcagaggatttgacatgacgtacactgagtttgactatgacttatgcaatgaagtggttgacgtgacctgctcccctaagccagatgcattcaacccatgtgaagatatcatggggtacaacatcctcagagtcctgatatggtttatcagcatcctggccatcactgggaacatcatagtgctagtgatcctaactaccagccaatataaactcacagtccccaggttccttatgtgcaacctggcctttgctgatctctgcattggaatctacctgctgctcattgcatcagttgatatccataccaagagccaatatcacaactatgccattgactggcaaactggggcaggctgtgatgctgctggctttttcactgtctttgccagtgagctgtcagtctacactctgacagctatcaccttggaaagatggcataccatcacgcatgccatgcagctggactgcaaggtgcagctccgccatgctgccagtgtcatggtgatgggctggatttttgcttttgcagctgccctctttcccatctttggcatcagcagctacatgaaggtgagcatctgcctgcccatggatattgacagccctttgtcacagctgtatgtcatgtccctccttgtgctcaatgtcctggcctttgtggtcatctgtggctgctatatccacatctacctcacagtgcggaaccccaacatcgtgtcctcctctagtgacaccaggatcgccaagcgcatggccatgctcatcttcactgacttcctctgcatggcacccatttctttctttgccatttctgcctccctcaaggtgcccctcatcactgtgtccaaagcaaagattctgctggttctgtttcaccccatcaactcctgtgccaaccccttcctctatgccatctttaccaaaaactttcgcagagatttcttcattctgctgagcaagtgtggctgctatgaaatgcaagcccaaatttataggacagaaacttcatccactgtccacaacacccatccaaggaatggccactgctcttcagctcccagagtcaccagtggttccacttacatacttgtccctctaagtcatttagcccaaaactaaaacacaatgtgaaaatgtatctgagtattgaatgataattcagtccttgcctttgaagggtatgtcacaaggagctgacagtgcttctacacatttcatctaatttaatattcctggcatacctttaaggtaaattggtcaggaactattaattccatgtgatacattaggaagctgaattattagtaacaacaataataattaaagaatgcaatactgta

SEQ ID NO: 58888 - DNA, 353 bp, Homo sapiens
caggggatgattggagggaggttctttttggaggccaaagattgaggctcctggtcaccccctgatgatactaaagaaccctctttctagggaatacaagaaataatgtgggccccaacatcagaatgagaaaaatccagtctggccagaaactctcaactcgagattcatttccgatgccttctctagttgaaaaattaaatctgggccgggcgcggtggctcacacctgtaatcccagcactttgggaggctgaggcgggtggatcatgtggtcaagatatcgagaccatcgtggccaacatagtgaaaccccatctctacaaaaaatacaaaaattagctgggcatggtg

SEQ ID NO: 58889 - DNA, 913 bp, Homo sapiens
  misc_feature (711)..(711): n is a, c, g, or t
ctggtcattgtcggcctctgtctctggctgccctcggcctccaaggaacctgacaaccatgttcaggccagctctggggtctcagcaggtggtccgcaacatgacctctgagttcttcgctgcccagctccggtcccagatctctgaccacaccactcacccgatctcctactacaagcccgagttctacacgccggatgacgggggcactgctcacctgtctgtcgtcgcagaggacggcagtgctgtgtccgccaccagcaccatcaacctctatgggatcctgttcaataatgaatggacgacttcagctctcccagcattcaccaatgagtttggggcacccccctcacctgccaatttcatccagccagggaagcagccgctcttgtccatgtgcctgacgatcatggtgggccaggacggccaggtccggatggtggtgggagctgctgggggcacgcagatcaccacagacactgcactggccatcatctacaacctctggttcggctatgacgtgaagagggccgtggaggagccccggctgcacaacaagcttctgcccaacgtcacgacagtggagagaaacattgaccaggcagtgactgcagccctggagacccggcaccatcacacccagatcgcgtccaccttcatcgctgtggtgcaagccatcgtccgcacggctggtggctgggcagctgcctnggactccaggaaaggcggggaacctgctggctactgattgctccaggcagacaaggctgacaagcaatccagggacaagatactcaccaggatgaggaagaggactttgggggacgggcttcccctgtgagcagcagagcagcataataaatgaggccactgtgccaggctccaggtggcctccctggcctgtctccccact

SEQ ID NO: 58890 - DNA, 1147 bp, Homo sapiens
  misc_feature (945)..(945): n is a, c, g, or t
acctgaacaactaccgtgctgagctgatcgagcacccgctgaacatcagcctgggagacgcggtgctgtacatgcccagtgcgcggctcagcgggcccgtgctggccctcatcctcaacatcctcaaagggtacaacttctcccgggagagcgtggagacccccgagcagaagggcctgacgtaccaccgcatcgtagaggctttccggtttgcctacgccaagaggaccctgcttggggaccccaagtttgtggatgtgactgagtcaggccagctctggggtctcagcaggtggtccgcaacatgacctctgagttcttcgctgcccagctccggtcccagatctctgaccacaccactcacccgatctcctactacaagcccgagttctacacgccggatgacgggggcactgctcacctgtctgtcgtcgcagaggacggcagtgctgtgtccgccaccagcaccatcaacctctactttggctccaaggtctgctccccggtcagtgggatcctgttcaataatgaatggacgacttcagctctcccagcattcaccaatgagtttggggcacccccctcacctgccaatttcatccagccagggaagcagccgctcttgtccatgtgcctgacgatcatggtgggccaggacggccaggtccggatggtggtgggagctgctgggggcacgcagatcaccacagacactgcactggccatcatctacaacctctggttcggctatgacgtgaagagggccgtggaggagccccggctgcacaacaagcttctgcccaacgtcacgacagtggagagaaacattgaccaggcagtgactgcagccctggagacccggcaccatcacacccagatcgcgtccaccttcatcgctgtggtgcaagccatcgtccgcacggctggtggctgggcagctgcctnggactccaggaaaggcggggaacctgctggctactgattgctccaggcagacaaggctgacaagcaatccagggacaagatactcaccaggatgaggaagaggactttgggggacgggcttcccctgtgagcagcagagcagcataataaatgaggccactgtgccaggctccaggtggcctccctggcctgtctccccact

SEQ ID NO: 58891 - DNA, 1197 bp, Homo sapiens
  misc_feature (873)..(873): n is a, c, g, or t
  misc_feature (1197)..(1197): n is a, c, g, or t
ttcctgtttccgcctcggctcctcttcctgcgggaatccgggatccctacgtcccgcgtccccgagcgctcggagcctacgcgcccagcgctaccgaaacccagagtcctgcgccctggagtccccgcgccccggagcccgagcacccgggagtcccgagcctcgcgccccggagtgcccgagcctgcgccgccgcacccggataccccgcgtccccgcgactgtccgcgggcaacggcttctggatcctggtcttcctggggagctattacaattcctcggaacgggccttggctccactccgggacccacccaggcgcgtggggatctttctggactacgaggctggacatctctctttctacagtgccaccgatgggtcactgctattcatctttcccgagatccccttctcggggacgctgcggccctcttctcacccctgtccagcagcccgaccccgatgactatctgccggccgaaaggtgggtccggggacaccctggctccccagtgactcgggccctcctggaggagtcctgttgcctctcctgcccctccaggccactgagtgttttggccacttggaggacctgggaggagggagtgtgtcctttgagcaagaggaggaactcctggtgcctttctgagcctgcgtgggagaaccccaattctagcactccaggaaactgtgggagagtgtggggcaggctccgtcctccctgggagacccctccagccaccgggtgccacttaatgccaacagcccttaccaaagctgggagccccattgccccggcagctctggcctgtggttccagaagctgagaaaactccactggggcttgcagaatccagggttcacctaagtgncaagcaccggcagctgagcgagcccccgcaagactgggcgtcacccaagccgtgaaaaacgatagcgcggcgacaccgggaactgagacgacagccagcacaagactagaaccaccagccgaggaagcaccaccacacaccgacacgtgagccgccgacaaacgacaggcccactaaacagcgagaaccatagagcggacaaccgtccaacggcataccacgaggacacaaaccacacgacacacggataaaagcacgtttgcgtgccccactaagaagcacaccaacacgacggtcggcgacaacgcaccaccccaacagagn

SEQ ID NO: 58892 - DNA, 2730 bp, Homo sapiens
ttcctgtttccgcctcggctcctcttcctgcgggaatccgggatccctacgtcccgcgtccccgagcgctcggagcctacgcgcccagcgctaccgaaacccagagtcctgcgccctggagtccccgcgccccggagcccgagcacccgggagtcccgagcctcgcgccccggagtgcccgagcctgcgccgccgcacccggataccccgcgtccccgcgagctgccgaggccgcccgccgccgccccgcggacagtaccgccttcctcccctctgtccgcgccatggccgcccccgacctgtccaccaacctccaggaggaggccacctgcgccatctgcctcgactacttcacggatccggtgatgaccgactgcggccacaacttctgccgcgagtgcatccggcgctgctggggccagcccgagggcccgtacgcgtgccccgagtgccgcgagctgtccccgcagaggaacctgcggcccaaccgcccgcttgctaagatggccgagatggcgcggcgcctgcacccgccgtcgccggtcccgcagggcgtgtgccccgcgcaccgcgagccactggccgccttctgtggcgacgagctgcgcctcctgtgtgcggcctgcgagcgctctggggagcactgggcgcaccgcgtgcggccgctgcaggacgcggccgaagacctcaaggcgaagctggagaagtcactggagcatctccggaagcagatgcaggatgcgttgctgttccaagcccaggcggatgagacctgcgtcttgtggcagaagatggtggagagccagcggcagaacgtgctgggtgagttcgagcgtcttcgccgtttgctggcagaggaggagcagcagctgctgcagaggctggaggaggaggagctggaggtgctgccccggctgcgggagggcgcagcccacctaggccagcagagcgcccacctagctgagctcatcgccgagctcgagggccgctgccagctgcctgctctggggctgctgcaggacatcaaggacgccctgcgcagggtccaggatgtgaagctgcagcccccagaagttgtgcctatggagctgaggaccgtgtgcagggtcccgggactggtagagacactgcggaggtttcgaggggacgtgaccttggacccggacaccgccaaccctgagctgatcctgtctgaagacaggcggagcgtgcagcggggggacctacggcaggccctgccggacagcccagagcgctttgaccccggcccctgcgtgctgggccaggagcgcttcacctcaggccgccactactgggaggtggaggttggggaccgcaccagctgggccctgggggtgtgcagggagaacgtgaacaggaaggagaagggcgagctgtccgcgggcaacggcttctggatcctggtcttcctggggagctattacaattcctcggaacgggccttggctccactccgggacccacccaggcgcgtggggatctttctggactacgaggctggacatctctctttctacagtgccaccgatgggtcactgctattcatctttcccgagatccccttctcggggacgctgcggccctcttctcacccctgtccagcagcccgaccccgatgactatctgccggccgaaaggtgggtccggggacaccctggctccccagtgactcgggccctcctggaggagtcctgttgcctctcctgcccctccaggccactgagtgttttggccacttggaggacctgggaggagggagtgtgtcctttgagcaagaggaggaactcctggtgcctttctgagcctgcgtgggagaaccccaattctagcactccaggaaactgtgggagagtgtggggcaggctccgtcctccctgggagacccctccagccaccgggtgccacttaatgccaacagcccttaccaaagctgggagccccattgccccggcagctctggcctgtggttccagaagctgagaaaactccactggggcttgcagaatccagggttcacctaagctgcacagttcctgcagctttgccagccccctgaaagtcttgtgtaccccacctctgaagatgctgggggaggcagctgggatgggagccagccccatgcctgtctgtgaccccacagtgggtgagagcccgtcacagtcctgggtgtggctgctctggaagaattaggaggcagccataataagagtcttcagagagatgatgggaggggccagtgaggacaggaacagagagtagatgtcctataataaaggggcttctgggaggtgcctgggcacagatgtctgttcagcaggtgtgtgggcctagaggagagagcagagcccagaaatgtcttttgcaggcccacgttctgacttgaagctttcgtgggcatgttgccattgggttttgcccttgcaaaggcttcctaggtctccagtggcccctcaggacccagggtcccagctgctgcttggggatgtgcactgctggccgccggccttgcagtctctctaccctggggaggaacagtggcttctcagagcctggggcatacagaagaaggcaggagttgatttttgtgttgggtttggggtttctttgtcctcaaggtactgttctgtttctctttacccctctgctttatttattgtaagcattcccacgttaaataaactttggctgttgtctacaagtcatcctgct

SEQ ID NO: 58893 - DNA, 1842 bp, Homo sapiens
ttcctgtttccgcctcggctcctcttcctgcgggaatccgggatccctacgtcccgcgtccccgagcgctcggagcctacgcgcccagcgctaccgaaacccagagtcctgcgccctggagtccccgcgccccggagcccgagcacccgggagtcccgagcctcgcgccccggagtgcccgagcctgcgccgccgcacccggataccccgcgtccccgcgagctgccgaggccgcccgccgccgccccgcggacagtaccgccttcctcccctctgtccgcgccatggccgcccccgacctgtctgaagacaggcggagcgtgcagcggggggacctacggcaggccctgccggacagcccagagcgctttgaccccggcccctgcgtgctgggccaggagcgcttcacctcaggccgccactactgggaggtggaggttggggaccgcaccagctgggccctgggggtgtgcagggagaacgtgaacaggaaggagaagggcgagctgtccgcgggcaacggcttctggatcctggtcttcctggggagctattacaattcctcggaacgggccttggctccactccgggacccacccaggcgcgtggggatctttctggactacgaggctggacatctctctttctacagtgccaccgatgggtcactgctattcatctttcccgagatccccttctcggggacgctgcggccctcttctcacccctgtccagcagcccgaccccgatgactatctgccggccgaaaggtgggtccggggacaccctggctccccagtgactcgggccctcctggaggagtcctgttgcctctcctgcccctccaggccactgagtgttttggccacttggaggacctgggaggagggagtgtgtcctttgagcaagaggaggaactcctggtgcctttctgagcctgcgtgggagaaccccaattctagcactccaggaaactgtgggagagtgtggggcaggctccgtcctccctgggagacccctccagccaccgggtgccacttaatgccaacagcccttaccaaagctgggagccccattgccccggcagctctggcctgtggttccagaagctgagaaaactccactggggcttgcagaatccagggttcacctaagctgcacagttcctgcagctttgccagccccctgaaagtcttgtgtaccccacctctgaagatgctgggggaggcagctgggatgggagccagccccatgcctgtctgtgaccccacagtgggtgagagcccgtcacagtcctgggtgtggctgctctggaagaattaggaggcagccataataagagtcttcagagagatgatgggaggggccagtgaggacaggaacagagagtagatgtcctataataaaggggcttctgggaggtgcctgggcacagatgtctgttcagcaggtgtgtgggcctagaggagagagcagagcccagaaatgtcttttgcaggcccacgttctgacttgaagctttcgtgggcatgttgccattgggttttgcccttgcaaaggcttcctaggtctccagtggcccctcaggacccagggtcccagctgctgcttggggatgtgcactgctggccgccggccttgcagtctctctaccctggggaggaacagtggcttctcagagcctggggcatacagaagaaggcaggagttgatttttgtgttgggtttggggtttctttgtcctcaaggtactgttctgtttctctttacccctctgctttatttattgtaagcattcccacgttaaataaactttggctgttgtctacaagtcatcctgct

SEQ ID NO: 58894 - DNA, 1213 bp, Homo sapiens
gaagacagctcagaggaggtggacagcaccgatgggtcactgctattcatctttcccgagatccccttctcggggacgctgcggccctcttctcacccctgtccagcagcccgaccccgatgactatctgccggccgaaaggtgggtccggggacaccctggctccccagtgactcgggccctcctggaggagtcctgttgcctctcctgcccctccaggccactgagtgttttggccacttggaggacctgggaggagggagtgtgtcctttgagcaagaggaggaactcctggtgcctttctgagcctgcgtgggagaaccccaattctagcactccaggaaactgtgggagagtgtggggcaggctccgtcctccctgggagacccctccagccaccgggtgccacttaatgccaacagcccttaccaaagctgggagccccattgccccggcagctctggcctgtggttccagaagctgagaaaactccactggggcttgcagaatccagggttcacctaagctgcacagttcctgcagctttgccagccccctgaaagtcttgtgtaccccacctctgaagatgctgggggaggcagctgggatgggagccagccccatgcctgtctgtgaccccacagtgggtgagagcccgtcacagtcctgggtgtggctgctctggaagaattaggaggcagccataataagagtcttcagagagatgatgggaggggccagtgaggacaggaacagagagtagatgtcctataataaaggggcttctgggaggtgcctgggcacagatgtctgttcagcaggtgtgtgggcctagaggagagagcagagcccagaaatgtcttttgcaggcccacgttctgacttgaagctttcgtgggcatgttgccattgggttttgcccttgcaaaggcttcctaggtctccagtggcccctcaggacccagggtcccagctgctgcttggggatgtgcactgctggccgccggccttgcagtctctctaccctggggaggaacagtggcttctcagagcctggggcatacagaagaaggcaggagttgatttttgtgttgggtttggggtttctttgtcctcaaggtactgttctgtttctctttacccctctgctttatttattgtaagcattcccacgttaaataaactttggctgttgtctacaagtcatcctgct

SEQ ID NO: 58895 - DNA, 2327 bp, Homo sapiens
ttcctgtttccgcctcggctcctcttcctgcgggaatccgggatccctacgtcccgcgtccccgagcgctcggagcctacgcgcccagcgctaccgaaacccagagtcctgcgccctggagtccccgcgccccggagcccgagcacccgggagtcccgagcctcgcgccccggagtgcccgagcctgcgccgccgcacccggataccccgcgtccccgcgagctgccgaggccgcccgccgccgccccgcggacagtaccgccttcctcccctctgtccgcgccatggccgcccccgacctgtccaccaacctccaggaggaggccacctgcgccatctgcctcgactacttcacggatccggtgatgaccgactgcggccacaacttctgccgcgagtgcatccggcgctgctggggccagcccgagggcccgtacgcgtgccccgagtgccgcgagctgtccccgcagaggaacctgcggcccaaccgcccgcttgctaagatggccgagatggcgcggcgcctgcacccgccgtcgccggtcccgcagggcgtgtgccccgcgcaccgcgagccactggccgccttctgtggcgacgagctgcgcctcctgtgtgcggcctgcgagcgctctggggagcactgggcgcaccgcgtgcggccgctgcaggacgcggccgaagacctcaaggacatcaaggacgccctgcgcaggtacgaacccagcctctcctggagggggggcaggagggagtggggtgggacccagctgttggccatggcgacaacacctgggttgtcccctctagggtccaggatgtgaagctgcagcccccagaagttgtgcctatggagctgaggaccgtgtgcagggtcccgggactggtagagacactgcggaggtttcgaggtaggtgtggaggccccaggtggggagatgactccaggaggggacctgccaaggacctgggcagccagccacgtgttctgtgccctgccactgccagctccaaactcacagtgtcatggtggtgggttgttgggaaaacgtcctctgctcatgcttctgacatcagttgtgtgggtattttcacaccaaacaattcttcaacttctggaaacgaattgggtatccaaggattccattcagcattgaacagaattgccagtgctgacactacaggagttagtacagaccccacagattaagggctcagtcccataagactgcccccacttcagatgccagtcacaacttccaggggctgcccatacttctgttccctcagcgcctctgcagatgtgagcattcgctagcacagcccatggaactcagaagagcactttacttactgtcattggtttattgtgaaggataccactcaggaagagccaaatggaagagacacatgggcaaagcctggggaagggctcagagctttcccaccctccctgggtgcaccttcccagcacctcagtgtgctcaccaacctggaaactccctgagccccaagagctgtttaggtgtctttgtggaggttccattacatggttatgattgattaaatcattggtcattggtgatggggctcaacctcagacccctttccccttcctgaggtcagaggctggggctgagtgttcccgccctctactgacaggattggtctttctggtggctggccttatgctgggctctcaggtccccacctcagccactgcagtggcatcaactcaggtgtgatggaaaggggcatcttatgatagcacaagatgcttctatcagtcaggaaattcccagggttctgtgagctctgcgccaggaactgggcacaaaacccaaatctgagtcttgtatcacagtcacccaaaggaagtactatcctcagctcttgctagcaggtcaggagcctgttgtgtaggaactgtgtgcaggcctccagaggtggatagatctgaaatcggagtggtcagggttgggacagctgccctaattcacatccttcatttggagattgaaaggaaaaacagactggatgcattggctcacctctgtaatcccagcactttgagaggctcaggcgggaggattgcttgaggccatcagttcaagaccaacccgggaaacatagcaagactcccatctctacaaataaaaaacaaaaaaatgagccagccatggtggcacacgcctgtaatcccagcagcttgggaggatctgaggcgggaggatcatttgagcccaggagatcaaggctgcagtgagccatgatcgcaccactgcactgcagcctggggccacagagcaagaccctgcctctttaaa

SEQ ID NO: 58896 - DNA, 265 bp, Homo sapiens
gtgctcctgggcgggggtggcgtgcaggggcgtcggggagccggggactggggaggcctgggcgggtgggaggtttgggggactgctccgggagtaatctgtctctgtctagggcggggagctcaggatgcagcctgctgtgggcctgtgaggggggtgtcgcgcagggtggctgtgggggctcatgacacagcctgtttcaaccaggccccttgaggctgggaccatggccgccaatgagaccctgctctcgggggtgaggggc

SEQ ID NO: 58897 - DNA, 1802 bp, Homo sapiens
ggcacgaggcgagactctggcatgctaactagctgagctcatcgccgagctcgagggccgctgccagctgcctgctctggggctgctgcaggacatcaaggacgccctgcgcagggtccaggatgtgaagctgcagcccccagaagttgtgcctatggagctgaggaccgtgtgcagggtcccgggactggtagagacactgcggaggtttcgaggggacgtgaccttggacccggacaccgccaaccctgagctgatcctgtctgaagacaggcggagcgtgcagcggggggacctacggcaggccctgccggacagcccagagcgctttgaccccggcccctgcgtgctgggccaggagcgcttcacctcaggccgccactactgggaggtggaggttggggaccgcaccagctgggccctgggggtgtgcagggagaacgtgaacaggaaggagaagggcgagctgtccgcgggcaacggcttctggatcctggtcttcctggggagctattacaattcctcggaacgggccttggctccactccgggacccacccaggcgcgtggggatctttctggactacgaggctggacatctctctttctacagtgccaccgatgggtcactgctattcatctttcccgagatccccttctcggggacgctgcggccctcttctcacccctgtccagcagcccgaccccgatgactatctgccggccgaaaggtgggtccggggacaccctggctccccagtgactcgggccctcctggaggagtcctgttgcctctcctgcccctccaggccactgagtgttttggccacttggaggacctgggaggagggagtgtgtcctttgagcaagaggaggaactcctggtgcctttctgagcctgcgtgggagaaccccaattctagcactccaggaaactgtgggagagtgtggggcaggctccgtcctccctgggagacccctccagccaccgggtgccacttaatgccaacagcccttaccaaagctgggagccccattgccccggcagctctggcctgtggttccagaagctgagaaaactccactggggcttgcagaatccagggttcacctaagctgcacagttcctgcagctttgccagccccctgaaagtcttgtgtaccccacctctgaagatgctgggggaggcagctgggatgggagccagccccatgcctgtctgtgaccccacagtgggtgagagcccgtcacagtcctgggtgtggctgctctggaagaattaggaggcagccataataagagtcttcagagagatgatgggaggggccagtgaggacaggaacagagagtagatgtcctataataaaggggcttctgggaggtgcctgggcacagatgtctgttcagcaggtgtgtgggcctagaggagagagcagagcccagaaatgtcttttgcaggcccacgttctgacttgaagctttcgtgggcatgttgccattgggttttgcccttgcaaaggcttcctaggtctccagtggcccctcaggacccagggtcccagctgctgcttggggatgtgcactgctggccgccggccttgcagtctctctaccctggggaggaacagtggcttctcagagcctggggcatacagaagaaggcaggagttgatttttgtgttgggtttggggtttctttgtcctcaaggtactgttctgtttctctttacccctctgctttatttattgtaagcattcccacgttaaataaactttggctgttgtctacaagtcatcctgct

SEQ ID NO: 58898 - DNA, 2494 bp, Homo sapiens
ttcctgtttccgcctcggctcctcttcctgcgggaatccgggatccctacgtcccgcgtccccgagcgctcggagcctacgcgcccagcgctaccgaaacccagagtcctgcgccctggagtccccgcgccccggagcccgagcacccgggagtcccgagcctcgcgccccggagtgcccgagcctgcgccgccgcacccggataccccgcgtccccgcgagctgccgaggccgcccgccgccgccccgcggacagtaccgccttcctcccctctgtccgcgccatggccgcccccgacctgtccaccaacctccaggaggaggccacctgcgccatctgcctcgactacttcacggatccggtgatgaccgactgcggccacaacttctgccgcgagtgcatccggcgctgctggggccagcccgagggcccgtacgcgtgccccgagtgccgcgagctgtccccgcagaggaacctgcggcccaaccgcccgcttgctaagatggccgagatggcgcggcgcctgcacccgccgtcgccggtcccgcagggcgtgtgccccgcgcaccgcgagccactggccgccttctgtggcgacgagctgcgcctcctgtgtgcggcctgcgagcgctctggggagcactgggcgcaccgcgtgcggccgctgcaggacgcggccgaagacctcaaggcgaagctggagaagtcactggagcatctccggaagcagatgcaggatgcgttgctgttccaagcccaggcggatgagacctgcgtcttgtggcagctgggttgtcccctctagggtccaggatgtgaagctgcagcccccagaagttgtgcctatggagctgaggaccgtgtgcagggtcccgggactggtagagacactgcggaggtttcgaggggacgtgaccttggacccggacaccgccaaccctgagctgatcctgtctgaagacaggcggagcgtgcagcggggggacctacggcaggccctgccggacagcccagagcgctttgaccccggcccctgcgtgctgggccaggagcgcttcacctcaggccgccactactgggaggtggaggttggggaccgcaccagctgggccctgggggtgtgcagggagaacgtgaacaggaaggagaagggcgagctgtccgcgggcaacggcttctggatcctggtcttcctggggagctattacaattcctcggaacgggccttggctccactccgggacccacccaggcgcgtggggatctttctggactacgaggctggacatctctctttctacagtgccaccgatgggtcactgctattcatctttcccgagatccccttctcggggacgctgcggccctcttctcacccctgtccagcagcccgaccccgatgactatctgccggccgaaaggtgggtccggggacaccctggctccccagtgactcgggccctcctggaggagtcctgttgcctctcctgcccctccaggccactgagtgttttggccacttggaggacctgggaggagggagtgtgtcctttgagcaagaggaggaactcctggtgcctttctgagcctgcgtgggagaaccccaattctagcactccaggaaactgtgggagagtgtggggcaggctccgtcctccctgggagacccctccagccaccgggtgccacttaatgccaacagcccttaccaaagctgggagccccattgccccggcagctctggcctgtggttccagaagctgagaaaactccactggggcttgcagaatccagggttcacctaagctgcacagttcctgcagctttgccagccccctgaaagtcttgtgtaccccacctctgaagatgctgggggaggcagctgggatgggagccagccccatgcctgtctgtgaccccacagtgggtgagagcccgtcacagtcctgggtgtggctgctctggaagaattaggaggcagccataataagagtcttcagagagatgatgggaggggccagtgaggacaggaacagagagtagatgtcctataataaaggggcttctgggaggtgcctgggcacagatgtctgttcagcaggtgtgtgggcctagaggagagagcagagcccagaaatgtcttttgcaggcccacgttctgacttgaagctttcgtgggcatgttgccattgggttttgcccttgcaaaggcttcctaggtctccagtggcccctcaggacccagggtcccagctgctgcttggggatgtgcactgctggccgccggccttgcagtctctctaccctggggaggaacagtggcttctcagagcctggggcatacagaagaaggcaggagttgatttttgtgttgggtttggggtttctttgtcctcaaggtactgttctgtttctctttacccctctgctttatttattgtaagcattcccacgttaaataaactttggctgttgtctacaagtcatcctgct

SEQ ID NO: 58899 - DNA, 1557 bp, Homo sapiens
ttcctgtttccgcctcggctcctcttcctgcgggaatccgggatccctacgtcccgcgtccccgagcgctcggagcctacgcgcccagcgctaccgaaacccagagtcctgcgccctggagtccccgcgccccggagcccgagcacccgggagtcccgagcctcgcgccccggagtgcccgagcctgcgccgccgcacccggataccccgcgtccccgcgactgtccgcgggcaacggcttctggatcctggtcttcctggggagctattacaattcctcggaacgggccttggctccactccgggacccacccaggcgcgtggggatctttctggactacgaggctggacatctctctttctacagtgccaccgatgggtcactgctattcatctttcccgagatccccttctcggggacgctgcggccctcttctcacccctgtccagcagcccgaccccgatgactatctgccggccgaaaggtgggtccggggacaccctggctccccagtgactcgggccctcctggaggagtcctgttgcctctcctgcccctccaggccactgagtgttttggccacttggaggacctgggaggagggagtgtgtcctttgagcaagaggaggaactcctggtgcctttctgagcctgcgtgggagaaccccaattctagcactccaggaaactgtgggagagtgtggggcaggctccgtcctccctgggagacccctccagccaccgggtgccacttaatgccaacagcccttaccaaagctgggagccccattgccccggcagctctggcctgtggttccagaagctgagaaaactccactggggcttgcagaatccagggttcacctaagctgcacagttcctgcagctttgccagccccctgaaagtcttgtgtaccccacctctgaagatgctgggggaggcagctgggatgggagccagccccatgcctgtctgtgaccccacagtgggtgagagcccgtcacagtcctgggtgtggctgctctggaagaattaggaggcagccataataagagtcttcagagagatgatgggaggggccagtgaggacaggaacagagagtagatgtcctataataaaggggcttctgggaggtgcctgggcacagatgtctgttcagcaggtgtgtgggcctagaggagagagcagagcccagaaatgtcttttgcaggcccacgttctgacttgaagctttcgtgggcatgttgccattgggttttgcccttgcaaaggcttcctaggtctccagtggcccctcaggacccagggtcccagctgctgcttggggatgtgcactgctggccgccggccttgcagtctctctaccctggggaggaacagtggcttctcagagcctggggcatacagaagaaggcaggagttgatttttgtgttgggtttggggtttctttgtcctcaaggtactgttctgtttctctttacccctctgctttatttattgtaagcattcccacgttaaataaactttggctgttgtctacaagtcatcctgct

SEQ ID NO: 58900 - DNA, 2559 bp, Homo sapiens
ttcctgtttccgcctcggctcctcttcctgcgggaatccgggatccctacgtcccgcgtccccgagcgctcggagcctacgcgcccagcgctaccgaaacccagagtcctgcgccctggagtccccgcgccccggagcccgagcacccgggagtcccgagcctcgcgccccggagtgcccgagcctgcgccgccgcacccggataccccgcgtccccgcgagctgccgaggccgcccgccgccgccccgcggacagtaccgccttcctcccctctgtccgcgccatggccgcccccgacctgtccaccaacctccaggaggaggccacctgcgccatctgcctcgactacttcacggatccggtgatgaccgactgcggccacaacttctgccgcgagtgcatccggcgctgctggggccagcccgagggcccgtacgcgtgccccgagtgccgcgagctgtccccgcagaggaacctgcggcccaaccgcccgcttgctaagatggccgagatggcgcggcgcctgcacccgccgtcgccggtcccgcagggcgtgtgccccgcgcaccgcgagccactggccgccttctgtggcgacgagctgcgcctcctgtgtgcggcctgcgagcgctctggggagcactgggcgcaccgcgtgcggccgctgcaggacgcggccgaagacctcaaggcgaagctggagaagtcactggagcatctccggaagcagatgcaggatgcgttgctgttccaagcccaggcggatgagacctgcgtcttgtggcagaagatggtggagagccagcggcagaacgtgctgggtgagttcgagcgtcttcgccgtttgctggcagaggaggagcagcagctgctgcagaggctggaggaggaggagctggaggtgctgccccggctgcgggagggcgcagcccacctaggccagcagagcgcccacctagctgagctcatcgccgagctcgagggccgctgccagctgcctgctctggggctgctgcaggacatcaaggacgccctgcgcagggtccaggatgtgaagctgcagcccccagaagttgtgcctatggagctgaggaccgtgtgcagggtcccgggactggtagagacactgcggaggtttcgaggtaggtgtggaggccccaggtggggagatgactccaggaggggacctgccaaggacctgggcagccagccacgtgttctgtgccctgccactgccagctccaaactcacagtgtcatggtggtgggttgttgggaaaacgtcctctgctcatgcttctgacatcagttgtgtgggtattttcacaccaaacaattcttcaacttctggaaacgaattgggtatccaaggattccattcagcattgaacagaattgccagtgctgacactacaggagttagtacagaccccacagattaagggctcagtcccataagactgcccccacttcagatgccagtcacaacttccaggggctgcccatacttctgttccctcagcgcctctgcagatgtgagcattcgctagcacagcccatggaactcagaagagcactttacttactgtcattggtttattgtgaaggataccactcaggaagagccaaatggaagagacacatgggcaaagcctggggaagggctcagagctttcccaccctccctgggtgcaccttcccagcacctcagtgtgctcaccaacctggaaactccctgagccccaagagctgtttaggtgtctttgtggaggttccattacatggttatgattgattaaatcattggtcattggtgatggggctcaacctcagacccctttccccttcctgaggtcagaggctggggctgagtgttcccgccctctactgacaggattggtctttctggtggctggccttatgctgggctctcaggtccccacctcagccactgcagtggcatcaactcaggtgtgatggaaaggggcatcttatgatagcacaagatgcttctatcagtcaggaaattcccagggttctgtgagctctgcgccaggaactgggcacaaaacccaaatctgagtcttgtatcacagtcacccaaaggaagtactatcctcagctcttgctagcaggtcaggagcctgttgtgtaggaactgtgtgcaggcctccagaggtggatagatctgaaatcggagtggtcagggttgggacagctgccctaattcacatccttcatttggagattgaaaggaaaaacagactggatgcattggctcacctctgtaatcccagcactttgagaggctcaggcgggaggattgcttgaggccatcagttcaagaccaacccgggaaacatagcaagactcccatctctacaaataaaaaacaaaaaaatgagccagccatggtggcacacgcctgtaatcccagcagcttgggaggatctgaggcgggaggatcatttgagcccaggagatcaaggctgcagtgagccatgatcgcaccactgcactgcagcctggggccacagagcaagaccctgcctctttaaa

SEQ ID NO: 58901 - DNA, 1067 bp, Homo sapiens
tcttctggatagtctgaagcatcgggagtggggagtgaatgatcctttgctgcctaactacctcaacggcttcgagtgtttcgtctgtgactacgaactggctcggctggatgccgagaaagcccacgcggcctctcccggggacagccccgtctttgagccccacattgcccagccctcacacatggactgcccagtgcccacacctggctttggcaatgtggaagagattcctgagaatgacagttggaaagagatgtggctgcaagattattggcaaggtctggaccagggggaagctctcactgccatgatccacaacaatgaaacagagcagacgaaattttgggattacctacatgaaatcttcatgaagaggcaacatctctaagtgcccttgcaagagcctttaacttggcggagctaaggagatcttattctaccatgggacataaggagcatccactgcacaaacccttaatgaacactgtcttttcatggattcaaggaattccagttttatctattaagattttatcttaatgatgagtagccaaggtctaacatagggcctctcctcaaggagagatggagggatacaattcttggttcagtgggaaacagaaccctaaaacatccatttgattcaaggtgctggtccaacagagtttttaaactactcacttctttatttcatcctttcgactgtacttgattaccagtgaagtaagatgggtcaggttacgacttacaacttttgttctattccccagactcctcattattcagtacatttcccaataatctctttttctcatctcttgctttataaattgttacgttggtggagaagcaaaacatttggtgagttgtattctggttttccggagttggatttttttatattatatactttcatgtcaaacttctattttacttatttatttatttttttaaaatattttttgtagagatgaggttttgccacattgcccaggttggtctccaactcctggatcaagcaatccatccgccttgacctcccagagtgctgggtttacaggcat

SEQ ID NO: 58902 - DNA, 1943 bp, Homo sapiens
tttttggctttttctggccgggcgtagtggcttatgcctgtgatcccaacgctttgggaggccgaggagaggcgactgcttgaggccaggagtttgagaccatcctagcaccaccacgcccagctaattttttgtatttctagtagagacagggtttcgccatgttggcaaggatggtctcgatttcttgacttcgtgatccgcccgccttggcctcccaaggtgctgggattacaggtgtcagccaccgcacccggcctcaaatacatttttttaatggccttgtctttcctggttttaggcccttttccacaatttctgatggaaatacagaaaccttgccatcattcttactgctggtttgcatctcatttatggtgtatctgggatttcttctcatgaacagaaagattcagtggctgttatatgccttgtcaatttaatgtattgccctatcctctttttgatcaaagatagagactaagactgggaattatgacagaaaaagtcatatttttctttaaatgattttgaaatgttaaaataggccaatatgagtcaaagtgcaaattttttggtgagtaggttgacaaaaaaaaaaaaaatccaggaaaaaaagtgcaaatttttataggtcctaattcttttgtttgcctaatgaagtgttccctctattttattgtttttatatgctacaaagtcccatcttctgcagttatggaaacagtgtggctgtatgttttagtaattatttcataatctgtagcacttttcactttaagtgcaatgaatagtccagcttcattcactgtattactaatacgcatcccaaaaaaaaaaaaaaaaaaaaagcttagtcagatttggggatgcagccaaacccttctgttgctgtggtttgaacatacagtctaatgagcagggagaccattagctctttctggggcagtgggacaggaaagaataccttggaccttagggctactctagttgtaatgtattagtgagttatcactagagaagttccacagtttaatattatctatacctatatctatatatctacctatatagatagatatatgttagatgcttcaacaactagggtctacacttaatatactgacatctaaggatgcggccaagaaaagctgtaattaggctgaattttattgccaaagttgttcttttttcatttagtcctttaataaaagatgatcttcataaattacagaaagtttgcttaccctgtttgaccttttgcagaaaagaacaagagggaagacagaccttcaggctgggtgcagtggctcatgcctgtgatcccagcactttgggaggccaaggtaggaggatcgcttgagcccagggattcaagaccagcttgggtaacatggtaaaaccccatctctacaaaaaacagaaaaaattagctgggcatggtgtgtgtgccttgtagatccagctacttgggaggctgaagtgggaggatcgccactgcactccagaaactaaaaaaaaaaaaaaaaaaaaccttcaaaaatatatctaagccagatgtgatggcatgggtctgcagtcccagctactcagaaggctaaggcaggaagatcgcttgagcccaagagtttgaggctgtagtatgctgtgagtgcgcctatgagtgccaactgggcaacacagtgagacctctgtctaaaaaaaaagccaaggcaggcagaccacctgaagtcgggagttcaagaccagcctgaccaacatggagaaacctcatctctactaaaaatacaaaattagctgggcgtggtggcgcatgactataatcccagctactcaggaggctgaggcagaagaatcgcttgaacccaggaggcggaggtggtggtgaaccaagatcacgccattgcactccagcctggacaacaagagcaaaactccatttc

SEQ ID NO: 58903 - DNA, 1840 bp, Homo sapiens
tttttggctttttctggccgggcgtagtggcttatgcctgtgatcccaacgctttgggaggccgaggagaggcgactgcttgaggccaggagtttgagaccatcctagcaccaccacgcccagctaattttttgtatttctagtagagacagggtttcgccatgttggcaaggatggtctcgatttcttgacttcgtgatccgcccgccttggcctcccaaggtgctgggattacaggtgtcagccaccgcacccggcctcaaatacatttttttaatggccttgtctttcctggttttaggcccttttccacaatttctgatggaaatacagaaaccttgccatcattcttactgctggtttgcatctcatttatggtgtatctgggatttcttctcatgaacagaaagattcagtggctgttatatgccttgtcaatttaatgtattgccctatcctctttttgatcaaagatagagactaagactgggaattatgacagaaaaagtcatatttttctttaaatgattttgaaatgttaaaataggccaatatgagtcaaagtgcaaattttttggtgagtaggttgacaaaaaaaaaaaaaatccaggaaaaaaagtgcaaatttttataggtcctaattcttttgtttgcctaatgaagtgttccctctattttattgtttttatatgctacaaagtcccatcttctgcagttatggaaacagtgtggctgtatgttttagtaattatttcataatctgtagcacttttcactttaagtgcaatgaatagtccagcttcattcactgtattactaatacgcatcccaaaaaaaaaaaaaaaaaaaaagcttagtcagatttggggatgcagccaaacccttctgttgctgtggtttgaacatacagtctaatgagcagggagaccattagctctttctggggcagtgggacaggaaagaataccttggaccttagggctactctagttgtaatgtattagtgagttatcactagagaagttccacagtttaatattatctatacctatatctatatatctacctatatagatagatatatgttagatgcttcaacaactagggtctacacttaatatactgacatctaaggatgcggccaagaaaagctgtaattaggctgaattttattgccaaagttgttcttttttcatttagtcctttaataaaagatgatcttcataaattacagaaagtttgcttaccctgtttgaccttttgcagaaaagaacaagagggaagacagaccttcaggctgggtgcagtggctcatgcctgtgatcccagcactttgggaggccaaggtaggaggatcgcttgagcccagggattcaagaccagcttgggtaacatggtaaaaccccatctctacaaaaaacagaaaaaattagctgggcatggtgtgtgtgccttgtagatccagctacttgggaggctgaagtgggaggatcgccactgcactccagaaactaaaaaaaaaaaaaaaaaaaaccttcaaaaatatatctaagccagatgtgatggcatgggtctgcagtcccagctactcagaaggctaaggcaggaagatcgcttgagcccaagagtttgaggctgtagtatgctgtgagtgcgcctatgagtgccaactgggcaacacagtgagacctctgtctaaaaaaaaaaaaaaaatctgttgggctgggtgagccaccgtgcccagtgcccccaccttttttttttttttgaggcagagtctcactccatcaccaaggctagagtgcagaggttgcagtgagctgagatcgcaccattgcac

SEQ ID NO: 58904 - DNA, 1771 bp, Homo sapiens
tttttggctttttctggccgggcgtagtggcttatgcctgtgatcccaacgtgctgggattacaggtgtcagccaccgcacccggcctcaaatacatttttttaatggccttgtctttcctggttttaggcccttttccacaatttctgatggaaatacagaaaccttgccatcattcttactgctggtttgcatctcatttatggtgtatctgggatttcttctcatgaacagaaagattcagtggctgttatatgccttgtcaatttaatgtattgccctatcctctttttgatcaaagatagagactaagactgggaattatgacagaaaaagtcatatttttctttaaatgattttgaaatgttaaaataggccaatatgagtcaaagtgcaaattttttggtgagtaggttgacaaaaaaaaaaaaaatccaggaaaaaaagtgcaaatttttataggtcctaattcttttgtttgcctaatgaagtgttccctctattttattgtttttatatgctacaaagtcccatcttctgcagttatggaaacagtgtggctgtatgttttagtaattatttcataatctgtagcacttttcactttaagtgcaatgaatagtccagcttcattcactgtattactaatacgcatcccaaaaaaaaaaaaaaaaaaaaagcttagtcagatttggggatgcagccaaacccttctgttgctgtggtttgaacatacagtctaatgagcagggagaccattagctctttctggggcagtgggacaggaaagaataccttggaccttagggctactctagttgtaatgtattagtgagttatcactagagaagttccacagtttaatattatctatacctatatctatatatctacctatatagatagatatatgttagatgcttcaacaactagggtctacacttaatatactgacatctaaggatgcggccaagaaaagctgtaattaggctgaattttattgccaaagttgttcttttttcatttagtcctttaataaaagatgatcttcataaattacagaaagtttgcttaccctgtttgaccttttgcagaaaagaacaagagggaagacagaccttcaggctgggtgcagtggctcatgcctgtgatcccagcactttgggaggccaaggtaggaggatcgcttgagcccagggattcaagaccagcttgggtaacatggtaaaaccccatctctacaaaaaacagaaaaaattagctgggcatggtgtgtgtgccttgtagatccagctacttgggaggctgaagtgggaggatcgccactgcactccagaaactaaaaaaaaaaaaaaaaaaaaccttcaaaaatatatctaagccagatgtgatggcatgggtctgcagtcccagctactcagaaggctaaggcaggaagatcgcttgagcccaagagtttgaggctgtagtatgctgtgagtgcgcctatgagtgccaactgggcaacacagtgagacctctgtctaaaaaaaaagccaaggcaggcagaccacctgaagtcgggagttcaagaccagcctgaccaacatggagaaacctcatctctactaaaaatacaaaattagctgggcgtggtggcgcatgactataatcccagctactcaggaggctgaggcagaagaatcgcttgaacccaggaggcggaggtggtggtgaaccaagatcacgccattgcactccagcctggacaacaagagcaaaactccatttc

SEQ ID NO: 58905 - DNA, 1997 bp, Homo sapiens
tttttggctttttctggccgggcgtagtggcttatgcctgtgatcccaacgctttgggaggccgaggagaggcgactgcttgaggccaggagtttgagaccatcctagcaagaccttgtctctaaaaaataaaagaattagcagggcatggtggtgcacacgcaccaccacgcccagctaattttttgtatttctagtagagacagggtttcgccatgttggcaaggatggtctcgatttcttgacttcgtgatccgcccgccttggcctcccaaggtgctgggattacaggtgtcagccaccgcacccggcctcaaatacatttttttaatggccttgtctttcctggttttaggcccttttccacaatttctgatggaaatacagaaaccttgccatcattcttactgctggtttgcatctcatttatggtgtatctgggatttcttctcatgaacagaaagattcagtggctgttatatgccttgtcaatttaatgtattgccctatcctctttttgatcaaagatagagactaagactgggaattatgacagaaaaagtcatatttttctttaaatgattttgaaatgttaaaataggccaatatgagtcaaagtgcaaattttttggtgagtaggttgacaaaaaaaaaaaaaatccaggaaaaaaagtgcaaatttttataggtcctaattcttttgtttgcctaatgaagtgttccctctattttattgtttttatatgctacaaagtcccatcttctgcagttatggaaacagtgtggctgtatgttttagtaattatttcataatctgtagcacttttcactttaagtgcaatgaatagtccagcttcattcactgtattactaatacgcatcccaaaaaaaaaaaaaaaaaaaaagcttagtcagatttggggatgcagccaaacccttctgttgctgtggtttgaacatacagtctaatgagcagggagaccattagctctttctggggcagtgggacaggaaagaataccttggaccttagggctactctagttgtaatgtattagtgagttatcactagagaagttccacagtttaatattatctatacctatatctatatatctacctatatagatagatatatgttagatgcttcaacaactagggtctacacttaatatactgacatctaaggatgcggccaagaaaagctgtaattaggctgaattttattgccaaagttgttcttttttcatttagtcctttaataaaagatgatcttcataaattacagaaagtttgcttaccctgtttgaccttttgcagaaaagaacaagagggaagacagaccttcaggctgggtgcagtggctcatgcctgtgatcccagcactttgggaggccaaggtaggaggatcgcttgagcccagggattcaagaccagcttgggtaacatggtaaaaccccatctctacaaaaaacagaaaaaattagctgggcatggtgtgtgtgccttgtagatccagctacttgggaggctgaagtgggaggatcgccactgcactccagaaactaaaaaaaaaaaaaaaaaaaaccttcaaaaatatatctaagccagatgtgatggcatgggtctgcagtcccagctactcagaaggctaaggcaggaagatcgcttgagcccaagagtttgaggctgtagtatgctgtgagtgcgcctatgagtgccaactgggcaacacagtgagacctctgtctaaaaaaaaagccaaggcaggcagaccacctgaagtcgggagttcaagaccagcctgaccaacatggagaaacctcatctctactaaaaatacaaaattagctgggcgtggtggcgcatgactataatcccagctactcaggaggctgaggcagaagaatcgcttgaacccaggaggcggaggtggtggtgaaccaagatcacgccattgcactccagcctggacaacaagagcaaaactccatttc

SEQ ID NO: 58906 - DNA, 1950 bp, Homo sapiens
tgagatggagtcttgctttgtcaccagctggagtgcagtggcatgatctcggctcactgcaacctccacactccctggttcgagcgattctcctgcctcagcctccctgagtaggcaccaccacgcccagctaattttttgtatttctagtagagacagggtttcgccatgttggcaaggatggtctcgatttcttgacttcgtgatccgcccgccttggcctcccaaggtgctgggattacaggtgtcagccaccgcacccggcctcaaatacatttttttaatggccttgtctttcctggttttaggcccttttccacaatttctgatggaaatacagaaaccttgccatcattcttactgctggtttgcatctcatttatggtgtatctgggatttcttctcatgaacagaaagattcagtggctgttatatgccttgtcaatttaatgtattgccctatcctctttttgatcaaagatagagactaagactgggaattatgacagaaaaagtcatatttttctttaaatgattttgaaatgttaaaataggccaatatgagtcaaagtgcaaattttttggtgagtaggttgacaaaaaaaaaaaaaatccaggaaaaaaagtgcaaatttttataggtcctaattcttttgtttgcctaatgaagtgttccctctattttattgtttttatatgctacaaagtcccatcttctgcagttatggaaacagtgtggctgtatgttttagtaattatttcataatctgtagcacttttcactttaagtgcaatgaatagtccagcttcattcactgtattactaatacgcatcccaaaaaaaaaaaaaaaaaaaaagcttagtcagatttggggatgcagccaaacccttctgttgctgtggtttgaacatacagtctaatgagcagggagaccattagctctttctggggcagtgggacaggaaagaataccttggaccttagggctactctagttgtaatgtattagtgagttatcactagagaagttccacagtttaatattatctatacctatatctatatatctacctatatagatagatatatgttagatgcttcaacaactagggtctacacttaatatactgacatctaaggatgcggccaagaaaagctgtaattaggctgaattttattgccaaagttgttcttttttcatttagtcctttaataaaagatgatcttcataaattacagaaagtttgcttaccctgtttgaccttttgcagaaaagaacaagagggaagacagaccttcaggctgggtgcagtggctcatgcctgtgatcccagcactttgggaggccaaggtaggaggatcgcttgagcccagggattcaagaccagcttgggtaacatggtaaaaccccatctctacaaaaaacagaaaaaattagctgggcatggtgtgtgtgccttgtagatccagctacttgggaggctgaagtgggaggatcgccactgcactccagaaactaaaaaaaaaaaaaaaaaaaaccttcaaaaatatatctaagccagatgtgatggcatgggtctgcagtcccagctactcagaaggctaaggcaggaagatcgcttgagcccaagagtttgaggctgtagtatgctgtgagtgcgcctatgagtgccaactgggcaacacagtgagacctctgtctaaaaaaaaagccaaggcaggcagaccacctgaagtcgggagttcaagaccagcctgaccaacatggagaaacctcatctctactaaaaatacaaaattagctgggcgtggtggcgcatgactataatcccagctactcaggaggctgaggcagaagaatcgcttgaacccaggaggcggaggtggtggtgaaccaagatcacgccattgcactccagcctggacaacaagagcaaaactccatttc

SEQ ID NO: 58907 - DNA, 1808 bp, Homo sapiens
gaaatgttaaaataggccaatatgagtcaaagtgcaaattttttggtgagtaggttgacaaaaaaaaaaaaaaatccaggaaaaaaagtgctgggattacaggtgtcagccaccgcacccggcctcaaatacatttttttaatggccttgtctttcctggttttaggcccttttccacaatttctgatggaaatacagaaaccttgccatcattcttactgctggtttgcatctcatttatggtgtatctgggatttcttctcatgaacagaaagattcagtggctgttatatgccttgtcaatttaatgtattgccctatcctctttttgatcaaagatagagactaagactgggaattatgacagaaaaagtcatatttttctttaaatgattttgaaatgttaaaataggccaatatgagtcaaagtgcaaattttttggtgagtaggttgacaaaaaaaaaaaaaatccaggaaaaaaagtgcaaatttttataggtcctaattcttttgtttgcctaatgaagtgttccctctattttattgtttttatatgctacaaagtcccatcttctgcagttatggaaacagtgtggctgtatgttttagtaattatttcataatctgtagcacttttcactttaagtgcaatgaatagtccagcttcattcactgtattactaatacgcatcccaaaaaaaaaaaaaaaaaaaaagcttagtcagatttggggatgcagccaaacccttctgttgctgtggtttgaacatacagtctaatgagcagggagaccattagctctttctggggcagtgggacaggaaagaataccttggaccttagggctactctagttgtaatgtattagtgagttatcactagagaagttccacagtttaatattatctatacctatatctatatatctacctatatagatagatatatgttagatgcttcaacaactagggtctacacttaatatactgacatctaaggatgcggccaagaaaagctgtaattaggctgaattttattgccaaagttgttcttttttcatttagtcctttaataaaagatgatcttcataaattacagaaagtttgcttaccctgtttgaccttttgcagaaaagaacaagagggaagacagaccttcaggctgggtgcagtggctcatgcctgtgatcccagcactttgggaggccaaggtaggaggatcgcttgagcccagggattcaagaccagcttgggtaacatggtaaaaccccatctctacaaaaaacagaaaaaattagctgggcatggtgtgtgtgccttgtagatccagctacttgggaggctgaagtgggaggatcgccactgcactccagaaactaaaaaaaaaaaaaaaaaaaaccttcaaaaatatatctaagccagatgtgatggcatgggtctgcagtcccagctactcagaaggctaaggcaggaagatcgcttgagcccaagagtttgaggctgtagtatgctgtgagtgcgcctatgagtgccaactgggcaacacagtgagacctctgtctaaaaaaaaagccaaggcaggcagaccacctgaagtcgggagttcaagaccagcctgaccaacatggagaaacctcatctctactaaaaatacaaaattagctgggcgtggtggcgcatgactataatcccagctactcaggaggctgaggcagaagaatcgcttgaacccaggaggcggaggtggtggtgaaccaagatcacgccattgcactccagcctggacaacaagagcaaaactccatttc

SEQ ID NO: 58908 - DNA, 1834 bp, Homo sapiens
tgagatggagtcttgctttgtcaccagctggagtgcagtggcatgatctcggctcactgcaacctccacactccctggttcgagcgattctcctgcctcagcctccctgagtagtgctgggattacaggtgtcagccaccgcacccggcctcaaatacatttttttaatggccttgtctttcctggttttaggcccttttccacaatttctgatggaaatacagaaaccttgccatcattcttactgctggtttgcatctcatttatggtgtatctgggatttcttctcatgaacagaaagattcagtggctgttatatgccttgtcaatttaatgtattgccctatcctctttttgatcaaagatagagactaagactgggaattatgacagaaaaagtcatatttttctttaaatgattttgaaatgttaaaataggccaatatgagtcaaagtgcaaattttttggtgagtaggttgacaaaaaaaaaaaaaatccaggaaaaaaagtgcaaatttttataggtcctaattcttttgtttgcctaatgaagtgttccctctattttattgtttttatatgctacaaagtcccatcttctgcagttatggaaacagtgtggctgtatgttttagtaattatttcataatctgtagcacttttcactttaagtgcaatgaatagtccagcttcattcactgtattactaatacgcatcccaaaaaaaaaaaaaaaaaaaaagcttagtcagatttggggatgcagccaaacccttctgttgctgtggtttgaacatacagtctaatgagcagggagaccattagctctttctggggcagtgggacaggaaagaataccttggaccttagggctactctagttgtaatgtattagtgagttatcactagagaagttccacagtttaatattatctatacctatatctatatatctacctatatagatagatatatgttagatgcttcaacaactagggtctacacttaatatactgacatctaaggatgcggccaagaaaagctgtaattaggctgaattttattgccaaagttgttcttttttcatttagtcctttaataaaagatgatcttcataaattacagaaagtttgcttaccctgtttgaccttttgcagaaaagaacaagagggaagacagaccttcaggctgggtgcagtggctcatgcctgtgatcccagcactttgggaggccaaggtaggaggatcgcttgagcccagggattcaagaccagcttgggtaacatggtaaaaccccatctctacaaaaaacagaaaaaattagctgggcatggtgtgtgtgccttgtagatccagctacttgggaggctgaagtgggaggatcgccactgcactccagaaactaaaaaaaaaaaaaaaaaaaaccttcaaaaatatatctaagccagatgtgatggcatgggtctgcagtcccagctactcagaaggctaaggcaggaagatcgcttgagcccaagagtttgaggctgtagtatgctgtgagtgcgcctatgagtgccaactgggcaacacagtgagacctctgtctaaaaaaaaagccaaggcaggcagaccacctgaagtcgggagttcaagaccagcctgaccaacatggagaaacctcatctctactaaaaatacaaaattagctgggcgtggtggcgcatgactataatcccagctactcaggaggctgaggcagaagaatcgcttgaacccaggaggcggaggtggtggtgaaccaagatcacgccattgcactccagcctggacaacaagagcaaaactccatttc

SEQ ID NO: 58909 - DNA, 1878 bp, Homo sapiens
agacaggggtctgcagtcccagctactcagaaggctaaggcaggaagatcgcttgagcccaagagtttgaggctgtagtatgctgtgagtgcgcctatgagtgccaactgggcaacacagtgagacccctgtctaaaaaaaaaaaaaaaaatctgttgtgctgggattacaggtgtcagccaccgcacccggcctcaaatacatttttttaatggccttgtctttcctggttttaggcccttttccacaatttctgatggaaatacagaaaccttgccatcattcttactgctggtttgcatctcatttatggtgtatctgggatttcttctcatgaacagaaagattcagtggctgttatatgccttgtcaatttaatgtattgccctatcctctttttgatcaaagatagagactaagactgggaattatgacagaaaaagtcatatttttctttaaatgattttgaaatgttaaaataggccaatatgagtcaaagtgcaaattttttggtgagtaggttgacaaaaaaaaaaaaaatccaggaaaaaaagtgcaaatttttataggtcctaattcttttgtttgcctaatgaagtgttccctctattttattgtttttatatgctacaaagtcccatcttctgcagttatggaaacagtgtggctgtatgttttagtaattatttcataatctgtagcacttttcactttaagtgcaatgaatagtccagcttcattcactgtattactaatacgcatcccaaaaaaaaaaaaaaaaaaaaagcttagtcagatttggggatgcagccaaacccttctgttgctgtggtttgaacatacagtctaatgagcagggagaccattagctctttctggggcagtgggacaggaaagaataccttggaccttagggctactctagttgtaatgtattagtgagttatcactagagaagttccacagtttaatattatctatacctatatctatatatctacctatatagatagatatatgttagatgcttcaacaactagggtctacacttaatatactgacatctaaggatgcggccaagaaaagctgtaattaggctgaattttattgccaaagttgttcttttttcatttagtcctttaataaaagatgatcttcataaattacagaaagtttgcttaccctgtttgaccttttgcagaaaagaacaagagggaagacagaccttcaggctgggtgcagtggctcatgcctgtgatcccagcactttgggaggccaaggtaggaggatcgcttgagcccagggattcaagaccagcttgggtaacatggtaaaaccccatctctacaaaaaacagaaaaaattagctgggcatggtgtgtgtgccttgtagatccagctacttgggaggctgaagtgggaggatcgccactgcactccagaaactaaaaaaaaaaaaaaaaaaaaccttcaaaaatatatctaagccagatgtgatggcatgggtctgcagtcccagctactcagaaggctaaggcaggaagatcgcttgagcccaagagtttgaggctgtagtatgctgtgagtgcgcctatgagtgccaactgggcaacacagtgagacctctgtctaaaaaaaaagccaaggcaggcagaccacctgaagtcgggagttcaagaccagcctgaccaacatggagaaacctcatctctactaaaaatacaaaattagctgggcgtggtggcgcatgactataatcccagctactcaggaggctgaggcagaagaatcgcttgaacccaggaggcggaggtggtggtgaaccaagatcacgccattgcactccagcctggacaacaagagcaaaactccatttc

SEQ ID NO: 58910 - DNA, 1350 bp, Homo sapiens
gcccagcctgagactactttttgatggagcccactcaaggggatgaggaggtttaagccacaagtggctggctaaataaaagcttagtcagagctgggcacggtggctcacacctgtagtcccagctacttgggaggctgaggcaggagaattgcttgaacctgggaggcagaggttgcagtgagctgagatcgcgccattgcactccagcctgggtgacgagcgaaactccatcccaaaaaaaaaaaaaaaaaaaaagcttagtcagatttggggatgcagccaaacccttctgttgctgtggtttgaacatacagtctaatgagcagggagaccattagctctttctggggcagtgggacaggaaagaataccttggaccttagggctactctagttgtaatgtattagtgagttatcactagagaagttccacagtttaatattatctatacctatatctatatatctacctatatagatagatatatgttagatgcttcaacaactagggtctacacttaatatactgacatctaaggatgcggccaagaaaagctgtaattaggctgaattttattgccaaagttgttcttttttcatttagtcctttaataaaagatgatcttcataaattacagaaagtttgcttaccctgtttgaccttttgcagaaaagaacaagagggaagacagaccttcaggctgggtgcagtggctcatgcctgtgatcccagcactttgggaggccaaggtaggaggatcgcttgagcccagggattcaagaccagcttgggtaacatggtaaaaccccatctctacaaaaaacagaaaaaattagctgggcatggtgtgtgtgccttgtagatccagctacttgggaggctgaagtgggaggatcgccactgcactccagaaactaaaaaaaaaaaaaaaaaaaaccttcaaaaatatatctaagccagatgtgatggcatgggtctgcagtcccagctactcagaaggctaaggcaggaagatcgcttgagcccaagagtttgaggctgtagtatgctgtgagtgcgcctatgagtgccaactgggcaacacagtgagacctctgtctaaaaaaaaagccaaggcaggcagaccacctgaagtcgggagttcaagaccagcctgaccaacatggagaaacctcatctctactaaaaatacaaaattagctgggcgtggtggcgcatgactataatcccagctactcaggaggctgaggcagaagaatcgcttgaacccaggaggcggaggtggtggtgaaccaagatcacgccattgcactccagcctggacaacaagagcaaaactccatttc

SEQ ID NO: 58911 - DNA, 552 bp, Homo sapiens
ccaagttagagaccactgtatctgcttaagatttctttggccccactcggaaaaaggcaggactcataactatgctgcagttccataatccaacccccattttgatatttcagttggaaagagatgtggctgcaagattattggcaaggtctggaccagggggaagctctcactgccatgatccacaacaatgaaacagagcagacgaaattttgggattacctacatgaaatcttcatgaagaggcaacatctctaagtgcccttgcaagagcctttaacttggcggagctaaggagatcttattctaccatgggacataaggagcatccactgcacaaacccttaatgaacactgtcttttcatggattcaaggaattccagttttatctattaagattttatcttaatgatgagtagccaaggtctaacatagggcctctcctcaaggagagatggagggatacaattcttggttcagtgggaaacagaaccctaaaacatccatttgattcaaggtgctggtccaacagagtttttaaactactcact

SEQ ID NO: 58912 - DNA, 1949 bp, Homo sapiens
tcttctggatagtctgaagcatcgggagtggggagtgaatgatcctttgctgcctaactacctcaacggcttcgagtgtttcgtctgtgactacgaactggctcggctggatgccgagaaagcccacgcggcctctcccggggacagccccgtctttgagccccacattgcccagccctcacacatggactgcccagtgcccacacctggctttggcaatgtggaagagattcctgagaatgacagttggaaagagatgtggctgcaagattattggcaaggtctggaccagggggaagctctcactgccatgatccacaatttctgatggaaatacagaaaccttgccatcattcttactgctggtttgcatctcatttatggtgtatctgggatttcttctcatgaacagaaagattcagtggctgttatatgccttgtcaatttaatgtattgccctatcctctttttgatcaaagatagagactaagactgggaattatgacagaaaaagtcatatttttctttaaatgattttgaaatgttaaaataggccaatatgagtcaaagtgcaaattttttggtgagtaggttgacaaaaaaaaaaaaaatccaggaaaaaaagtgcaaatttttataggtcctaattcttttgtttgcctaatgaagtgttccctctattttattgtttttatatgctacaaagtcccatcttctgcagttatggaaacagtgtggctgtatgttttagtaattatttcataatctgtagcacttttcactttaagtgcaatgaatagtccagcttcattcactgtattactaatacgcatcccaaaaaaaaaaaaaaaaaaaaagcttagtcagatttggggatgcagccaaacccttctgttgctgtggtttgaacatacagtctaatgagcagggagaccattagctctttctggggcagtgggacaggaaagaataccttggaccttagggctactctagttgtaatgtattagtgagttatcactagagaagttccacagtttaatattatctatacctatatctatatatctacctatatagatagatatatgttagatgcttcaacaactagggtctacacttaatatactgacatctaaggatgcggccaagaaaagctgtaattaggctgaattttattgccaaagttgttcttttttcatttagtcctttaataaaagatgatcttcataaattacagaaagtttgcttaccctgtttgaccttttgcagaaaagaacaagagggaagacagaccttcaggctgggtgcagtggctcatgcctgtgatcccagcactttgggaggccaaggtaggaggatcgcttgagcccagggattcaagaccagcttgggtaacatggtaaaaccccatctctacaaaaaacagaaaaaattagctgggcatggtgtgtgtgccttgtagatccagctacttgggaggctgaagtgggaggatcgccactgcactccagaaactaaaaaaaaaaaaaaaaaaaaccttcaaaaatatatctaagccagatgtgatggcatgggtctgcagtcccagctactcagaaggctaaggcaggaagatcgcttgagcccaagagtttgaggctgtagtatgctgtgagtgcgcctatgagtgccaactgggcaacacagtgagacctctgtctaaaaaaaaagccaaggcaggcagaccacctgaagtcgggagttcaagaccagcctgaccaacatggagaaacctcatctctactaaaaatacaaaattagctgggcgtggtggcgcatgactataatcccagctactcaggaggctgaggcagaagaatcgcttgaacccaggaggcggaggtggtggtgaaccaagatcacgccattgcactccagcctggacaacaagagcaaaactccatttc

SEQ ID NO: 58913 - DNA, 412 bp, Homo sapiens
gaaactcctgagctcaggcaaatcacccacctcggcctcccaaagtgctgggattacaggcgtgagccactgtagccagcccagtttttaaaaatcacacaaattatcatattgcacagaaaagcaatgttgaaaatcctgtgaatactcttaataaatccttacaaaatcagttgagcaatttttaccacacatctttcctttctatactgcttatcacttccagaaactttagttaattacaaacatttccatttttttaagtccagacttgcagattttaatttgcaatataaacaaattggtaatatagagcccaattttactggcaggaataggatttttttttttttttttcaagacagggtctcgctctgtcacccaggctgaagtgcagtggtgtgatcagggc

SEQ ID NO: 58914 - DNA, 365 bp, Homo sapiens
cccttcctcaaaagataaaaatctctggcagaagaaatagttacctgctgccatccatcagtactgcaattaccatgactctaagtgaccttcttgcccaatgtttaatgcacaatggaccgtgcccagggagacctgggcatttctgttgctttgttctacaatgatcccttctgttctagcagcgtgagctcactgatggtcatactctctgaggactgtacgcattttcaccctatatccacctgtaccagaaaacatggacataatttaaagtttatttctacttaatagagtgatattccaacctgtgtggaaataaccatttgtcactctttaaagaatggtatttaacatttattata

SEQ ID NO: 58915 - DNA, 459 bp, Homo sapiens
aatctcagccccttggcggaaatcaatccagtatgactatctaaagtaagagaaagcagcaaggctgtgttagagagagccatgagaagatgccaaaaatgtggacctcagctttgccactggctcacattgcaaatttgggcacattatctcacgatttggggtctcacactcccacttgggatataaaaggatcgggctgataattttcaagggttctgctattctaagattctgtgactcaagggaaataaaaagtgatgagagaggaaaccacatcaatagcagtatgggttcccaatgtcaaggtgatcagagctgtgagtcccagtaacagccttcaggccctctactctgcattcttagcactttcagtatcatctgataatgtctattcattgaatgcctctatgtgccaggcaagacttgcctaaaatagtgaattccttgcttagaagc

SEQ ID NO: 58916 - DNA, 309 bp, Homo sapiens
tgtgttactgaccatgtttttgagagtagtgcccctaaccactttgtctccacttgcatagtgtagtgatttttaggactctgtatgtcatattataacagaactgactgtatatggctattttatcccataatcaagccaattcttccagaatattaccatcagtattaccacatacatccttccaaatcttatttcaaagaataaatatatagtcactcatggtttttaagaaaacccaaaactactcaaccaaaaccttgaggaagatttttccagggttttctaccttaattattcataatgatt

SEQ ID NO: 58917 - DNA, 1077 bp, Homo sapiens
gcctgcagaggcctgaacgtttcccaggattgtcttctaattctcaggtccggctttaaaacaaaacctaaactaaaactaaaatgctttctgcaaagaataatacaccaacataaagtccgggtatcctaagcatgtggtgtgtatggtgtctgaaattgaatatgctgtgaaactgcctgtgtcgaaatgcagtgtttcccaagacctggaggctctctccagctgctgattgtgatcacctctcccgatcaccgctgagccctgcaggtcaccttctcctgacctattacaccactgattgcttatgctgggcacaattttatacccttgctgttgttcagtctaatcatccctataaccctatcggatcattcccatatgacagaggagaaaacctggggacacaggggctgtgtcctggccaaggccttgcttgcagcaaaaggcagagctggggtctagccaggagccccagcacagtcctgttcttcccccactaaactgagctgtgaaatagatcatggcagtttggaaaacgggctaactgtatgctgagggaggtggtgacggatacctacttcttttcatgggaaggtgaggtgtctccctgcccccctcaggtctagcctctctctgtagctcagaaccttgggaaagtgggaggctcagaggaggaaagagatttacttgcccaagggccgcagctgctaagtggcaggtaagggactgttattctcctgtccctttcacagaggacaggaggaaagtgaggacaggtggtgtacatgcatcttttctgcagcaggcccagatcagctttgcacatggtgctgacctcaaattcagccctagaggggcctgtctctgccctgagtgagtattgaagtgcaggcttcttcccctttgttctgtccatttccaaaaatgtgaacacacacctccaacatgtttctgtgtatattattgtgtgcatagatactaccattgtgaaatattatgcagattaataatgcactatgccattgaaaatttcaaaagaaatgtgtaataaacatttaaaattaaaaaaaaagt

SEQ ID NO: 58918 - DNA, 594 bp, Homo sapiens
gcctgcagaggcctgaacgtttcccaggattgtcttctaattctcaggtccggctttaaaacaaaacctaaactaaaactaaaatgctttctgcaaagaataatacaccaacataaagtccgggtatcctaagcatgtggtgtgtatggtgtctgaaattgaatatgctgtgaaactgcctgtgtcgaaatgcagtgtttcccaagacctggaggctctctccactgctaagtggcaggtaagggactgttattctcctgtccctttcacagaggacaggaggaaagtgaggacaggtggtgtacatgcatcttttctgcagcaggcccagatcagctttgcacatggtgctgacctcaaattcagccctagaggggcctgtctctgccctgagtgagtattgaagtgcaggcttcttcccctttgttctgtccatttccaaaaatgtgaacacacacctccaacatgtttctgtgtatattattgtgtgcatagatactaccattgtgaaatattatgcagattaataatgcactatgccattgaaaatttcaaaagaaatgtgtaataaacatttaaaattaaaaaaaaagt

SEQ ID NO: 58919 - DNA, 849 bp, Homo sapiens
gaggatttacaccctggttctcaggccttcaggctctaactggagctacactatcaactttcctgggcctccagattgcagatggtggatcacggtactttttagcctccatcataatatgagaaaaaagaggcacagtgaagctaaatatattggctaaagatcacaaagctaagttgaaatttttcaagatgaaaagttgctaaagaaagagaaagggaagcggtttgctccagtattcctctttccaccttcccactgactgggaagcggcggttagcagagccacagtcttggattagagataagagggacatgttgaggaaggtggagtctcccccacagccctggaccaggctccagtgccaacaaaagccaagaagaacctctggagcaatcagtctctctgctgagggagtgcattttgcttccagcacagtgctcaactcacacagttcccatggaaacccaggggctacagaggtgtctagaccctgtttggcactctaaccagaagtattcccagagactacaagcacactgcacaccttggctcagtttcaaactggagacaggcagagaaagaaagatcttcctcccctactttcccggggaggtcttgaggagacttcctttttgttagttgtttccaaattgtccctatctgagtggttctcaaacagtgggtcttcgcgtggtcatgaagggcctgcaagaagataagggcaccaagcgtggcctgtggctgagataaatgaagcatctctcatatatgtgttatgatttttcaagtaaatgaggttgctattgggcttaattaaaataaaaactaatttaagagcaatgcta

SEQ ID NO: 58920 - DNA, 1342 bp, Homo sapiens
ggctggtctcgaactctggggctcaggcgatctgcctgccttggtctcccaaagtgttgagattacaggcgtgagcttgtgccctgctgtcaggaatgtttttaagttagccttagacatcatatactttcacttacataggttgagtatcttttatctgaaatgcttgggaccataaatgttttggatttcagatttatttttggattttggaatatttgcatggtacttaccagttgagcatcctaatctgaaaatatgaaatctgaaatgttccaatgatatttcctttgagctcaaacagttttgatcttggaggattttagatttttggattagggatactcaacctgtaatactcctgtatacatcttgtaactgctaagcagatttcttttaaataatcaccatattatacctaacaaatttagcagttttgttactatcatccaatacccaatctgtattcagatgttcttgatcatctcagaagtgtctttttacagttggtttgtttgaataaggattcaaatgaagtccatgcattgcctttggctgttaggtatctcttgtaataatctcctatttattactttcattctgttgatttgttgaagaaacaggcatttgagctgtaagctattctttagaagaaattgaactcctttctaactgctttcttccctttgtgtgtgtatgtgtgtgtgtgtgtgtgtgtgtatttaaaacaatctatctttacccttggtggtaaccaatctttacaactgaaataaatagtaaatagtttcttgccatctgttcacccacatcactgttgtttcatacctccttttcacaaatcctagcatagggtttctcactggataggcattatcttgtttattgaatgaagaaggaaacagacacaaggtggtttgtccacgtaagtgggatttagttatatgggaatgtttatggaaggcaggctattactttgtttctctttagtttggatcttttttgtctcatagggagatgcaagatacatgtgtatttatcttatttccatgtactagaaaataagatcccaaagggtagggatctttctgttgcctttgccctgtgatgtttctcaaagacctagaatagtgcttggcacagagtaggtgcccagtaaatgtgttgaattgggtgacccaataaaaataaatgccataaagaaaatgtcccaggctgggcatggtggcttaggcatgtaaccctagtgctttggaaggccaaggcaggaggatcacttgagcttaggagtttgaaactagcctgggcaacatagtgagaccttgtctctacaaaaaaattt

SEQ ID NO: 58921 - DNA, 546 bp, Homo sapiens
ctttgaagagcctgccagcagtatctgagaatggcctctggaccccttctcagggtgttaaatgctgtgttatagtacatgccgtagtagagaagatctctcattcagcttaatattctgtccccctggatccagcaccttgaggtcctctcccaggtgcattccccagctctgtcagaactcgttagacacatcccgtagccggtgtcagccatggaggaggacagggcagattctggggagagcaagcagtatctcatgagattcccatttcatttgaggcctatgtgttatattcaagcaaggagtgtgtggggggcttctgtcgtacaacaaaaggggataggtcacttctgtaggcacagtgttaagaagaatttgaggactaaggttctcaaaggcatttacccagctatccccatcccaaatctcagaatcctgttccttccctgttagggcccagaccctgccacgggaactttatcaatcaaggccaataaagagaagttatggggagactgatttaggatcaatattaaaaaaaaa

SEQ ID NO: 58922 - DNA, 4768 bp, Homo sapiens
catgattaaatgacttcgtttctttcatctttggagggtataatgtaaataagtgtcgtgtgtgtatgtgtgtgtgtactgtcagatatctaactaggtatttggctacatctggacaactgattgaagggagatgctctctccccagtcctcttcccttgtcctttttagaattgctgcaggcccaggttaaatatgaaattactccctaggctttgcagtttatgttaccaaccaccacattttatagctatgtagaggatgactcttaggaaataaatattagaagcctagaaatcatttagttgttctagcaccaaatctatccatttgcctaatgtatttaacattccatcctcatcaacatgatgaagcccctttcttccatctttgtagggcacattgtatataaatattttgtacataaagatcatcaaataccataatggggtatttggcttcatctggaaaattgactggagggagatgctgtctcccagccctgcttccctcgtccctgtccaagttgctgcaggcccaggttagaagattaccaacctggaggggcatgcagttcatcttacaataaaagcccattcatttaaaaactcagaaatcatcccagtgcctgtactcctcaaaccaatttccctaagggaagactggcacaccagcccaaagagcaggtgcttctcttccaacagaaacatggcccctgacagggcaccagcattagggaaaccaatgtcctccgaatagctgccatgagaacatttcagatgctcaaactgaaaattcttaaaaccaatattaagcatcagcatgctttaagtgtaagatagccctttggaatttacaaacacatgtgcagctatttccttcttcacagatatgatgtactcagccccctcctaggcactacgaagaagacagaggaagcataaaaattctggactaatataattttatatgtgtttctgagattggggagtagactgagtgccttttttacaaagaagatcccatatttaattcaagtatttatagcatcagcaaaaatgggcagagggcgggaagttgagaacactaggttctgtgctatgttacctgtattcagtagaagtgtttctggagtcaggttttaagtcatgatcctgaagcttccttcccctcttccactaatgatgcaataatagctgttttcattttaacgagcagagaactaagaggaaaggtcctagctctgccttccacttgcagcttccctttacctcctcttattgctttcatctcaaatatccctgctactcaaccaatcctaaagctaaagtactgagatgcacacaaaggaaaggtgtgagagtgcttggaagcatccagctgagcccactggatgaaaatcagacgatagggcctcctgttgtaatatactagccagagaaaagcgccaagaacttcagggatattattcactgctttattgctccctaaccctagatcagattggattttactttgtagttcaggagttaagaagtcaaattgctgaccgaggtggggaaggatgatggaaattaaaggtttacatttgtttaatggcagaactgagatttgctcagcttatctctttcccatctgtctgtaatagcaatgactgaataatcagtagaccaatggaagaggagttgcaagtttaaatttgtaacctgactctgggttctgttctaggaatagtgcatgttttagaggctttgccagttgggatacattgttgacttgggggaggatgaaggagagaactgatgacctagacatagaaaagagtagttaactaactagatgttcttctgatctcttccatggtagacattctgagcacattggcccagttagttggtatggtgaaggggcaccgtactaacagatttggagactgaaacctaatcccatcaccaacacttagcaggtatatgatcatgggcaattcattcaattgcctgccaattatagactatatagggggaagagcactggatttggagtcaagaaacctggacacttggctccacacttccttagctgggtaactttgggcaaaccgcttggtctctcaagcctaaggttcttcagctataaaatgggaataatacttcactaactacctcacagagttgtggtaagaatataatcagataactggataaaaacactatataaactggaaagcgccgtacaaatgtgagagatcagttttattatcaaatcactgttttccactgcctcttgaatcggctttattctaaccaaccattacatctttctcatcttttggagtatgggtaattgaggcttgggtgtgtcatcagggactggagttatttcagctcccatgtagaggtgggagaggtggttgatggggcagtggaagttagataccagcgatgtatatggtaggacattttcctgggtcactttgacagtaccttgggaaattgtcaatccttgcagagggcctaggctgggcacaagggagaaagcgaacagttgactaagaattgaggggagggtctggagcgctactgccctcctgtcattgctgtgggtgggagaggctaagacttcaggtttgactggaggcctaggagagaagagtgtccttagggtttcaagaattttaatgcctagcagctgagtaacaggcattagttctgatagatagtgaaggggagaaagtgccacctgttgtgagatcacctctccagggcagcagctgccttgttatcaccagcaaccttagccctggtcagtaatatttctgctaagaaaggttttgaagcatggcctccaatgactttcataagcccttggaggcaggactgtgtctcatccatctttgtatcttcagtaccatcttgtaaggtgccttgtacatagtaggtgcttaatgaacaaatgttgcttgaatttagctgtcgtccagccccacagagttatgctccatttgccaccatgtgatatttttgagaaacaatagtgatttggatgccagctctatgtgactttgggcaagactctccatctatcttgtcttcatttcatctgtaaaatgaagtgagtagattcaatgctccctaaggtcccttccagctccaatacttgacaagcttgtgattctaaatcgtttccgttgcctctgaacatgggtgagtaatgcctccactgcagctgtttctctccaggaggctttgttcagaggaggtctgactattgcacagccagttttttcttcctcttcagcagttctttactgtcttcagaatagttctggataagcggccttttctgaaaggatatttaaaaatatatactatttaggctgggcccagtggctcatgcctgtaatcccagcactttgggaggtgaaggtgggtggatcacctgaggtcaggagttcaagaccagcctggccaacatggtgaaaccccgtctctactaaaaatacagaaattagctgggccctgtggcaagagcctgttatcccagctactggggaggctgaggcaggaaaatcgcttgaacccaggaggtggaggttgtagtgagccgagatcacaccactgcactccagcctgggtgacaagaacgaaactccatctcaaaaaataaaataaaatatatactatcttgctcctcagaaccagtggggaagaagagggaaggcaaagaaagaaactgagcatagtaaacacagcatttttttgtaggctcttatttaaaatgtgtgtgtgtgtgtgtatgtgtgtgtttctgagtaagtattgactgggaaaaagagagaagtcaatcaaaagtatactgtgcaattgagagaggctggcccaagatttaaaacttcctgtgggtaatctaactgtgagtagataggaatcggccatatgacgaaatgagatcaataggaaatgtgctttttgaggaaattttattttagtaccaaatgttgccagtgacaatcttcagttaagaagtaagttattctgacctaaaattcttatctctgccactttggtttaaaaacaaaaacccttatatacatggaatagttatattttaattaagcatttattttagttgttttcatccattcaagcaaaatgaataagcagcatttttcattgcacttaaaaatgtaaaatacctgcatgccactaatctgtaacattttaccagttcagatgcctgtaatgtgtgactttatgtgtgtctgtgttgttttgaagagaataaaggaaataatactttgcaaactgtttaaacaagtgtttaaacttctattggcaacatttattgggctaagcagttattgaaaactccgcatagttttattttccatttgaaacttcaatcaaatcaagactattatattcattagggaattaaagactaatttgctttttaaatgtgaagttgaacactgtgtggaaagtaaatgtgtgatgaagcaaaatgtataaagtatgaaatattatacttttaccctggataattattcaggaccccagttggcccaaataggtgcaatttttaatcctttgaaattagccagccagacctaatgctaaggtaaatgtaaactgttttaattaattaagatctttctgctttcgaaggtataatgtatctatttctgtcaggaatgatatttccaaatgaaaatgtaaagaacattgggaaataataaactttcctttcaaagtaaaagtaaagactg

SEQ ID NO: 58923 - DNA, 980 bp, Homo sapiens
agggggaagtctggaggacgctgaggggcggaggcgggagaggcgagctcgcgatgagtggtctcggcaggctcttcgggaaggggaagaaggagaaagggccaacccctgaagaagcaatacagaaactgaaggagacagagaagatactgatcaagaaacaggaatttttggagcagaagattcaacaggagctacaaacagccaagaagtatgggaccaagaataagagagctgccctacaggctttgcggaggaagaaaagattcgaacagcagctggcacaaactgacgggacattatccaccctggagtttcagcgtgaggccattgagaatgccactaccaatgcagaagtccttcgtaccatggagcttgctgcccaaagcatgaagaaggcctaccaggacatggacattgacaaggtagatgaactgatgactgacatcacggaacaacaggaggtggcccagcagatctcagatgccatttctcggcctatgggctttggagatgatgtggatgaggatgaactgctggaggagctagaggagctggagcaggaggaattggcccaggagttgttaaatgtgggcgacaaggaagaagaaccctcagtcaaattgcctagtgtaccttctactcatctgccggcagggccagctcccaaagtggatgaagatgaagaagcactaaagcagttggctgagtgggtatcctgataaatctgggcttgtcttcctaatgctacctttgttggtcctttcttccttaagtgccaagtgctgagctaaaggaggataactttttggggaagtcatgctgagggtggtagtgtgaccctgcctgaaaaaagggtctcttaccctcccagccctggctcaactctgaagaaggatcttgctacagaaggagcccttgggctcccttctctttgatagcagttataatgcccttgttcccaataaaactgggcagat

SEQ ID NO: 58924 - DNA, 746 bp, Homo sapiens
agggggaagtctggaggacgctgaggggcggaggcgggagaggcgagctcgcgatgagtggtctcggcaggctcttcgggaagggtgagccagggtgggactggccagccaggaggcgctggctggtgcaggggaagaggagaccccggcgagattcggccggaccgctgcgccgggcaggggaagagaatcaggagacaggctgactggaaaaccccggcggccgatggcggagcaaggctcatcgccggtgccaaaaggcacaccatgtcggggcgccttgttcccgtccgccgtcctcccccactctcagagggaagaactcaagatctgggaggggacttgagttgagggcgtggcgatcgtgctgactcccactgttcaggcttgaagacgagtttcctgctgtcttcagccattttcaaaaccttgttctataatactttgtgctgggcaagagggatctaaggtgaagaagaaagactgccttcttagcccggcgcgggggctcacgcctgtactcgcaacactttgggaggccgacgtgggtggatcatgaggtcaggagtttgagatcagcctggccaatatggtgaaaccccgtctctactaaaaatataaaaattggccgggcgcggtggctcacgcctgtaatcccagcactttgggaggccgaggtgggtggatcacctgaggtcaagagttcgagaccagcctggacaacatggtgaaaccttgtctctact

SEQ ID NO: 58925 - DNA, 1366 bp, Homo sapiens
aacatggagaaagcctgtctgtactaaaaacacaaaaaattagccaggcatggtggcacatgcctgtgatcccagctatttgggaggctgaggcaggagaattgcttgaacccaggaggcggaggttgaggtgagctgagatcacgccattgcgttccagcctgggcaacaagactgaaactctgcctaaagaaaaaaaaagaaaggcagctaggaatagtaaaaagaatatgggttttagaactcatactgccacatcttgattcctgcacaatctcttattagttgtgatttttaacatctttgtggttgttttcacatttttaaagtgaagagatagcacgttcattgtagagatttggggattagcaataacacagtcaggtctctagcacatactatgtattcaatgattggtggctaatatttttccttcacaaaatttgggcctactccactggactcctcagggaagaaggagaaagggccaacccctgaagaagcaatacagaaactgaaggagacagagaagatactgatcaagaaacaggaatttttggagcagaagattcaacaggagctacaaacagccaagaagtatgggaccaagaataagagagctgccctacaggctttgcggaggaagaaaagattcgaacagcagctggcacaaactgacgggacattatccaccctggagtttcagcgtgaggccattgagaatgccactaccaatgcagaagtccttcgtaccatggagcttgctgcccaaagcatgaagaaggcctaccaggacatggacattgacaaggtagatgaactgatgactgacatcacggaacaacaggaggtggcccagcagatctcagatgccatttctcggcctatgggctttggagatgatgtggatgaggatgaactgctggaggagctagaggagctggagcaggaggaattggcccaggagttgttaaatgtgggcgacaaggaagaagaaccctcagtcaaattgcctagtgtaccttctactcatctgccggcagggccagctcccaaagtggatgaagatgaagaagcactaaagcagttggctgagtgggtatcctgataaatctgggcttgtcttcctaatgctacctttgttggtcctttcttccttaagtgccaagtgctgagctaaaggaggataactttttggggaagtcatgctgagggtggtagtgtgaccctgcctgaaaaaagggtctcttaccctcccagccctggctcaactctgaagaaggatcttgctacagaaggagcccttgggctcccttctctttgatagcagttataatgcccttgttcccaataaaactgggcagat

SEQ ID NO: 58926 - DNA, 926 bp, Homo sapiens
agggggaagtctggaggacgctgaggggcggaggcgggagaggcgagctcgcgatgagtggtctcggcaggctcttcgggaaggggaagaaggagaaagggccaacccctgaagaagcaatacagaaactgaaggagacagagaagatactgatcaagaaacaggaatttttggagcagaagattcaacaggagctacaaacagccaagaagtatgggaccaagaataagagagctgccctacaggctttgcggaggaagtttcagcgtgaggccattgagaatgccactaccaatgcagaagtccttcgtaccatggagcttgctgcccaaagcatgaagaaggcctaccaggacatggacattgacaaggtagatgaactgatgactgacatcacggaacaacaggaggtggcccagcagatctcagatgccatttctcggcctatgggctttggagatgatgtggatgaggatgaactgctggaggagctagaggagctggagcaggaggaattggcccaggagttgttaaatgtgggcgacaaggaagaagaaccctcagtcaaattgcctagtgtaccttctactcatctgccggcagggccagctcccaaagtggatgaagatgaagaagcactaaagcagttggctgagtgggtatcctgataaatctgggcttgtcttcctaatgctacctttgttggtcctttcttccttaagtgccaagtgctgagctaaaggaggataactttttggggaagtcatgctgagggtggtagtgtgaccctgcctgaaaaaagggtctcttaccctcccagccctggctcaactctgaagaaggatcttgctacagaaggagcccttgggctcccttctctttgatagcagttataatgcccttgttcccaataaaactgggcagat

SEQ ID NO: 58927 - DNA, 479 bp, Homo sapiens
  misc_feature (18)..(18): n is a, c, g, or t
cgatgagctcggcccgantatacaccgatgaactgctggaggagctagaggagctggagcaggaggaattggcccaggagttgttaaatgtgggcgacaaggaagaagaaccctcagtcaaattgcctagtgtaccttctactcatctgccggcagggccagctcccaaagtggatgaagatgaagaagcactaaagcagttggctgagtgggtatcctgataaatctgggcttgtcttcctaatgctacctttgttggtcctttcttccttaagtgccaagtgctgagctaaaggaggataactttttggggaagtcatgctgagggtggtagtgtgaccctgcctgaaaaaagggtctcttaccctcccagccctggctcaactctgaagaaggatcttgctacagaaggagcccttgggctcccttctctttgatagcagttataatgcccttgttcccaataaaactgggcagat

SEQ ID NO: 58928 - DNA, 1018 bp, Homo sapiens
agggggaagtctggaggacgctgaggggcggaggcgggagaggcgagctcgcgatgagtggtctcggcaggctcttcgggaaggggaagaaggagaaagggccaacccctgaagaagcaatacagaaactgaaggagacagagaagatactgatcaagaaacaggaatttttggagcagaagattcaacaggagctacaaacagccaagaagtatgggaccaagaataagagagctgccctacaggctttgcggaggaagaaaagattcgaacagcagctggcacaaactgacgggacattatccaccctggagtttcagcgtgaggccattgagaatgccactaccaatgcagaagtccttcgtaccatggagcttgctgcccaaagcatgaagaaggcctaccaggacatggacattgacaaggtagatgaactgatgactgacatcacggaacaacaggaggtggcccagcagatctcagatgccatttctcggcctatgggctttggagatgatgtggatgaggatgaactgctggaggagctagaggagctggagcaggaggaattggcccaggagttgttaaatgtgggcgacaaggaagaagaaccctcagtcaaattgcctagtgtaccttctactcatctgccggcagggccagctcccaaagtggatgaagatgaagaagcactaaagcagttggctgagtgggtatcctgataaatctgggcttgtcttcctaatgctacctttgttggtcctttcttccttaagtgccaagtgctgagctaaaggaggataactttttggggaagtcatgctgagggtggtagtgtgaccctgcctgaaaaaagggtctcttaccctcccagccctggctcaactctgaagaaggatcttgctacagaaggagcccttgggctcccttctctttgatagcagttataatgcccttgttcccaataaaactgggcagatggaatcctagtgtctatactgccttgtctacccctgaa

SEQ ID NO: 58929 - DNA, 1430 bp, Homo sapiens
agggggaagtctggaggacgctgaggggcggaggcgggagaggcgagctcgcgatgagtggtctcggcaggctcttcgggaaggggaagaaggagaaagggccaacccctgaagaagcaatacagaaactgaaggagacagagaagatactgatcaagaaacaggaatttttggagcagaagattcaacaggagctacaaacagccaagaagtatgggaccaagaataagagagctgccctacaggctttgcggaggaagaaaagattcgaacagcagctggcacaaactgacgggacattatccaccctggagtttcagcgtgaggccattgagaatgccactaccaatgcagaagtccttcgtaccatggagcttgctgcccaaagcatgaagaaggcctaccaggacatggacattgacaaggtagatgaactgatgactgacatcacggaacaacaggaggtggcccagcagatctcagatgccatttctcggcctatgggctttggagatgatgtggatgaggatgaactgctggaggagctagaggagctggagcaggaggaattggcccaggagttgttaaatgtgggcgacaaggaagaagaaccctcagtcaaattgcctagtgtaccttctactcatctgccggcagggccaggtatgcagggttgttctgttgtcttgaggacttaagagggtgggagagatatggggaaagattattcctcatccatcctgcctcaaaggagccacacagaaagggctgctgctgcagttgtgcaggttgttgactgcatataggcacccacctagcctgtgcttcactcaacaagccgtgtaccctggtttagggctgcaaatggcaggagcaagaggcaccatttttctaatttgcacaaaggtgctgtgggattgaacagcagcctagcaagcagaaggaccatacctttaggttttttgctggggagacagaattcagcaggctctgaatgtcatagcaggggatggttggagttgctgagaccttactgcttctcctttcttttctctgggtatctttgtcctcaaagctcccaaagtggatgaagatgaagaagcactaaagcagttggctgagtgggtatcctgataaatctgggcttgtcttcctaatgctacctttgttggtcctttcttccttaagtgccaagtgctgagctaaaggaggataactttttggggaagtcatgctgagggtggtagtgtgaccctgcctgaaaaaagggtctcttaccctcccagccctggctcaactctgaagaaggatcttgctacagaaggagcccttgggctcccttctctttgatagcagttataatgcccttgttcccaataaaactgggcagatggaatcctagtgtctatactgccttgtctacccctgaa

SEQ ID NO: 58930 - DNA, 2305 bp, Homo sapiens
ttagtaatgttaatgctttgtctatttgttatttttaccactgttgaacagcaaactgttgaggctagggttgattattgataatttttatgtgtttagtaataaccacagcatcatacgtacaactgctttaataaatccaagttaaggactttgaggagagcatgtagcaagtattcattttaacaaatcatcacagacagtttccctgttcaaagctccaccaaaaagcaagcatgcagcaaaggcatagactgtatttagagatgtggtttcatttattcttgaagtcctataaccttgcattatttaaacacaaaatcccacctaacatttgccaaatccaagttaatctcaaaaacctccgaggacattgagcacaagcagattactgtaagggcactggtggcagattgtggtggagagagggctgagtgacccagagcaaagcctgcccgggttactcgctgccacttcaggagagggattgtatcagctctcattaccttttgtcatgaggcagttcataaattaaatatgatatcatgcattatctcaaaatatttctatattaattagataattcacgatgtaaaacgtgttcatgcagaagcaaaggcggatgtaatagtcaagtatcagggaaaaacccctttaggatacccagacattaaaaatgtaaaaagtagcttataagaaatgtggattatcagatttttactatatataggttgtgtttaatagtaatttctgacacctgcacatagatgaagaaaaggcagttgttaccacttttcaccattcaaaaaatgggcttgtctcttagagtattggttaatgctttgcttatttgttaatgaagacagcattttaattttaaagcttccttttgtaggactgatggcacgggcagaatcacatttaagaaaaatggtttggaacactttttaataaaaaattgtaaaatcagtttccagtgtggtcaaaattagaatgtaaaggaaagcatttttaagaaaatacagaagcccaaatcaagggagagtaatataaaaggaaatattttaaattaagaaaaggaggtgttatagtttattacatcatgaattatgctttctgtacttacgctcttagtgaaggagataacattgaagtgagaaaatgaacattctcagttatttgcgaagttagtaaaattgcagtccctattccatttttttctgatgaaaatggatacatgagatctcatttattgctctcctcaacacctttactgtcccagattccattcacgttccaaatcgtggacagtaaaactgaagtcagataaacacagtcacaggtacaactgggagcgagttttaacatagtggtaattttgcaaatgccaacatgaatactagtgagtactcaatttacgacagacaatttcacaaaaaccaaccacagagtgatttgatattcttgcttcttagagagttttctaatccatataatgcaatgggtcaggttgctcatatgattaaaaaaattaatcctgtagaaatgatgtattagacatctctaacccaagaaaaagatgtcttttgtataacttttaaattcccatttgtctatcttaggacaaatgatgacttcttcgtgtagtaatgaaaacgtctaaatcctgctctgtggagaaaagctagaaccatgggacattaagcaagaatactcctctgatttaggctcccagactacaactaacagtctttatgtatttatcatcttggttattgttttatctcaagcatatacagtgtgcagaaagtagaataatgaataaaatatgaccatggagaaaacccataacttttgcttctattatagaaagcagtgtttgttctttttaatttattacatgttcacattgaaacattaacatctacaatattgtctttcagtttactcttcaattactaaagcaaatgattttgatttatagcacttacacaactgcagttcaggtcacagaattgaaatctatttgataatgtctcagcattctcatgggcagccaggaaaaaaaaaaagagagagaaagacaaatagaaattttagtgggttcagataaatgattattctgacaaacctggaaaatagtaattaaacagttcattccaaaagaccccaatgtaaactctgctcacatacataatttgtataaggaaaatgtatgagtttttttcttaaaaataaatagaagcatcattgcatttataacagattgatcaatcttatgaacagattacattgggaaagtcac

SEQ ID NO: 58931 - DNA, 881 bp, Homo sapiens
ggggactcggtggcgtgtggtgggcgtgctctgtcgctaaaaaaaaaatatattaccagatacaccagggaggcgcggggtgtgctcgtcgttggtgtgcgccgcaccccgcggggctgtattggggactatatgctgggggcgcgctgtagtgcgctctctgtgggagctgctgctcccgagggggcttacgctaatcccccggctagcacgttagcttttggttgtatggaagcgtcaagccggctcggggaaaaaagctagaaccatgggacattaagcaagaatactcctctgatttaggctcccagactacaactaacagtctttatgtatttatcatcttggttattgttttatctcaagcatatacagtgtgcagaaagtagaataatgaataaaatatgaccatggagaaaacccataacttttgcttctattatagaaagcagtgtttgttctttttaatttattacatgttcacattgaaacattaacatctacaatattgtctttcagtttactcttcaattactaaagcaaatgattttgatttatagcacttacacaactgcagttcaggtcacagaattgaaatctatttgataatgtctcagcattctcatgggcagccaggaaaaaaaaaaagagagagaaagacaaatagaaattttagtgggttcagataaatgattattctgacaaacctggaaaatagtaattaaacagttcattccaaaagaccccaatgtaaactctgctcacatacataatttgtataaggaaaatgtatgagtttttttcttaaaaataaatagaagcatcattgcatttataacagattgatcaatcttatgaacagattacattgggaaagtcac

SEQ ID NO: 58932 - DNA, 263 bp, Homo sapiens
ggttgcagtgagccgagattgtgccactgcactccaacctgggcaatagagccggactccatctacaaaaaaaaaaaagacttggataagagtctgtcaacccaagagcccaagagcagtggtgctgctggactctattcttcatggggctgtacagcggagtgcaaacggatgcagatatccaaactacggaaggcttggtgggccttccaagtgctggcagcaaatcctgacagtcagtgaatagcgactctgcccaaaaa

SEQ ID NO: 58933 - DNA, 488 bp, Homo sapiens
ctctgagtgggtcaaatggggactggaaaaattccacccactagctcagctaatgggtaaaaatgctggacatttatctggagctgcagggggtaaagtgtcatccttgggaaattcaaagctggcctgtacctgctgagagcaccagggatatggtcacattgcaagcctgttgccagcaccccaggcagagtcatcaacaattactttggaggagggccacttccaccttccagggcataggtgacccctgtggaaaacaagtacccctggaacatcctagaagtggaggtggaccataaactagccactggaatgagaatgcagtaaaacagcttgcctcagagtggtcttccctggaacacacagcttctgttaagcattcatgattctgacgggccagtcatcccttcattgactttgtccagcagctccaccattacagtctcattttagaaaataaagacacttggaaacaaaaaaaaaaa

SEQ ID NO: 58934 - DNA, 318 bp, Homo sapiens
tgctatcacttgaagtttaatgagttctacataggtagtatgataaataggtagaaggtggacagatctgctggctttatggggcaaaaccaactcccttgaaaattagtctgccacagcaatcccgtttctatctcctcactcttcctatttcccaattcttacctttcatttatgctagctgaatttagaagtaattaagaggaaatagtgagagacttcaggctgcctcccccaacccctctcatctctctctttctcatagacacacacacatacctatgtgtgcacatgtaaatatctccccacaaaatatat

SEQ ID NO: 58935 - DNA, 332 bp, Homo sapiens
gtgggctgggcctgggactcatgaccctgcagcatctgaccggctgacccagtgtcctagaaagaaccattcttgtcccaggtgcatgtaatttattaatggatggaacatatcaataaatagaaatatttggaagtaatcttactgaagtgctgttctccatacagaagcctctagcaggaagaggatttacttgcaaagaaatatatttggtttttttgtttgtttgtttgttttgtttttggagttggagtttcgctgtgttgcccaggctggagtaagtggtgcggtctcagctcactacaatctgcacctcccaggttcaagggatt

SEQ ID NO: 58936 - DNA, 386 bp, Homo sapiens
ctaactaagtaagggttgccagataaagtacagaaggcccagttaaacttgaaatgcatatgaacaagaaatatattttagtatgaatatgtctcatgcaatatttgggacataattatgctaaagaaagtattcacagtttttccaacattcaaattggaatgagtgtcctgtatttttatttgctaaaatgggcaaccctaagctggtatctctacagttacatacacttaccaaccccacccattcatactggtccaagttacaccccaaaagagggcagaaacagaatctgaacaagctcaagtttggagggcaaaaatgtttcattctgccttctggattgctgtatgaagacttttgttgtgaaagatatgaatagaacc

SEQ ID NO: 58937 - DNA, 400 bp, Homo sapiens
ggtttgggcgttttcaggcggcctcctgagaaatgtttgcaattgtaaggcgtctctctcatccaggtttacccagattcgcaaactatggcgacaaacaaccatagcagaagcatgtccggattatttcacatatatcacaaaatcctgcaaaggggatggctaatccagagaataagaagctcagaaaactactggaataagagtgtaagagagaatccatgattagagggccaagaaagaccatgggagctgaaaggcattgtgtggccctgattccaatcagaagtccggtaacaagtagcttccgttcccaaagcttaatattaactgtctcaaataattttgcacctgttcacttttcctcacaattgtattaaagtcaacttgcatacctggg

SEQ ID NO: 58938 - DNA, 331 bp, Homo sapiens
tctgttgcccagtttagagttcagtgaccatcatggctatttatcagccttgacctctaaggctcaagtgatcctcaccttttcctctggagtagctgggactacaggtgtgcaccaccttgtgtggcctaactcaatattctgatggtgatttcacaggaaggaggaggtgcttcactttcctgataagctaccgtaaggcccctttctgcatgaggctcagacctggttcaaactctcctggcagaaacaattcaaccatgagctgtgctcgaggagggcatactcctggttttcaccttctggccaacaatccaagctggggaaggaa

SEQ ID NO: 58939 - DNA, 454 bp, Homo sapiens
ggtttgggcgttttcaggcggcctcctgagaaatgtttgcaattgtaaggcgtctctctcatccaggtttacccagattcgcaaactatggcgacaaacaaccatagcagaagcatgtccggattatttcacatatatcacaaaatcctgcaaagggtctgtccccattggatcacctcccatcacgccacacacgacgtgaatgacttcgtgcttctccatacctgcattgatctctgggtccattgccagttataaacctccaagggcaatagccatgaggaaggaggaggtgcttcactttcctgataagctaccgtaaggcccctttctgcatgaggctcagacctggttcaaactctcctggcagaaacaattcaaccatgagctgtgctcgaggagggcatactcctggttttcaccttctggccaacaatccaagctggggaaggaa

SEQ ID NO: 58940 - DNA, 239 bp, Homo sapiens
atgaggaggtgaggaaaaggagaagtgcagctaccatcgagtgattcttctgggataggtgtctcatttaaatctcataatcatcttttttggcaggtcagtcaacttcaggctcacagatgacagacagttggcccaaagacacacaggaaatacataagtgacaacgaaatacaagtccatgaattaaaaaaccatgcttttctctccttgccacacagctttagtttgaaaaaaaa

SEQ ID NO: 58941 - DNA, 497 bp, Homo sapiens
acgacatcgcatatctgaagaaccacttttcatggtaaaggttttacaagtgctgctactgattgtgcaagtattaacttttcctacaacttaacccgtaaaggcatatatgattctttttgttctttgaacctttttccaagttacctactttcttttccttttgaaatttctaattgaatacatgatctcatattgagcagagtatttatgaacttatttcacttgctttggatccttggaaaattgttaagtcttagccttgtttcccaaaaacctgcatgaatggtattctctgtatagtggacatgagtaaatattagtgtgacacctagtttagtgacagaaaagagaacagttgtgctttgtcctttgtagatcaaaaggctaaattaaaggactgcaggcttcttgtgaggactttgtccttgtttagaatatggaggtaaaaatagatcgctgtttgtgaatgaaactctaaagatggtagcggccgc

SEQ ID NO: 58942 - DNA, 304 bp, Homo sapiens
tatgaaggactattcctatacattagagtgaatttgagactatctccatcattctccagccattcttcagtgggagaaaaacggtggaattaaactagtggaaacaaggctttctcatctagtcccaatccagtcgataagctgtgtttgccaatcactgctccagcacaatggccctcagtttatttttaagtctatggcatgcctgaaggaccatgttcccatgagtgacacccttctgtaaatgtggtggcacattatgggctgctgttttagaagagactgccaacttgctggggattat

SEQ ID NO: 58943 - DNA, 554 bp, Homo sapiens
atgaaccacgtggatgtaactgagacactgaaaaggccatcgtagcttattgcccactgtcctgtgagaacgcacacatattcccaggtaactacagctcgagtgcacacatcatttgcattttgttttctcatttgccagagcaaacatttccctgtgttttcttcacagtttctatgattataatattaatgggtgcataatatttgtttagatctatgtatagtgattcactgaagccaacccctattgttgattctctccttttcttttcttttcctctccctctccccttccttcctccctccctccctccctccctccctcccttccttccttcttccaccttccctccctccctcccctcacctcccctcaccttccctcttcctcaccctaacacttaggctggagtgtaatggcataaccagggctcactgcagcccctaccttttgggctcaagtgatcctcccactcataggtgtgtgccaccacgcccagctaattttttgatttttagtagagacaaggtctcattatgttgcccaggctg

SEQ ID NO: 58944 - DNA, 433 bp, Homo sapiens
tttgtccctctcttactcatttttagaaatcatgtttatcgtttgcatttcttaaactattactaaagctcccttttctctgcaggaaataagctgcatgcattctttcactttgtgttgagctagtttctgtaattgtgactaattatttccttccttaattcactctactgtatctacctaaggtgcccctggagtttcatttgggtaattagtgccttcatatgtaatctggagtgcaatttctgtacgtttgccagatgagattgtacaatggctgtccagctcagctttcagtaaatagtcttatagtaatgactgtggttacttaaaggaatcagcatgatcctgcacagctaggaggcctcctctaattaaccacattcactccaggcttagggaagccctctacaaggaaactttatgaccactt

SEQ ID NO: 58945 - DNA, 397 bp, Homo sapiens
gcccatgaagcagctctcgtggattggagtctcatgcctgcagctctcccatactggagttgcatgctggtggtcctacagtgctggtgtctgggcagtggcctcactcccatggctccaggaggcattgccctggtgagggatctctgtggtggctctgtccctgtgacaagtttctgcctgggcttccaggctgtccatgatatcctttgaaatctaattggaggctggcatgaccccatggcttccacactctgtgcacctgcagaatcagcaccatgtggacactgccaagacctacctaccacttgtgctctctggagcagcagcacaagctacatctgggcctgcttgagccatggctggggctgccaaggagcagagtcctgaggtggcc

SEQ ID NO: 58946 - DNA, 690 bp, Homo sapiens
aaaataaaagtgaatataaaatgaataattttcaaaacatgcttataaatataaaattaaaaaggaggccagacgctgtggctcttttccagcccacttgtctacgctggatatcctgagggcacttgattttgtgaccccaggactaagtcaactctgagggctgtcagcctggagcatacagtcttatccactgttagaatgtcttttactgaaataacatttggcataaaacttgtagacataaaacagtctgcagccattcgtggtggctcacacctgtaatccagcactttgggaggccaaggcaggcagatgacttaagtcaggagtttaagaccagcctgggcaacatggcaaggcctgttctctacaaaaaaatacaaaaaattagctgggtgtggtggcccacacctgtagtcccaggtactggggagactgaggtgggaagatcacttgagctcacttgagctcgggagtcagaggttgcagtgaactgtgattggtccacactgcactccagcctgggtgacagctgtcaagtaccctgtctcatggtacttgcagttgatgctcactctttgtccactgaaatagttgcttcctttatctgctgtggcctcagatgctgaaagccttgacataatttccaaactataattttgtattggtaactggggaatcttttca

SEQ ID NO: 58947 - DNA, 495 bp, Homo sapiens
agcaagaggttggtgtggctgttaatttcttgcaaagatagaggctgttcacttactgcacagccatttcaacatggcttacaaaagcctttcttgacaaatcacttacctgttccagaactctgttatgaaaatccagagcttataatattttgaaaggcaaaagattgtctcccattacttcttatctgcttcactattgcataatgaatgagcttcacctgtggcatgttggaatgagccttatgatccaagtacattattcccgaactttgaaaaatactaatgcttagcttcagacaatactgatggatcaccaaagaactgtctaacgcaggagtttgcaaacattttttgatagaaggccatttgttctggtaaaagatccagtagtcaactcaacttcatctattcctacttttctgcaagagcttggggaacatgctatattttgctttatgtataccaaattttggtaaaccataataactcagt

SEQ ID NO: 58948 - DNA, 398 bp, Homo sapiens
cagctggggaggggacagccaggactattccgagaggtgcctttgcctccggaagaagagcgtggccatttcctgtggaggagttacactggctgtggcatggcctgtgttctggggtcatccccaggccagtgacctcaggcccgagtttcttccgtgtgggtttgcttatggcttgacgttgagtcacagatagcaaaatgtgataccctgtgtgggctttttgaagactcactcctggaacctcattgacaggagagaaagaaaaggcagggataggatcagagaacatgatggtgtgtagtttttcttaaaacatgtgatttaggttagaaaccctgtatttaaattaccaatcagtaacagaatatgttggcattgaaaataacatgagcatt

SEQ ID NO: 58949 - DNA, 123 bp, Homo sapiens
cttgtatttttgaaagtgctcttggattatagttttaaaaataacctctgttaacttaattttcttcctcaataacataaatattacagttttccattccattactttttctctaatcttttt

SEQ ID NO: 58950 - DNA, 392 bp, Homo sapiens
tgttccacactgccagagcattgtacaatcagggactcacacagctgcagcatgagagggatctcagggccactgagtcctgctccgtgcccaggctgtggatccctcctgtgatggggagctcactgcttcccagcccagcccaggctattgtcacacaggcccagtcacccacaccagcccctcaccagcacccagaatcctccctcccctcctaccaagctttcgaacaggcttttccaactcctgcctcctttggataagcagaaaaattggacacccttcctgcagcttaggcttatgggaatgacacttgttttatctacttgccaaaataaaaattgtactagagaacatgtttctggaatttggatttgccttgtcttaggtca

SEQ ID NO: 58951 - DNA, 2655 bp, Homo sapiens
  misc_feature (3)..(3): n is a, c, g, or t
  misc_feature (5)..(5): n is a, c, g, or t
  misc_feature (7)..(7): n is a, c, g, or t
ggnanangctcttcctctcctctcctcaacagcagcactccaagctcgccggcctttggtctccaggacttgtcccagcagcccctcgaactgagaattacaccatcggacccctggctctgaggccttcagacttggactgtgtcacactgccaggcttccagggctccaacttgcagacggcctgttgtgggacagtctctgtaatcgcgaaagcaaccatggaagacctgggggaaaacaccatggttttatccaccctgagatctttgaacaacttcatctctcagcgtgtggagggaggctctggactggatatttctacctcggccccaggttctctgcagatgcagtaccagcagagcatgcagctggaggaaagagcagagcagatccgttcgaagtcccacctcatccaggtggagcgggagaaaatgcagatggagctgagtcacaagagggctcgagtggagctggagagagcagccagcaccagtgccaggaactacgagcgtgaggtcgaccgcaaccaggagctcctgacgcgcatccggcagcttcaggagcgggaggccggggcggaggagaagatgcaggagcagctggagcgcaacaggcagtgtcagcagaacttggatgctgccagcaagaggctgcgtgagaaagaggacagtctggcccaggctggcgagaccatcaacgcactgaaggggaggatctcggaactgcagtggagcgtgatggaccaggagatgcgggtgaagcgcctggagtcggagaagcaggagctgcaggagcagctggacctgcaacacaaaaaatgccaggaagccaatcagaaaatccaggaactccaggccagccaagaagcaagagcagaccacgagcagcagattaaggatctggagcagaagctgtccctgcaagagcaggatgcagcgattgtgaagaacatgaagtctgagctggtacggctccctaggctggaacgggagctgaagcagctgcgggaggagagcgcgcacctgcgggagatgagagagaccaacgggctgctccaggaagagctggaagggctgcagaggaagctggggcgccaggagaagatgcaggagacgctggttggcttggagctggagaacgagaggctgctggccaagctgcaaagctgggagagactggaccagaccatgggcctgagcatcaggactccagaagacctttccagattcgtggttgagctgcagcagagggagcttgccttgaaggacaagaacagcgccgtcaccagcagcgcccgggggctggagaaggccaggcagcagctgcaggaggagctccggcaggtcagcggccagctgttggaggagaggaagaagcgcgagacccacgaggcgctggcccggaggctccagaaacgggtcctgctgctcaccaaggagcgggacggtatgcgggccatcctggggtcctacgacagcgagctgaccccggccgagtactcaccccagctgacgcggcgcatgcgggaggctgaggatatggtgcagaaggtgcacagccacagcgccgagatggaggctcagctgtcgcaggccctggaggagctgggaggccagaaacaaagagcagacatgctggagatggagctgaagatgctgaagtctcagtccagctctgccgaacagagcttcctgttctccagggaggaggcggacacgctcaggttgaaggtcgaggagctggaaggcgagcggagtcggctggaggaggaaaagaggatgctggaggcacagctggagcggcgagctctgcagggtgactatgaccagagcaggaccaaagtgctgcacatgagcctgaaccccaccagtgtggccaggcagcgcctgcgcgaggaccacagccagctgcaggcggagtgcgagcgactgcgcgggctcctgcgcgccatggagagaggaggcaccgtcccagccgaccttgaggctgccgccgcgagtctgccatcgtccaaggaggtggcagagctgaagaagcaggtggagagtgccgagctgaagaaccagcggctcaaggaggttttccagaccaagatccaggagttccgcaaggcctgctacacgctcaccggctaccagatcgacatcaccacggagaaccagtaccggctgacctcgctgtacgccgagcacccaggcgactgcctcatcttcaaggccaccagcccctcgggttccaagatgcagctactggagacagagttctcacacaccgtgggcgagctcatcgaggtgcacctgcggcgccaggacagcatccctgccttcctcagctcgctcaccctcgagctcttcagccgccagaccgtggcgtagcctgcaggctcgggggcatagccggagccactctgcttggcctgacctgcaggtcccctgccccgccagccacaggctgggtgcacgtcctgcctctccagccccacagggcagcagcatgactgacagacacgctgggacctacgtcgggcttcctgctggggcggccagcaccctctccacgtgcagaccccatgcgtcccggagcctggtgtgtgggcgtcggccaccagcctgggttcctcaccttgtgaaataaaatcttctcccctaaaaa

SEQ ID NO: 58952 - DNA, 864 bp, Homo sapiens
cagcctctctcagaaggtggccacctctgtcacagctctcctgggttttgggctggagtaccctggatgaggacagcacaagctcgtactccacccggggctccgggagtgcttggtgcttcccgaggaaggcaggcgtgaggtcgaccgcaaccaggagctcctgacgcgcatccggcagcttcaggagcgggaggccggggcggaggagaagatgcaggagcagctggagcgcaacaggcagtgtcagcagaacttggatgctgccagcaagaggctgcgtgagaaagaggacagtctggcccaggctggcgagaccatcaacgcactgaaggggaggatctcggaactgcagtggagcgtgatggaccaggagatgcgggtgaagcgcctggagtcggagaagcaggagctgcaggagcagctggacctgcaacacaaaaaatgccaggaagccaatcagaaaatccaggaactccaggccagccaagaagcaagagcagaccacgagcagcagattaaggatctggagcagaagctgtccctgcaagagcaggatgcagcgattgtgaagaacatgaagtctgagctggtacggctccctaggctggaacgggagctgaagcagctgcgggaggagagcgcgcacctgcgggagatgagagagaccaacgggctgctccaggaagagctggaagggctgcagaggaagctggggcgccaggagaagatgcaggagacgctggttggcttggagctggagaacgagaggctgctggccaagctgcaaagctgggagagactggaccagaccatgggcctgagcatcagggaccaggtttggggtagttcttaggaatttcc

SEQ ID NO: 58953 - DNA, 2556 bp, Homo sapiens
gtcgcgataaatgggcgccggcggagcggagggagatccgagcggcggcggcaagctggctgcgagcggctgagcagcactccaagctcgccggcctttggtctccaggacttgtcccagcagcccctcgaactgagaattacaccatcggacccctggctctgaggccttcagacttggactgtgtcacactgccaggcttccagggctccaacttgcagacggcctgttgtgggacagtctctgtaatcgcgaaagcaaccatggaagacctgggggaaaacaccatggttttatccaccctgagatctttgaacaacttcatctctcagcgtgtggagggaggctctggactggatatttctacctcggccccaggttctctgcagatgcagtaccagcagagcatgcagcgtgaggtcgaccgcaaccaggagctcctgacgcgcatccggcagcttcaggagcgggaggccggggcggaggagaagatgcaggagcagctggagcgcaacaggcagtgtcagcagaacttggatgctgccagcaagaggctgcgtgagaaagaggacagtctggcccaggctggcgagaccatcaacgcactgaaggggaggatctcggaactgcagtggagcgtgatggaccaggagatgcgggtgaagcgcctggagtcggagaagcaggagctgcaggagcagctggacctgcaacacaaaaaatgccaggaagccaatcagaaaatccaggaactccaggccagccaagaagcaagagcagaccacgagcagcagattaaggatctggagcagaagctgtccctgcaagagcaggatgcagcgattgtgaagaacatgaagtctgagctggtacggctccctaggctggaacgggagctgaagcagctgcgggaggagagcgcgcacctgcgggagatgagagagaccaacgggctgctccaggaagagctggaagggctgcagaggaagctggggcgccaggagaagatgcaggagacgctggttggcttggagctggagaacgagaggctgctggccaagctgcaaagctgggagagactggaccagaccatgggcctgagcatcaggactccagaagacctttccagattcgtggttgagctgcagcagagggagcttgccttgaaggacaagaacagcgccgtcaccagcagcgcccgggggctggagaaggccaggcagcagctgcaggaggagctccggcaggtcagcggccagctgttggaggagaggaagaagcgcgagacccacgaggcgctggcccggaggctccagaaacgggtcctgctgctcaccaaggagcgggacggtatgcgggccatcctggggtcctacgacagcgagctgaccccggccgagtactcaccccagctgacgcggcgcatgcgggaggctgaggatatggtgcagaaggtgcacagccacagcgccgagatggaggctcagctgtcgcaggccctggaggagctgggaggccagaaacaaagagcagacatgctggagatggagctgaagatgctgaagtctcagtccagctctgccgaacagagcttcctgttctccagggaggaggcggacacgctcaggttgaaggtcgaggagctggaaggcgagcggagtcggctggaggaggaaaagaggatgctggaggcacagctggagcggcgagctctgcagggtgactatgaccagagcaggaccaaagtgctgcacatgagcctgaaccccaccagtgtggccaggcagcgcctgcgcgaggaccacagccagctgcaggcggagtgcgagcgactgcgcgggctcctgcgcgccatggagagaggaggcaccgtcccagccgaccttgaggctgccgccgcgagtctgccatcgtccaaggaggtggcagagctgaagaagcaggtggagagtgccgagctgaagaaccagcggctcaaggaggttttccagaccaagatccaggagttccgcaaggcctgctacacgctcaccggctaccagatcgacatcaccacggagaaccagtaccggctgacctcgctgtacgccgagcacccaggcgactgcctcatcttcaaggccaccagcccctcgggttccaagatgcagctactggagacagagttctcacacaccgtgggcgagctcatcgaggtgcacctgcggcgccaggacagcatccctgccttcctcagctcgctcaccctcgagctcttcagccgccagaccgtggcgtagcctgcaggctcgggggcatagccggagccactctgcttggcctgacctgcaggtcccctgccccgccagccacaggctgggtgcacgtcctgcctctccagccccacagggcagcagcatgactgacagacacgctgggacctacgtcgggcttcctgctggggcggccagcaccctctccacgtgcagaccccatgcgtcccggagcctggtgtgtgggcgtcggccaccagcctgggttcctcaccttgtgaaataaaatcttctcccctaaaaa

SEQ ID NO: 58954 - DNA, 1809 bp, Homo sapiens
aggatttccacggggacgcagccaaaccatatcaccttggctgtggcctccactgtgcctgggactggccacagagagctgtgtctccgtggctgccttctccttgcctgtttgcgtggtctcgaggaagctgcacagcagggcccgagtcggccgtgtgagccgctctccctgtcaaagcacacccatccctgcctgctttgacctgaacttggtgaccttcaggccatcagtggagtggggcagaatgaatagcctgtcctggctcatggcagccaccgggtgaggcgcctgcatgcgtggctcggaggccttctgcaggcacaacccccaccgtgggcctggcagcttgtgtgggaggcgtgcgggtcggtggcagagggtgagcaccagccctgtgtgaaccttcacaactcctctgtggaccctggacttggcttcactgctgcgcccgggggctggagaaggccaggcagcagctgcaggaggagctccggcaggtcagcggccagctgttggaggagaggaagaagcgcgagacccacgaggcgctggcccggaggctccagaaacgggtcctgctgctcaccaaggagcgggacggtatgcgggccatcctggggtcctacgacagcgagctgaccccggccgagtactcaccccagctgacgcggcgcatgcgggaggctgaggatatggtgcagaaggtgcacagccacagcgccgagatggaggctcagctgtcgcaggccctggaggagctgggaggccagaaacaaagagcagacatgctggagatggagctgaagatgctgaagtctcagtccagctctgccgaacagagcttcctgttctccagggaggaggcggacacgctcaggttgaaggtcgaggagctggaaggcgagcggagtcggctggaggaggaaaagaggatgctggaggcacagctggagcggcgagctctgcagggtgactatgaccagagcaggaccaaagtgctgcacatgagcctgaaccccaccagtgtggccaggcagcgcctgcgcgaggaccacagccagctgcaggcggagtgcgagcgactgcgcgggctcctgcgcgccatggagagaggaggcaccgtcccagccgaccttgaggctgccgccgcgagtctgccatcgtccaaggaggtggcagagctgaagaagcaggtggagagtgccgagctgaagaaccagcggctcaaggaggttttccagaccaagatccaggagttccgcaaggcctgctacacgctcaccggctaccagatcgacatcaccacggagaaccagtaccggctgacctcgctgtacgccgagcacccaggcgactgcctcatcttcaaggccaccagcccctcgggttccaagatgcagctactggagacagagttctcacacaccgtgggcgagctcatcgaggtgcacctgcggcgccaggacagcatccctgccttcctcagctcgctcaccctcgagctcttcagccgccagaccgtggcgtagcctgcaggctcgggggcatagccggagccactctgcttggcctgacctgcaggtcccctgccccgccagccacaggctgggtgcacgtcctgcctctccagccccacagggcagcagcatgactgacagacacgctgggacctacgtcgggcttcctgctggggcggccagcaccctctccacgtgcagaccccatgcgtcccggagcctggtgtgtgggcgtcggccaccagcctgggttcctcaccttgtgaaataaaatcttctcccctaaaaa

SEQ ID NO: 58955 - DNA, 2697 bp, Homo sapiens
gtcgcgataaatgggcgccggcggagcggagggagatccgagcggcggcggcaagctggctgcgagcggctgagcagcactccaagctcgccggcctttggtctccaggacttgtcccagcagcccctcgaactgagaattacaccatcggacccctggctctgaggccttcagacttggactgtgtcacactgccaggcttccagggctccaacttgcagacggcctgttgtgggacagtctctgtaatcgcgaaagcaaccatggaagacctgggggaaaacaccatggttttatccaccctgagatctttgaacaacttcatctctcagcgtgtggagggaggctctggactggatatttctacctcggccccaggttctctgcagatgcagtaccagcagagcatgcagctggaggaaagagcagagcagatccgttcgaagtcccacctcatccaggtggagcgggagaaaatgcagatggagctgagtcacaagagggctcgagtggagctggagagagcagccagcaccagtgccaggaactacgagcgtgaggtcgaccgcaaccaggagctcctgacgcgcatccggcagcttcaggagcgggaggccggggcggaggagaagatgcaggagcagctggagcgcaacaggcagtgtcagcagaacttggatgctgccagcaagaggctgcgtgagaaagaggacagtctggcccaggctggcgagaccatcaacgcactgaaggggaggatctcggaactgcagtggagcgtgatggaccaggagatgcgggtgaagcgcctggagtcggagaagcaggagctgcaggagcagctggacctgcaacacaaaaaatgccaggaagccaatcagaaaatccaggaactccaggccagccaagaagcaagagcagaccacgagcagcagattaaggatctggagcagaagctgtccctgcaagagcaggatgcagcgattgtgaagaacatgaagtctgagctggtacggctccctaggctggaacgggagctgaagcagctgcgggaggagagcgcgcacctgcgggagatgagagagaccaacgggctgctccaggaagagctggaagggctgcagaggaagctggggcgccaggagaagatgcaggagacgctggttggcttggagctggagaacgagaggctgctggccaagctgcaaagctgggagagactggaccagaccatgggcctgagcatcaggactccagaagacctttccagattcgtggttgagctgcagcagagggagcttgccttgaaggacaagaacagcgccgtcaccagcagcgcccgggggctggagaaggccaggcagcagctgcaggaggagctccggcaggtcagcggccagctgttggaggagaggaagaagcgcgagacccacgaggcgctggcccggaggctccagaaacgggtcctgctgctcaccaaggagcgggacggtatgcgggccatcctggggtcctacgacagcgagctgaccccggccgagtactcaccccagctgacgcggcgcatgcgggaggctgaggatatggtgcagaaggtgcacagccacagcgccgagatggaggctcagctgtcgcaggccctggaggagctgggaggccagaaacaaagagcagacatgctggagatggagctgaagatgctgaagtctcagtccagctctgccgaacagagcttcctgttctccagggaggaggcggacacgctcaggttgaaggtcgaggagctggaaggcgagcggagtcggctggaggaggaaaagaggatgctggaggcacagctggagcggcgagctctgcagggtgactatgaccagagcaggaccaaagtgctgcacatgagcctgaaccccaccagtgtggccaggcagcgcctgcgcgaggaccacagccagctgcaggcggagtgcgagcgactgcgcgggctcctgcgcgccatggagagaggaggcaccgtcccagccgaccttgaggctgccgccgcgagtctgccatcgtccaaggaggtggcagagctgaagaagcaggtggagagtgccgagctgaagaaccagcggctcaaggaggttttccagaccaagatccaggagttccgcaaggcctgctacacgctcaccggctaccagatcgacatcaccacggagaaccagtaccggctgacctcgctgtacgccgagcacccaggcgactgcctcatcttcaaggccaccagcccctcgggttccaagatgcagctactggagacagagttctcacacaccgtgggcgagctcatcgaggtgcacctgcggcgccaggacagcatccctgccttcctcagctcgctcaccctcgagctcttcagccgccagaccgtggcgtagcctgcaggctcgggggcatagccggagccactctgcttggcctgacctgcaggtcccctgccccgccagccacaggctgggtgcacgtcctgcctctccagccccacagggcagcagcatgactgacagacacgctgggacctacgtcgggcttcctgctggggcggccagcaccctctccacgtgcagaccccatgcgtcccggagcctggtgtgtgggcgtcggccaccagcctgggttcctcaccttgtgaaataaaatcttctcccctaaaaa

SEQ ID NO: 58956 - DNA, 2513 bp, Homo sapiens
tacgggtgaggtacagctacgggtgaggtacagctacgggtgaggtacagctggctgcgagcggctgaggaaagcaaccatggaagacctgggggaaaacaccatggttttatccaccctgagatctttgaacaacttcatctctcagcgtgtggagggaggctctggactggatatttctacctcggccccaggttctctgcagatgcagtaccagcagagcatgcagctggaggaaagagcagagcagatccgttcgaagtcccacctcatccaggtggagcgggagaaaatgcagatggagctgagtcacaagagggctcgagtggagctggagagagcagccagcaccagtgccaggaactacgagcgtgaggtcgaccgcaaccaggagctcctgacgcgcatccggcagcttcaggagcgggaggccggggcggaggagaagatgcaggagcagctggagcgcaacaggcagtgtcagcagaacttggatgctgccagcaagaggctgcgtgagaaagaggacagtctggcccaggctggcgagaccatcaacgcactgaaggggaggatctcggaactgcagtggagcgtgatggaccaggagatgcgggtgaagcgcctggagtcggagaagcaggagctgcaggagcagctggacctgcaacacaaaaaatgccaggaagccaatcagaaaatccaggaactccaggccagccaagaagcaagagcagaccacgagcagcagattaaggatctggagcagaagctgtccctgcaagagcaggatgcagcgattgtgaagaacatgaagtctgagctggtacggctccctaggctggaacgggagctgaagcagctgcgggaggagagcgcgcacctgcgggagatgagagagaccaacgggctgctccaggaagagctggaagggctgcagaggaagctggggcgccaggagaagatgcaggagacgctggttggcttggagctggagaacgagaggctgctggccaagctgcaaagctgggagagactggaccagaccatgggcctgagcatcaggactccagaagacctttccagattcgtggttgagctgcagcagagggagcttgccttgaaggacaagaacagcgccgtcaccagcagcgcccgggggctggagaaggccaggcagcagctgcaggaggagctccggcaggtcagcggccagctgttggaggagaggaagaagcgcgagacccacgaggcgctggcccggaggctccagaaacgggtcctgctgctcaccaaggagcgggacggtatgcgggccatcctggggtcctacgacagcgagctgaccccggccgagtactcaccccagctgacgcggcgcatgcgggaggctgaggatatggtgcagaaggtgcacagccacagcgccgagatggaggctcagctgtcgcaggccctggaggagctgggaggccagaaacaaagagcagacatgctggagatggagctgaagatgctgaagtctcagtccagctctgccgaacagagcttcctgttctccagggaggaggcggacacgctcaggttgaaggtcgaggagctggaaggcgagcggagtcggctggaggaggaaaagaggatgctggaggcacagctggagcggcgagctctgcagggtgactatgaccagagcaggaccaaagtgctgcacatgagcctgaaccccaccagtgtggccaggcagcgcctgcgcgaggaccacagccagctgcaggcggagtgcgagcgactgcgcgggctcctgcgcgccatggagagaggaggcaccgtcccagccgaccttgaggctgccgccgcgagtctgccatcgtccaaggaggtggcagagctgaagaagcaggtggagagtgccgagctgaagaaccagcggctcaaggaggttttccagaccaagatccaggagttccgcaaggcctgctacacgctcaccggctaccagatcgacatcaccacggagaaccagtaccggctgacctcgctgtacgccgagcacccaggcgactgcctcatcttcaaggccaccagcccctcgggttccaagatgcagctactggagacagagttctcacacaccgtgggcgagctcatcgaggtgcacctgcggcgccaggacagcatccctgccttcctcagctcgctcaccctcgagctcttcagccgccagaccgtggcgtagcctgcaggctcgggggcatagccggagccactctgcttggcctgacctgcaggtcccctgccccgccagccacaggctgggtgcacgtcctgcctctccagccccacagggcagcagcatgactgacagacacgctgggacctacgtcgggcttcctgctggggcggccagcaccctctccacgtgcagaccccatgcgtcccggagcctggtgtgtgggcgtcggccaccagcctgggttcctcaccttgtgaaataaaatcttctcccctaaaaa

SEQ ID NO: 58957 - DNA, 1798 bp, Homo sapiens
gtcgcgataaatgggcgccggcggagcggagggagatccgagcggcggcggcaagctggctgcgagcggctgagcagcactccaagctcgccggcctttggtctccaggacttgtcccagcagcccctcgaactgagaattacaccatcggacccctggctctgaggccttcagacttggactgtgtcacactgccaggcttccagggctccaacttgcagacggcctgttgtgggacagtctctgtaatcgcgaaagcaaccatggaagacctgggggaaaacaccatggttttatccaccctgagatctttgaacaacttcatctctcagcgtgtggagggaggctctggactggatatttctacctcggccccaggttctctgcagatgcagtaccagcagagcatgcagctggaggaaagagcagagcagatccgttcgaagtcccacctcatccaggtggagcgggagaaaatgcagatggagctgagtcacaagagggctcgagtggagctggagagagcagccagcaccagtgccaggaactacgagcgtgaggtcgaccgcaaccaggagctcctgacgcgcatccggcagcttcaggagcgggaggccggggcggaggagaagatgcaggagcagctggagcgcaacaggcagtgtcagcagaacttggatgctgccagcaagaggctgcgtgagaaagaggacagtctggcccaggctggcgagaccatcaacgcactgaaggggaggatctcggaactgcagtggagcgtgatggaccaggagatgcgggtgaagcgcctggagtcggagaagcaggagctgcaggagcagctggacctgcaacacaaaaaatgccaggaagccaatcagaaaatccaggaactccaggccagccaagaagcaagagcagaccacgagcagcagattaaggatctggagcagaagctgtccctgcaagagcaggatgcagcgattgtgaagaacatgaagtctgagctggtacggctccctaggctggaacgggagctgaagcagctgcgggaggagagcgcgcacctgcgggagatgagagagaccaacgggctgctccaggaagagctggaagggctgcagaggaagctggggcgccaggagaagatgcaggagacgctggttggcttggagctggagaacgagaggctgctggccaagctgcaaagctgggagagactggaccagaccatgggcctgagcatcagttggtggtgatgtatgggcggagcctccagtgctcttggctgctgtgacagggcccccctggggtcctgcactatcccagcgagacccccaaagcaaggccagcagagagcttcctgacagctgcctcgctttggcgacagccctggctggggtgcagcctgtgcccctctccgcccccttgtgaagtttcggatgggcgttcccagcagtgctgacaggctcacgccgcccttgggcttcattccaggtgcagagagctctgatctcccacgatcggaagtaccgtgtgcgttgtcttacctgggcagaatgcagagaccttcactggcagctgtgtgtggaccctggggctctgttacacagccaggtgctgaggagcagggctccgagccaggccagcgaaccttccttagaccccctgtgtgcaggcctggtgcctggtgtcgggggcccagtggagaacaagatccggctgttgccatgggactttcgtctggtggggagtcctgaggaggatgtggatgaggtggagaagaggttccaggtga

SEQ ID NO: 58958 - DNA, 1643 bp, Homo sapiens
aggatttccacggggacgcagccaaaccatatcaccttggctgtggcctccactgtgcctgggactggccacagagagctgtgtctccgtggctgccttctccttgcctgtttgcgtggtctcgaggaagctgcacagcagggcccgagtcggccgtgtgagccgctctccctgtcaaagcacacccatccctgcctgctttgacctgaacttggtgaccttcaggccatcagtggagtggggcagaatgaatagcctgtcctggctcatggcagccaccggcgcccgggggctggagaaggccaggcagcagctgcaggaggagctccggcaggtcagcggccagctgttggaggagaggaagaagcgcgagacccacgaggcgctggcccggaggctccagaaacgggtcctgctgctcaccaaggagcgggacggtatgcgggccatcctggggtcctacgacagcgagctgaccccggccgagtactcaccccagctgacgcggcgcatgcgggaggctgaggatatggtgcagaaggtgcacagccacagcgccgagatggaggctcagctgtcgcaggccctggaggagctgggaggccagaaacaaagagcagacatgctggagatggagctgaagatgctgaagtctcagtccagctctgccgaacagagcttcctgttctccagggaggaggcggacacgctcaggttgaaggtcgaggagctggaaggcgagcggagtcggctggaggaggaaaagaggatgctggaggcacagctggagcggcgagctctgcagggtgactatgaccagagcaggaccaaagtgctgcacatgagcctgaaccccaccagtgtggccaggcagcgcctgcgcgaggaccacagccagctgcaggcggagtgcgagcgactgcgcgggctcctgcgcgccatggagagaggaggcaccgtcccagccgaccttgaggctgccgccgcgagtctgccatcgtccaaggaggtggcagagctgaagaagcaggtggagagtgccgagctgaagaaccagcggctcaaggaggttttccagaccaagatccaggagttccgcaaggcctgctacacgctcaccggctaccagatcgacatcaccacggagaaccagtaccggctgacctcgctgtacgccgagcacccaggcgactgcctcatcttcaaggccaccagcccctcgggttccaagatgcagctactggagacagagttctcacacaccgtgggcgagctcatcgaggtgcacctgcggcgccaggacagcatccctgccttcctcagctcgctcaccctcgagctcttcagccgccagaccgtggcgtagcctgcaggctcgggggcatagccggagccactctgcttggcctgacctgcaggtcccctgccccgccagccacaggctgggtgcacgtcctgcctctccagccccacagggcagcagcatgactgacagacacgctgggacctacgtcgggcttcctgctggggcggccagcaccctctccacgtgcagaccccatgcgtcccggagcctggtgtgtgggcgtcggccaccagcctgggttcctcaccttgtgaaataaaatcttctcccctaaaaa

SEQ ID NO: 58959 - DNA, 298 bp, Homo sapiens
tttttcttgcatctgttcttccagctcacaggccccttcccctcacgacatggaaagagagatgagtttccactaagacaagaccttagctctgacttgatgtcttaagcaggagatgtaaaacctaactcacagtgtccgcggggtcctgaatttctgttccacccctttcagccaactggcagcttggactggagttagcgacagatgtcttctgagcaggacttacagggagtgagcctgtccatggcaagctccagccagctctgctcctcctgccctacctcttaggtgaccc

SEQ ID NO: 58960 - DNA, 445 bp, Homo sapiens
tccccgcactaaggattgaaaattctagccaaacctggatttagcagatggaggctgaagtctttctatattagaaataaaacctcatctttgatccccatcaactcccgctgcttacgtgtctttaaaccatgttccaaccctaaccacagcctatttcaatgtgaatctcaaacttagttctaacccaatgctaaatcaatctaaacccagcctttgatttagccctaactgtattcccaggcagagctgtaaatgaaactaaaactctattccttatcgtaacacaaatcccagccataaacctgagcctcaattctagctgtatttctaaccctaatcccaaccttaactctaatcccaacctcaaatctgacctcaacctcattcataattcaactaaccccaaacttaaccccagctctaacattagcccacatccaga

SEQ ID NO: 58961 - DNA, 218 bp, Homo sapiens
cctcaagcaatcctcccccctcagcctcccgaagtgctgggagtgagccactgtgcctggccgaaatgcccaatttaaaccccgtctgttctgtctcctgctgaaatagaatagacaaagatgtggtttgtgttggatgctttactgctagagagtgaactgtatttttttctaagaaagttgaaggctcagtgggtctagaatctgatggctggacc

SEQ ID NO: 58962 - DNA, 308 bp, Homo sapiens
cctgaacagtctgtttcatttgactgtttgggggtctcccagtttaagcaagatatttaagccttatttctcttggcatgcttggattccccagtaaaaaaaactcctgccctgggctgacaatcaaagttctgggaactaatatggataagcaagctggaaatggagaaggctattcactgtgcctgggtcctactgttttctggatgggaactgctttccattaggcctggtgtgccctggaagggagagcctctgcagagactacatcttggatgggtctttgccaagtttgaggtagaaaccca

SEQ ID NO: 58963 - DNA, 320 bp, Homo sapiens
gactccgtttcaaaaaaaaaaaaaaaaaaggccaaaaggccttctaatataacttacaaaaaccaatagcatttctctgtacacgtactatacaaaactggaaaaattaagatagttgtaatagttagaatgtctataaagtgcttaggaattgatttaaaacatacataagatttgtctggagcacaccataaaactctaataaagaatataagaaatgatctgagtagatatattcttgtttttgattcaaacagcttaataaaattgtcaattcttccttaattaatctatacattcagtggaaacttattaaaaat

SEQ ID NO: 58964 - DNA, 317 bp, Homo sapiens
ctgttccacctcagatcatcaggcattagattctcataaggagtgtgcaacctagatccctcccatgtgctgttcacagcaggatttgcactcctataagaatctaatgccactgcagatctggcaggaggcggagctgaggtgggaaggtggtattgctcgctcgctcgcctactgctcacctcctgctgtggggtccagttcccaccacagaccactggtctgtgactcagggaccactaccttctaacatggatgagaaaaacaactggattcatcacacattatttaaagttcagtttccaataacttatcaa

SEQ ID NO: 58965 - DNA, 395 bp, Homo sapiens
attggaactattcttgggtaagttagataaagggtgagaattttgcagactaaatgtagcagcaagctataaaagttagggtagataggtacatatgatagcagctggtggcctacatggggtggtggcctgtaataactcaaagggttccaatgagctattacatgtctaacatgaatagatagtttaaaaaggaagtcccatgcattttttagaggttcccaattaggacagtttgacatgtgaacaaaagtgaacaaggtcttcagcctttgaaatactgtagtgaggagttagaggaaccccttcttcttcttgaagataattataataatagaagggataaggaggcaatcagctggtaatttcaagtgaactctaagagttcctggatg

SEQ ID NO: 58966 - DNA, 1071 bp, Homo sapiens
gtgcgtgcctctaatcccagctacttgggaggctgaggcggaagaatcgcttgaacccaggaggcagaggttgcactgagccacagttgtaccactgcaccactccagtctagacgacagagtgagaatctgtctcaaaaataaaggtctctaccatgaaaccttctctgttacatgctagctgaaatggtttcctctccctctggtgacagaaacatcttacttccatcttccttatgatatgtagtacattgtcttgaattatagttacttgagtaggtatgtattcttcctgtcttccttattagattatcttcttctcccagacaggatcctactttcctttatatcctccacaattgggcactcaagtgttttcggaattaatgggagaagtcattttgttagaagattgggatttcctttgcccccatatttccctactttcagaagagctttagaagaaaatccaaagggaacactgacagcgagggctcctagggaggaaattaccttccaccttcttctgtcttgtcttggtgcattaggccgttcttgcattgctatagacaaatacctaagactgtataatttataaagtaaagaggtttcattgacttacggttctgcaggttgtacaggaagcatttcggcttctagggaggcctaaggaaggctacaatcatggcagaaggcgaaaggggagcaggcactttacatggcgaaagcaggagcaaagagtggggcagtcccacctacttttcaaggaccagatcttgcaagaattcagccactaccacatagacagcacccaagccctgagggatccaccctgccatccagacacctcccaccaggccccatctccagcagtggggattacaattcgacatgagatttgggtggggacaaatattccaccatgtcacttggctgtatcagtttagggaaatgttatgacttgctttacactcagtcagcctctgttttgccattgtgcatgaataatttgcttgggtgtattagtgcctgattctgctgactcattcgttctgctcctcagggaataaa

SEQ ID NO: 58967 - DNA, 934 bp, Homo sapiens
  misc_feature (2)..(2): n is a, c, g, or t
tnaggctaggtacgaggctggtgttaatcggccgaggctgaaccgcgcggccgaaccctccggtgtcccgacccaggctaagcttgagcatggctgagcaggagcccacagccgagcagctggcccagattgcagcggagaacgaggaggatgagcactcggtcaactacaagcccccggcccagaagagcatccaggagatccaggagctggacaaggacgacgagagcctgcgaaagtacaaggaggccctgctgggccgcgtggccgtttccgcagaccccaacgtccccaacgtcgtggtgactggcctgaccctggtgtgcagctcggccccgggccccctggagctggacctgacgggcgacctggagagcttcaagaagcagtcgtttgtgctgaaggagggtgtggagtaccggataaaaatctctttccgggttaaccgagagatagtgtccggcatgaagtacatccagcatacgtacaggaaaggcgtcaagattgacaagactgactacatggtaggcagctatgggccccgggccgaggagtacgagttcctgacccccgtggaggaggcacccaagggtatgctggcccggggcagctacagcatcaagtcccgcttcacagacgacgacaagaccgaccacctgtcctgggagtggaatctcaccatcaagaaggactggaaggactgagcccagccagaggcgggcagggcagactgacggacggacgacggacaggcggatgtgtaccagacaacgctcaaccgaaacacgtgaagacacacgacccacaggcgacaaccacacaagacgacgaacacgcacaaacacaacacgacgccaacagaaaaaaaagcaccaacgcaccaaccaacatgccaaccgccacaccaccacaccgaaaacgtgaagccacaaca

SEQ ID NO: 58968 - DNA, 543 bp, Homo sapiens
  misc_feature (2)..(2): n is a, c, g, or t
tnaggctaggtacgaggctggtgttaatcggccgagggtgtgcagctcggcccgggcccctggagctggacctgactgggcgacctggagagcttcaagaagcagtcgtttgtgctgaaggagggtgtggagtaccggataaaaatctctttccgggttaacctgagagatatgtgtcctggcgatgaatgtacgatccatgcatactgtacatgtgaaatggctgtcaatgattgacaagactgactacatggtaggcagctatgggccccgggccgaggagtacgagttcctgacccccgtggaggaggcacccaagggtatgctggcccggggcagctacagcatcaagtcccgcttcacagacgacgacaagaccgaccacctgtcctgggagtggaatctcaccatcaagaaggactggaaggactgagcccagccagaggcgggcagggcagactgacggacggacgacggacaggcggatgtgtgcggtgcagtgaagaggaggagaaaagaaagaaaagggaaaaaggaagagaa

SEQ ID NO: 58969 - DNA, 1888 bp, Homo sapiens
ccggaagtgacgaggcagggcgggcggggcggccgacgacgttcgtcatttagtgcgggagggatcctgaaccgcgcggccgaaccctccggtgtcccgacccaggctaagcttgagcatggctgagcaggagcccacagccgagcagctggcccagattgcagcggagaacgaggaggatgagcactcggtcaactacaagcccccggcccagaagagcatccaggagatccaggagctggacaaggacgacgagagcctgcgaaagtacaaggaggccctgctgggccgcgtggccgtttccgcagaccccaacgtccccaacgtcgtggtgactggcctgaccctggtgtgcagctcggccccgggccccctggagctggacctgacgggcgacctggagagcttcaagaagcagtcgtttgtgctgaaggagggtgtggagtaccggataaaaatctctttccgggttaaccgagagatagtgtccggcatgaagtacatccagcatacgtacaggaaaggcgtcaagattgacaagactgactacatggtaggcagctatgggccccgggccgaggagtacgagttcctgacccccgtggaggaggcacccaagggtatgctggcccggggcagctacagcatcaagtcccgcttcacagacgacgacaagaccgaccacctgtcctgggagtggaatctcaccatcaagaaggactggaaggactgagcccagccagaggcgggcagggcagactgacggacggacgacggacaggcggatgtgtcccccccagcccctcccctccccataccaaagtgctgacaggccctccgtgcccctcccaccctggtccgcctccctggcctggctcaaccgagtgcctccgacccccctcctcagccctcccccacccacaggcccagcctcctcggtctcctgtctcgttgctgcttctgcctgtgctgtgggggagagaggccgcagccaggcctctgctgccctttctgtgccccccaggttctatctccccgtcacacccgaggcctggcttcaggagggagcggagcagccattctccaggccccgtggttgcccctggacgtgtgcgtctgctgctccggggtggagctggggtgtgggatgcacggcctcgtgggggccgggccgtcctccagccccgctgctccctggccagcccccttgtcgctgtcggtcccgtctaaccatgatgccttaacatgtggagtgtaccgtggggcctcactagcctctaactccctgtgtctgcatgagcatgtggcctccccgtcccttccccggtggcgaacccagtgacccagggacacgtggggtgtgctgctgctgctccccagcccaccagtgcctggccagcctgcccccttccctggacagggctgtggagatggctccggcggcttggggaaagccaaattgccaaaactcaagtcacctcagtaccatccaggaggctgggtattgtcctgcctctgccttttctgtctcagcgggcagtgcccagagcccacacccccccaagagccctcgatggacagcctcacccaccccacctgggcccagccaggagccccgcctggccatcagtatttattgcctccgtccgtgccgtccctgggccactggcctggcgcctgttcccccaggctctcagtgccaccacccccggcaggccttccctgacccagccaggaacaaacaagggaccaagtgcacacattgctgagagccgtctcctgtgcctcccccgccccatccccggtcttcgtgttgtgtctgccaggctcaggcagaggcgcctgtccctgcttcttttctgaccgggaaataaatgcccctgaagga

SEQ ID NO: 58970 - DNA, 635 bp, Homo sapiens
agtcaggctggtccggcccaagtcctttggatctgtgtctgcatgagcatgtggcctccccgtcccttccccggtggcgaacccagtgacccagggacacgtggggtgtgctgctgctgctccccagcccaccagtgcctggccagcctgcccccttccctggacagggctgtggagatggctccggcggcttggggaaagccaaattgccaaaactcaagtcacctcagtaccatccaggaggctgggtattgtcctgcctctgccttttctgtctcagcgggcagtgcccagagcccacacccccccaagagccctcgatggacagcctcacccaccccacctgggcccagccaggagccccgcctggccatcagtatttattgcctccgtccgtgccgtccctgggccactggcctggcgcctgttcccccaggctctcagtgccaccacccccggcaggccttccctgacccagccaggaacaaacaagggaccaagtgcacacattgctgagagccgtctcctgtgcctcccccgccccatccccggtcttcgtgttgtgtctgccaggctcaggcagaggcgcctgtccctgcttcttttctgaccgggaaataaatgcccctgaagga

SEQ ID NO: 58971 - DNA, 348 bp, Homo sapiens
cccccccccccccaaaacctaaatgaaaattttttttcaccccccacccaccccacctgggcccagccaggagccccgcctggccatcagtatttattgcctccgtccgtgccgtccctgggccactggcctggcgcctgttcccccaggctctcagtgccaccacccccggcaggccttccctgacccagccaggaacaaacaagggaccaagtgcacacattgctgagagccgtctcctgtgcctcccccgccccatccccggtcttcgtgttgtgtctgccaggctcaggcagaggcgcctgtccctgcttcttttctgaccgggaaataaatgcccctgaagga

SEQ ID NO: 58972 - DNA, 472 bp, Homo sapiens
aaaaggataaccccctttctcttgaaaaaaaatatttaaaaaaaaaccccacaacattgggttaaaaaccaaattacaaaaacgaaaaatcacccaagtaccattaagggagggtgggtaatattaaacctataaatattttgtttaaaagggacaggtgcaaaaaaacacccaccccacctgggcccagccaggagccccgcctggccatcagtatttattgcctccgtccgtgccgtccctgggccactggcctggcgcctgttcccccaggctctcagtgccaccacccccggcaggccttccctgacccagccaggaacaaacaagggaccaagtgcacacattgctgagagccgtctcctgtgcctcccccgccccatccccggtcttcgtgttgtgtctgccaggctcaggcagaggcgcctgtccctgcttcttttctgaccgggaaataaatgcccctgaagga

SEQ ID NO: 58973 - DNA, 427 bp, Homo sapiens
  misc_feature (53)..(53): n is a, c, g, or t
  misc_feature (56)..(56): n is a, c, g, or t
taatcagctcggtaccagctcgtgctggagggtgtggagtccggataatctcnttncgggttaaccgagagatagtgtccggcatgaagtacatccagcatacgtacaggaaaggcgtcaagattgacaagactgactacatggtaggcagctatgggccccgggccgaggagtacgagttcctgacccccgtggaggaggcacccaagggtatgctggcccggggcagctacagcatcaagtcccgcttcacagacgacgacaagaccgaccacctgtcctgggagtggaatctcaccatcaagaaggactggaaggactgagcccagccagaggcgggcagggcagactgacggacggacgacggacaggcggatgtgttccctcccagcacgtagctcgtccttcctcttgagtctacctgcat

SEQ ID NO: 58974 - DNA, 154 bp, Homo sapiens
cattcggtgctgacacatgcggtgggccattcagggagtctcaccatcaagaaggactggaaggactgagcccagccagaggcgggcagggcagactgacggacggacgacggacaggcggatgtgttctgtgctagtcgggatcctatagagt

SEQ ID NO: 58975 - DNA, 893 bp, Homo sapiens
ggattggggcgcggcctcccccagcgcccgggccacgcccggcacggattgcgggccctgcggaagtgcgggccgcgccctaggatcccggcgcctacggctatcctcgcgcggcgcggaggccccagcccctggaggaagcagggcggcctggaccccggcctgggtgtcccgggtgtgctgctccctgacccacctcccacgctgccgggaaggatctgagcctgacagatcccctgccgggtgtcccgacccaggctaagcttgagcatggctgagcaggagcccacagccgagcagctggcccagattgcagcggagaacgaggaggatgagcactcggtcaactacaagcccccggcccagaagagcatccaggagatccaggagctggacaaggacgacgagagcctgcgaaagtacaaggaggccctgctgggccgcgtggccgtttccgcagaccccaacgtccccaacgtcgtggtgactggcctgaccctggtgtgcagctcggccccgggccccctggagctggacctgacgggcgacctggagagcttcaagaagcagtcgtttgtgctgaaggagggtgtggagtaccggataaaaatctctttccgggttaaccgagagatagtgtccggcatgaagtacatccagcatacgtacaggaaaggcgtcaagattgacaagactgactacatggtaggctacagcatcaagtcccgcttcacagacgacgacaagaccgaccacctgtcctgggagtggaatctcaccatcaagaaggactggaaggactgagcccagccagaggcgggcagggcagactgacggacggacgacggacaggcggatgtgtaggctccccggaagtggggcccgggcccccc

SEQ ID NO: 58976 - DNA, 974 bp, Homo sapiens
  misc_feature (11)..(11): n is a, c, g, or t
ggggaggaacntaggctaggtacgaggctgggtgtgtgtcccgacccaggctaagcttgagcatggctgagcaggagcccacagccgagcagctggcccagattgcagcggagaacgaggaggatgagcactcggtcaactacaagcccccggcccagaagagcatccaggagatccaggagctggacaaggacgacgagagcctgcgaaagtacaaggaggccctgctgggccgcgtggccgtttccgcagaccccaacgtccccaacgtcgtggtgactggcctgaccctggtgtgcagctcggccccgggccccctggagctggacctgacgggcgacctggagagcttcaagaagcagtcgtttgtgctgaaggagggtgtggagtaccggataaaaatctctttccgggttaaccgagagatagtgtccggcatgaagtacatccagcatacgtacaggaaaggcgtcaagattgacaagactgactacatggtaggcagctatgggccccgggccgaggagtacgagttcctgacccccgtggaggaggcacccaagggtatgctggcccggggcagctacagcatcaagtcccgcttcacagacgacgacaagaccgaccacctgtcctgggagtggaatctcaccatcaagaaggactggaaggactgagcccagccagaggcgggcagggcagactgacggacggacgacggacaggcggatgtgtcggtttttttcccccgaagggccatatcgatatcgcaataccaaaaaatgcttgacaaggggcatagcgaatgccccggactcaaaacgcgtggagcacaggaggacacctgtgagccatggggcccaaaactaagatgtgccaacgaagaccgcaccgctcctataagacgctctacagcacaaccacagaaatcgggccaaagcacacgcatcagggctgaccaggtagctcatgac

SEQ ID NO: 58977 - DNA, 953 bp, Homo sapiens
atcgtggagggggaggtgtgtcctctctccccatgatcggctgcagttcccattttgtcttagatgttatacctggggtgggggcacctcacactgccccagaggatgcccctgagcaggaatcgcgggggtggagaggagcgaaggtggcccccttggagcccttttggagctccggctgcagcccacactcctgctcagaagtgcgcctccgttggggatccaggtccaaggcctgtcaccgtcccgcccacaggtgtcccgacccaggctaagcttgagcatggctgagcaggagcccacagccgagcagctggcccagattgcagcggagaacgaggaggatgagcactcggtcaactacaagcccccggcccagaagagcatccaggagatccaggagctggacaaggacgacgagagcctgcgaaagtacaaggaggccctgctgggccgcgtggccgtttccgcagaccccaacgtccccaacgtcgtggtgactggcctgaccctggtgtgcagctcggccccgggccccctggagctggacctgacggggtgagtgccctgcggccgcgggggtccgggcggcccctggtggggatctcgggaagtgcagccagggggccgcgcagggctggggcttcgcgcagggctgctgggcagtcattgagggggaggtccccccaacaggcgacctggagagcttcaagaagcagtcgtttgtgctgaaggagggtgtggagtaccggataaaaatctctttccggcccacctctctttccggtgttagccgagaggatagtgtaccggcatgaaggtacagtccagcatacgtccaggaaccggcgtcatagatttgactaagactgactacactggtagtgcagcgtatgcgggcaggctacaggcatcaagtcctgcttcttgcctgtgctggtggggggagagag

SEQ ID NO: 58978 - DNA, 1859 bp, Homo sapiens
  misc_feature (2)..(2): n is a, c, g, or t
tnaggctaggtacgaggctggtgttaatcggccgaggctgaaccgcgcggccgaaccctccggtgtcccgacccaggctaagcttgagcatggctgagcaggagcccacagccgagcagctggcccagattgcagcggagaacgaggaggatgagcactcggtcaactacaagcccccggcccagaagagcatccaggagatccaggagctggacaaggacgacgagagcctgcgaaagtacaaggaggccctgctgggccgcgtggccgtttccgcagaccccaacgtccccaacgtcgtggtgactggcctgaccctggtgtgcagctcggccccgggccccctggagctggacctgacgggcgacctggagagcttcaagaagcagtcgtttgtgctgaaggagggtgtggagtaccggataaaaatctctttccgggttaaccgagagatagtgtccggcatgaagtacatccagcatacgtacaggaaaggcgtcaagattgacaagactgactacatggtaggcagctatgggccccgggccgaggagtacgagttcctgacccccgtggaggaggcacccaagggtatgctggcccggggcagctacagcatcaagtcccgcttcacagacgacgacaagaccgaccacctgtcctgggagtggaatctcaccatcaagaaggactggaaggactgagcccagccagaggcgggcagggcagactgacggacggacgacggacaggcggatgtgtcccccccagcccctcccctccccataccaaagtgctgacaggccctccgtgcccctcccaccctggtccgcctccctggcctggctcaaccgagtgcctccgacccccctcctcagccctcccccacccacaggcccagcctcctcggtctcctgtctcgttgctgcttctgcctgtgctgtgggggagagaggccgcagccaggcctctgctgccctttctgtgccccccaggttctatctccccgtcacacccgaggcctggcttcaggagggagcggagcagccattctccaggccccgtggttgcccctggacgtgtgcgtctgctgctccggggtggagctggggtgtgggatgcacggcctcgtgggggccgggccgtcctccagccccgctgctccctggccagcccccttgtcgctgtcggtcccgtctaaccatgatgccttaacatgtggagtgtaccgtggggcctcactagcctctaactccctgtgtctgcatgagcatgtggcctccccgtcccttccccggtggcgaacccagtgacccagggacacgtggggtgtgctgctgctgctccccagcccaccagtgcctggccagcctgcccccttccctggacagggctgtggagatggctccggcggcttggggaaagccaaattgccaaaactcaagtcacctcagtaccatccaggaggctgggtattgtcctgcctctgccttttctgtctcagcgggcagtgcccagagcccacacccccccaagagccctcgatggacagcctcacccaccccacctgggcccagccaggagccccgcctggccatcagtatttattgcctccgtccgtgccgtccctgggccactggcctggcgcctgttcccccaggctctcagtgccaccacccccggcaggccttccctgacccagccaggaacaaacaagggaccaagtgcacacattgctgagagccgtctcctgtgcctcccccgccccatccccggtcttcgtgttgtgtctgccaggctcaggcagaggcgcctgtccctgcttcttttctgaccgggaaataaatgcccctgaagga

SEQ ID NO: 58979 - DNA, 2094 bp, Homo sapiens
  misc_feature (2)..(2): n is a, c, g, or t
  misc_feature (1885)..(1885): n is a, c, g, or t
tnaggctaggtacgaggctggtgttaatcggccgaggctgaaccgcgcggccgaaccctccggtgtcccgacccaggctaagcttgagcatggctgagcaggagcccacagccgagcagctggcccagattgcagcggagaacgaggaggatgagcactcggtcaactacaagcccccggcccagaagagcatccaggagatccaggagctggacaaggacgacgagagcctgcgaaagtacaaggaggccctgctgggccgcgtggccgtttccgcagaccccaacgtccccaacgtcgtggtgactggcctgaccctggtgtgcagctcggccccgggccccctggagctggacctgacgggcgacctggagagcttcaagaagcagtcgtttgtgctgaaggagggtgtggagtaccggataaaaatctctttccgggttaaccgagagatagtgtccggcatgaagtacatccagcatacgtacaggaaaggcgtcaagattgacaagactgactacatggtaggcagctatgggccccgggccgaggagtacgagttcctgacccccgtggaggaggcacccaagggtatgctggcccggggcagctacagcatcaagtcccgcttcacagacgacgacaagaccgaccacctgtcctgggagtggaatctcaccatcaagaaggactggaaggactgagcccagccagaggcgggcagggcagactgacggacggacgacggacaggcggatgtgtcccccccagcccctcccctccccataccaaagtgctgacaggccctccgtgcccctcccaccctggtccgcctccctggcctggctcaaccgagtgcctccgacccccctcctcagccctcccccacccacaggcccagcctcctcggtctcctgtctcgttgctgcttctgcctgtgctgtgggggagagaggccgcagccaggcctctgctgccctttctgtgccccccaggttctatctccccgtcacacccgaggcctggcttcaggagggagcggagcagccattctccaggccccgtggttgcccctggacgtgtgcgtctgctgctccggggtggagctggggtgtgggatgcacggcctcgtgggggccgggccgtcctccagccccgctgctccctggccagcccccttgtcgctgtcggtcccgtctaaccatgatgccttaacatgtggagtgtaccgtggggcctcactagcctctaactccctgtgtctgcatgagcatgtggcctccccgtcccttccccggtggcgaacccagtgacccagggacacgtggggtgtgctgctgctgctccccagcccaccagtgcctggccagcctgcccccttccctggacagggctgtggagatggctccggcggcttggggaaagccaaattgccaaaactcaagtcacctcagtaccatccaggaggctgggtattgtcctgcctctgccttttctgtctcagcgggcagtgcccagagcccacacccccccaagagccctcgatggacagcctcacccaccccacctgggcccagccaggagccccgcctggccatcagtatttattgcctccgtccgtgccgtccctgggccactggcctggcgcctgttcccccaggctctcagtgccaccacccccggcaggccttccctgacccagccaggaacaaacaagggaccaagtgcacacattgctgagagccgtctcctgtgcctcccccgccccatccccggtcttcgtgttgtgtctgccaggctcaggcagaggcgcctgtccctgcttcttttctgaccgggaaataaatgcccctgaaggaaaaaaaaaaaaaaaaaaaaaaaaaanaaaaaaaaaaaaaaaaaaaaaaagaaaaaaaaaaaatataaaaaacctaaataaaaaacacataaaaaaaaaccttcagggggggccccggtcccaattccccccttatagggagcgcttttaaattcaacgggccgacttttaacaacgtgtaaatgggaaaaaccctggtgttcccaaacttaaacggccttgaatgaaaatcccct

SEQ ID NO: 58980 - DNA, 1974 bp, Homo sapiens
  misc_feature (2)..(2): n is a, c, g, or t
tnaggctaggtacgaggctggtgttaatcggccgaggctgaaccgcgcggccgaaccctccggtgtcccgacccaggctaagcttgagcatggctgagcaggagcccacagccgagcagctggcccagattgcagcggagaacgaggaggatgagcactcggtcaactacaagcccccggcccagaagagcatccaggagatccaggagctggacaaggacgacgagagcctgcgaaagtacaaggaggccctgctgggccgcgtggccgtttccgcaggtgagtctgggctgcgggagccgggtggccgcccgttcactccagctgtcttgccgctccccagcccctacttccactggtgggggtggggccctcacctgctgtcactccccagaccccaacgtccccaacgtcgtggtgactggcctgaccctggtgtgcagctcggccccgggccccctggagctggacctgacgggcgacctggagagcttcaagaagcagtcgtttgtgctgaaggagggtgtggagtaccggataaaaatctctttccgggttaaccgagagatagtgtccggcatgaagtacatccagcatacgtacaggaaaggcgtcaagattgacaagactgactacatggtaggcagctatgggccccgggccgaggagtacgagttcctgacccccgtggaggaggcacccaagggtatgctggcccggggcagctacagcatcaagtcccgcttcacagacgacgacaagaccgaccacctgtcctgggagtggaatctcaccatcaagaaggactggaaggactgagcccagccagaggcgggcagggcagactgacggacggacgacggacaggcggatgtgtcccccccagcccctcccctccccataccaaagtgctgacaggccctccgtgcccctcccaccctggtccgcctccctggcctggctcaaccgagtgcctccgacccccctcctcagccctcccccacccacaggcccagcctcctcggtctcctgtctcgttgctgcttctgcctgtgctgtgggggagagaggccgcagccaggcctctgctgccctttctgtgccccccaggttctatctccccgtcacacccgaggcctggcttcaggagggagcggagcagccattctccaggccccgtggttgcccctggacgtgtgcgtctgctgctccggggtggagctggggtgtgggatgcacggcctcgtgggggccgggccgtcctccagccccgctgctccctggccagcccccttgtcgctgtcggtcccgtctaaccatgatgccttaacatgtggagtgtaccgtggggcctcactagcctctaactccctgtgtctgcatgagcatgtggcctccccgtcccttccccggtggcgaacccagtgacccagggacacgtggggtgtgctgctgctgctccccagcccaccagtgcctggccagcctgcccccttccctggacagggctgtggagatggctccggcggcttggggaaagccaaattgccaaaactcaagtcacctcagtaccatccaggaggctgggtattgtcctgcctctgccttttctgtctcagcgggcagtgcccagagcccacacccccccaagagccctcgatggacagcctcacccaccccacctgggcccagccaggagccccgcctggccatcagtatttattgcctccgtccgtgccgtccctgggccactggcctggcgcctgttcccccaggctctcagtgccaccacccccggcaggccttccctgacccagccaggaacaaacaagggaccaagtgcacacattgctgagagccgtctcctgtgcctcccccgccccatccccggtcttcgtgttgtgtctgccaggctcaggcagaggcgcctgtccctgcttcttttctgaccgggaaataaatgcccctgaagga

SEQ ID NO: 58981 - DNA, 1778 bp, Homo sapiens
  misc_feature (2)..(2): n is a, c, g, or t
tnaggctaggtacgaggctggtgttaatcggccgaggctgaaccgcgcggccgaaccctccggtgtcccgacccaggctaagcttgagcatggctgagcaggagcccacagccgagcagctggcccagattgcagcggagaacgaggaggatgagcactcggtcaactacaagcccccggcccagaagagcatccaggagatccaggagctggacaaggacgacgagagcctgcgaaagtacaaggaggccctgctgggccgcgtggccgtttccgcagaccccaacgtccccaacgtcgtggtgactggcctgaccctggtgtgcagctcggccccgggccccctggagctggacctgacgggcgacctggagagcttcaagaagcagtcgtttgtgctgaaggagggtgtggagtaccggataaaaatctctttccgggttaaccgagagatagtgtccggcatgaagtacatccagcatacgtacaggaaaggcgtcaagattgacaagactgactacatggtaggctacagcatcaagtcccgcttcacagacgacgacaagaccgaccacctgtcctgggagtggaatctcaccatcaagaaggactggaaggactgagcccagccagaggcgggcagggcagactgacggacggacgacggacaggcggatgtgtcccccccagcccctcccctccccataccaaagtgctgacaggccctccgtgcccctcccaccctggtccgcctccctggcctggctcaaccgagtgcctccgacccccctcctcagccctcccccacccacaggcccagcctcctcggtctcctgtctcgttgctgcttctgcctgtgctgtgggggagagaggccgcagccaggcctctgctgccctttctgtgccccccaggttctatctccccgtcacacccgaggcctggcttcaggagggagcggagcagccattctccaggccccgtggttgcccctggacgtgtgcgtctgctgctccggggtggagctggggtgtgggatgcacggcctcgtgggggccgggccgtcctccagccccgctgctccctggccagcccccttgtcgctgtcggtcccgtctaaccatgatgccttaacatgtggagtgtaccgtggggcctcactagcctctaactccctgtgtctgcatgagcatgtggcctccccgtcccttccccggtggcgaacccagtgacccagggacacgtggggtgtgctgctgctgctccccagcccaccagtgcctggccagcctgcccccttccctggacagggctgtggagatggctccggcggcttggggaaagccaaattgccaaaactcaagtcacctcagtaccatccaggaggctgggtattgtcctgcctctgccttttctgtctcagcgggcagtgcccagagcccacacccccccaagagccctcgatggacagcctcacccaccccacctgggcccagccaggagccccgcctggccatcagtatttattgcctccgtccgtgccgtccctgggccactggcctggcgcctgttcccccaggctctcagtgccaccacccccggcaggccttccctgacccagccaggaacaaacaagggaccaagtgcacacattgctgagagccgtctcctgtgcctcccccgccccatccccggtcttcgtgttgtgtctgccaggctcaggcagaggcgcctgtccctgcttcttttctgaccgggaaataaatgcccctgaagga

SEQ ID NO: 58982 - DNA, 2478 bp, Homo sapiens
  misc_feature (2)..(2): n is a, c, g, or t
  misc_feature (1864)..(1864): n is a, c, g, or t
tnaggctaggtacgaggctggtgttaatcggccgaggctgaaccgcgcggccgaaccctccggtgtcccgacccaggctaagcttgagcatggctgagcaggagcccacagccgagcagctggcccagattgcagcggagaacgaggaggatgagcactcggtcaactacaagcccccggcccagaagagcatccaggagatccaggagctggacaaggacgacgagagcctgcgaaagtacaaggaggccctgctgggccgcgtggccgtttccgcagaccccaacgtccccaacgtcgtggtgactggcctgaccctggtgtgcagctcggccccgggccccctggagctggacctgacgggcgacctggagagcttcaagaagcagtcgtttgtgctgaaggagggtgtggagtaccggataaaaatctctttccgggttaaccgagagatagtgtccggcatgaagtacatccagcatacgtacaggaaaggcgtcaagattgacaagactgactacatggtaggcagctatgggccccgggccgaggagtacgagttcctgacccccgtggaggaggcacccaagggtatgctggcccggggcagctacagcatcaagtcccgcttcacagacgacgacaagaccgaccacctgtcctgggagtggaatctcaccatcaagaaggactggaaggactgagcccagccagaggcgggcagggcagactgacggacggacgacggacaggcggatgtgtcccccccagcccctcccctccccataccaaagtgctgacaggccctccgtgcccctcccaccctggtccgcctccctggcctggctcaaccgagtgcctccgacccccctcctcagccctcccccacccacaggcccagcctcctcggtctcctgtctcgttgctgcttctgcctgtgctgtgggggagagaggccgcagccaggcctctgctgccctttctgtgccccccaggttctatctccccgtcacacccgaggcctggcttcaggagggagcggagcagccattctccaggccccgtggttgcccctggacgtgtgcgtctgctgctccggggtggagctggggtgtgggatgcacggcctcgtgggggccgggccgtcctccagccccgctgctccctggccagcccccttgtcgctgtcggtcccgtctaaccatgatgccttaacatgtggagtgtaccgtggggcctcactagcctctaactccctgtgtctgcatgagcatgtggcctccccgtcccttccccggtggcgaacccagtgacccagggacacgtggggtgtgctgctgctgctccccagcccaccagtgcctggccagcctgcccccttccctggacagggctgtggagatggctccggcggcttggggaaagccaaattgccaaaactcaagtcacctcagtaccatccaggaggctgggtattgtcctgcctctgccttttctgtctcagcgggcagtgcccagagcccacacccccccaagagccctcgatggacagcctcacccaccccacctgggcccagccaggagccccgcctggccatcagtatttattgcctccgtccgtgccgtccctgggccactggcctggcgcctgttcccccaggctctcagtgccaccacccccggcaggccttccctgacccagccaggaacaaacaagggaccaagtgcacacattgctgagagccgtctcctgtgcctcccccgccccatccccggtcttcgtgttgtgtctgccaggctcaggcagaggcgcctgtccctgcttcttttctgaccgggaaataaatgcccctgaaggaaacanaaccaacaaaaaaataaaacaacaacaccaacgccgcaacaacagatcacaccaattatacccacacacggagacgcaccaccaaaccattacagacagcgcatacacagacaaccgttgaagcggaccccgccaacaccggggtgcaccacacaccgatgcagaagcaacacgacgaacaatcaacgacacctaagggcgagatgcactgaccgaccgaataaacaagggacacctggcgacagccgcgcagaccaaccgggacaccgcacacgagagaccttacgttgacgtagcacacaaggaacactacgtccaacctcccctggcggcacgcctacaccctcccgaatcgtgccgcacaacaagacactccacaacccaccgacagacctgaccccgcgcgcccgagcgcgaaccaacacatctcaaccgcacctttccccatgagagagaacatcagagcacgatcaacaacacacctaccggcactcctacaaacgcgcgtccgcacataagaaaactatatccacaataaacagcgagcacggtctacatcctggcgcaacaaaaacctcggacctaccctcagcgccagccccgaaaggcacaac

SEQ ID NO: 58983 - DNA, 2151 bp, Homo sapiens
  misc_feature (2)..(2): n is a, c, g, or t
tnaggctaggtacgaggctggtgttaatcggccgaggctgaaccgcgcggccgaaccctccggtgtcccgacccaggctaagcttgagcatggctgagcaggagcccacagccgagcagctggcccagattgcagcggagaacgaggaggatgagcactcggtcaactacaagcccccggcccagaagagcatccaggagatccaggagctggacaaggacgacgagagcctgcgaaagtacaaggaggccctgctgggccgcgtggccgtttccgcagaccccaacgtccccaacgtcgtggtgactggcctgaccctggtgtgcagctcggccccgggccccctggagctggacctgacgggcgacctggagagcttcaagaagcagtcgtttgtgctgaaggagggtgtggagtaccggataaaaatctctttccgggttaaccgagagatagtgtccggcatgaagtacatccagcatacgtacaggaaaggcgtcaagattgacaagactgactacatggtaggcagctatgggccccgggccgaggagtacgagttcctgacccccgtggaggaggcacccaagggtatgctggcccggggcagctacagcatcaagtcccgcttcacagacgacgacaagaccgaccacctgtcctgggagtggaatctcaccatcaagaaggactggaaggactgagcccagccagaggcgggcagggcagactgacggacggacgacggacaggcggatgtgtcccccccagcccctcccctccccataccaaagtgctgacaggccctccgtgcccctcccaccctggtccgcctccctggcctggctcaaccgagtgcctccgacccccctcctcagccctcccccacccacaggcccagcctcctcggtctcctgtctcgttgctgcttctgcctgtgctgtgggggagagaggccgcagccaggcctctgctgccctttctgtgccccccaggttctatctccccgtcacacccgaggcctggcttcaggagggagcggagcagccattctccaggccccgtggttgcccctggacgtgtgcgtctgctgctccggggtggagctggggtgtgggatgcacggcctcgtgggggccgggccgtcctccagccccgctgctccctggccagcccccttgtcgctgtcggtcccgtctaaccatgatgccttaacatgtggagtgtaccgtggggcctcactagcctctaactccctgtgtctgcatgagcatgtggcctccccgtcccttccccggtggcgaacccagtgacccagggacacgtggggtgtgctgctgctgctccccagcccaccagtgcctggccagcctgcccccttccctggacagggctgtggagatggctccggcggcttggggaaagccaaattgccaaaactcaagtcacctcagtaccatccaggaggctgggtattgtcctgcctctgccttttctgtctcagcgggcagtgcccagagcccacacccccccaagagccctcgatggacagcctcacccaccccacctgggcccagccaggagccccgcctggccatcagtatttattgcctccgtccgtgccgtccctgggccactggcctggcgcctgttcccccaggctctcagtgccaccacccccggcaggccttccctgacccagccaggaacaaacaagggaccaagtgcacacattgctgagagccgtctcctgtgcctcccccgccccatccccggtcttcgtgttgtgtctgccaggctcaggcagaggcgcctgtccctgcttcttttctgaccgggaaataaatgcccctgaaggaaaaaaagacacaagaagaaaacagacaaacaacacagaagaaaaaaaaggcgcgcggcaaaaacaccaccgcagggagcaccaatacagcagcaccccgccgtcattataagaggggccccaaaagaaggtcgcacacacaagagacgagccgcagcgacaaccaccgagagaaaacgcaccgcgcactggagaagagacacaggcgggggaacacgtgacacccacagaaaaaccgcggcaagacaaccggagagggaaaacaccatgtccgcaggggcgataaaacagga

SEQ ID NO: 58984 - DNA, 2456 bp, Homo sapiens
  misc_feature (2)..(2): n is a, c, g, or t
tnaggctaggtacgaggctggtgttaatcggccgaggctgaaccgcgcggccgaaccctccggtgtcccgacccaggctaagcttgagcatggctgagcaggagcccacagccgagcagctggcccagattgcagcggagaacgaggaggatgagcactcggtcaactacaagcccccggcccagaagagcatccaggagatccaggagctggacaaggacgacgagagcctgcgaaagtacaaggaggccctgctgggccgcgtggccgtttccgcagaccccaacgtccccaacgtcgtggtgactggcctgaccctggtgtgcagctcggccccgggccccctggagctggacctgacgggcgacctggagagcttcaagaagcagtcgtttgtgctgaaggagggtgtggagtaccggataaaaatctctttccgggttaaccgagagatagtgtccggcatgaagtacatccagcatacgtacaggaaaggcgtcaagattgacaagactgactacatggtaggcagctatgggccccgggccgaggagtacgagttcctgacccccgtggaggaggcacccaagggtatgctggcccggggcagctacagcatcaagtcccgcttcacagacgacgacaagaccgaccacctgtcctgggagtggaatctcaccatcaagaaggactggaaggactgagcccagccagaggcgggcagggcagactgacggacggacgacggacaggcggatgtgtcccccccagcccctcccctccccataccaaagtgctgacaggccctccgtgcccctcccaccctggtccgcctccctggcctggctcaaccgagtgcctccgacccccctcctcagccctcccccacccacaggcccagcctcctcggtctcctgtctcgttgctgcttctgcctgtgctgtgggggagagaggccgcagccaggcctctgctgccctttctgtgccccccaggttctatctccccgtcacacccgaggcctggcttcaggagggagcggagcagccattctccaggccccgtggttgcccctggacgtgtgcgtctgctgctccggggtggagctggggtgtgggatgcacggcctcgtgggggccgggccgtcctccagccccgctgctccctggccagcccccttgtcgctgtcggtcccgtctaaccatgatgccttaacatgtggagtgtaccgtggggcctcactagcctctaactccctgtgtctgcatgagcatgtggcctccccgtcccttccccggtggcgaacccagtgacccagggacacgtggggtgtgctgctgctgctccccagcccaccagtgcctggccagcctgcccccttccctggacagggctgtggagatggctccggcggcttggggaaagccaaattgccaaaactcaagtcacctcagtaccatccaggaggctgggtattgtcctgcctctgccttttctgtctcagcgggcagtgcccagagcccacacccccccaagagccctcgatggacagcctcacccaccccacctgggcccagccaggagccccgcctggccatcagtatttattgcctccgtccgtgccgtccctgggccactggcctggcgcctgttcccccaggctctcagtgccaccacccccggcaggccttccctgacccagccaggaacaaacaagggaccaagtgcacacattgctgagagccgtctcctgtgcctcccccgccccatccccggtcttcgtgttgtgtctgccaggctcaggcagaggcgcctgtccctgcttcttttctgaccgggaaataaatgcccctgaaggataaaaaaaaataaacatataaagaataaaaaaaattttccggccgcttgagtgcccaggaaaagctgtttttgtaagtccctcgtttacgttgttgggggtacgctgcgggccccatggttgcttgcagatggaagaacctggggtcatatagttcgttgtctcgtagagaagtactcggagggatcagtaaggataagggagctgaggggtttcccttcgcacgcattactacaaaaatacgccccggggggggaaaccaggagtggtctcttcacacataccttcccacgggggggttccccgaggcggcacgacaacggcggggttattccacagcggcggtagcccggtagggccgtctccgaatgttagagaatttaccgccccgcctcttgggggatttgcaatgcaccacgcactttgccaatctctgtctaggaagtaacaacattagaaatggactcctggtatcacatacggacggcacttgtggactctgtggcaaccagggcagttcctatatacactcttacttgctgccggtaagtgggcaactccctccaataaatcattacactcctgcttgtgtctgtat

SEQ ID NO: 58985 - DNA, 1921 bp, Homo sapiens
  misc_feature (2)..(2): n is a, c, g, or t
tnaggctaggtacgaggctggtgttaatcggccgaggctgaaccgcgcggccgaaccctccggtgtcccgacccaggctaagcttgagcatggctgagcaggagcccacagccgagcagctggcccagattgcagcggagaacgaggaggatgagcactcggtcaactacaagcccccggcccagaagagcatccaggagatccaggagctggacaaggacgacgagagcctgcgaaagtacaaggaggccctgctgggccgcgtggccgtttccgcagaccccaacgtccccaacgtcgtggtgactggcctgaccctggtgtgcagctcggccccgggccccctggagctggacctgacgggcgacctggagagcttcaagaagcagtcgtttgtgctgaaggagggtgtggagtaccggataaaaatctctttccgggttaaccgagagatagtgtccggcatgaagtacatccagcatacgtacaggaaaggcgtcaagattgacaagactgactacatggtaggcagctatgggccccgggccgaggagtacgagttcctgacccccgtggaggaggcacccaagggtatgctggcccggggcagctacagcatcaagtcccgcttcacagacgacgacaagaccgaccacctgtcctgggagtggaatctcaccatcaagaaggactggaaggactgagcccagccagaggcgggcagggcagactgacggacggacgacggacaggcggatgtgtcccccccagcccctcccctccccataccaaagtgctgacaggccctccgtgcccctcccaccctggtccgcctccctggcctggctcaaccgagtgcctccgacccccctcctcagccctcccccacccacaggcccagcctcctcggtctcctgtctcgttgctgcttctgcctgtgctgtgggggagagaggccgcagccaggcctctgctgccctttctgtgccccccaggttctatctccccgtcacacccgaggcctggcttcaggagggagcggagcagccattctccaggccccgtggttgcccctggacgtgtgcgtctgctgctccggggtggagctggggtgtgggatgcacggcctcgtgggggccgggccgtcctccagccccgctgctccctggccagcccccttgtcgctgtcggtcccgtctaaccatgatgccttaacatgtggagtgtaccgtggggcctcactagcctctaactccctgtgtctgcatgagcatgtggcctccccgtcccttccccggtggcgaacccagtgacccagggacacgtggggtgtgctgctgctgctccccagcccaccagtgcctggccagcctgcccccttccctggacagggctgtggagatggctccggcggcttggggaaagccaaattgccaaaactcaagtcacctcagtaccatccaggaggctgggtattgtcctgcctctgccttttctgtctcagcgggcagtgcccagagcccacacccccccaagagccctcgatggacagcctcacccaccccacctgggcccagccaggagccccgcctggccatcagtatttattgcctccgtccgtgccgtccctgggccactggcctggcgcctgttcccccaggctctcagtgccaccacccccggcaggccttccctgacccagccaggaacaaacaagggaccaagtgcacacattgctgagagccgtctcctgtgcctcccccgccccatccccggtcttcgtgttgtgtctgccaggctcaggcagaggcgcctgtccctgcttcttttctgaccgggaaataaatgcccctgaaggattgcctgcgcgcgggaggtgaggctgcggcggtggtggtgcggttatgcagagcttggagac

SEQ ID NO: 58986 - DNA, 2037 bp, Homo sapiens
  misc_feature (2)..(2): n is a, c, g, or t
tnaggctaggtacgaggctggtgttaatcggccgaggctgaaccgcgcggccgaaccctccggtgtcccgacccaggctaagcttgagcatggctgagcaggagcccacagccgagcagctggcccagattgcagcggagaacgaggaggatgagcactcggtcaactacaagcccccggcccagaagagcatccaggagatccaggagctggacaaggacgacgagagcctgcgaaagtacaaggaggccctgctgggccgcgtggccgtttccgcagaccccaacgtccccaacgtcgtggtgactggcctgaccctggtgtgcagctcggccccgggccccctggagctggacctgacgggcgacctggagagcttcaagaagcagtcgtttgtgctgaaggagggtgtggagtaccggataaaaatctctttccgggttaaccgagagatagtgtccggcatgaagtacatccagcatacgtacaggaaaggcgtcaagattgacaagactgactacatggtaggcagctatgggccccgggccgaggagtacgagttcctgacccccgtggaggaggcacccaagggtatgctggcccggggcagctacagcatcaagtcccgcttcacagacgacgacaagaccgaccacctgtcctgggagtggaatctcaccatcaagaaggactggaaggactgagcccagccagaggcgggcagggcagactgacggacggacgacggacaggcggatgtgtcccccccagcccctcccctccccataccaaagtgctgacaggccctccgtgcccctcccaccctggtccgcctccctggcctggctcaaccgagtgcctccgacccccctcctcagccctcccccacccacaggcccagcctcctcggtctcctgtctcgttgctgcttctgcctgtgctgtgggggagagaggccgcagccaggcctctgctgccctttctgtgccccccaggttctatctccccgtcacacccgaggcctggcttcaggagggagcggagcagccattctccaggccccgtggttgcccctggacgtgtgcgtctgctgctccggggtggagctggggtgtgggatgcacggcctcgtgggggccgggccgtcctccagccccgctgctccctggccagcccccttgtcgctgtcggtcccgtctaaccatgatgccttaacatgtggagtgtaccgtggggcctcactagcctctaactccctgtgtctgcatgagcatgtggcctccccgtcccttccccggtggcgaacccagtgacccagggacacgtggggtgtgctgctgctgctccccagcccaccagtgcctggccagcctgcccccttccctggacagggctgtggagatggctccggcggcttggggaaagccaaattgccaaaactcaagtcacctcagtaccatccaggaggctgggtattgtcctgcctctgccttttctgtctcagcgggcagtgcccagagcccacacccccccaagagccctcgatggacagcctcacccaccccacctgggcccagccaggagccccgcctggccatcagtatttattgcctccgtccgtgccgtccctgggccactggcctggcgcctgttcccccaggctctcagtgccaccacccccggcaggccttccctgacccagccaggaacaaacaagggaccaagtgcacacattgctgagagccgtctcctgtgcctcccccgccccatccccggtcttcgtgttgtgtctgccaggctcaggcagaggcgcctgtccctgcttcttttctgaccgggaaataaatgcccctgaaggaaaaaacaaaacaacaaacacaaagacaaacacaaaaacaacaacaaaacacaacaaccacaacacaacaaccacaaacaacaaaaaaaagaaacaaaaaaggggggcgcgcgggcgcaagcaattattcacctccgacgggggcgccaccacgactgatgcccgcaccccggacgatt

SEQ ID NO: 58987 - DNA, 1995 bp, Homo sapiens
  misc_feature (2)..(2): n is a, c, g, or t
tnaggctaggtacgaggctggtgttaatcggccgaggctgaaccgcgcggccgaaccctccggtgtcccgacccaggctaagcttgagcatggctgagcaggagcccacagccgagcagctggcccagattgcagcggagaacgaggaggatgagcactcggtcaactacaagcccccggcccagaagagcatccaggagatccaggagctggacaaggacgacgagagcctgcgaaagtacaaggaggccctgctgggccgcgtggccgtttccgcagaccccaacgtccccaacgtcgtggtgactggcctgaccctggtgtgcagctcggccccgggccccctggagctggacctgacggggtgagtgccctgcggccgcgggggtccgggcggcccctggtggggatctcgggaagtgcagccagggggccgcgcagggctggggcttcgcgcagggctgctgggcagtcattgagggggaggtccccccaacaggcgacctggagagcttcaagaagcagtcgtttgtgctgaaggagggtgtggagtaccggataaaaatctctttccgggttaaccgagagatagtgtccggcatgaagtacatccagcatacgtacaggaaaggcgtcaagattgacaagactgactacatggtaggcagctatgggccccgggccgaggagtacgagttcctgacccccgtggaggaggcacccaagggtatgctggcccggggcagctacagcatcaagtcccgcttcacagacgacgacaagaccgaccacctgtcctgggagtggaatctcaccatcaagaaggactggaaggactgagcccagccagaggcgggcagggcagactgacggacggacgacggacaggcggatgtgtcccccccagcccctcccctccccataccaaagtgctgacaggccctccgtgcccctcccaccctggtccgcctccctggcctggctcaaccgagtgcctccgacccccctcctcagccctcccccacccacaggcccagcctcctcggtctcctgtctcgttgctgcttctgcctgtgctgtgggggagagaggccgcagccaggcctctgctgccctttctgtgccccccaggttctatctccccgtcacacccgaggcctggcttcaggagggagcggagcagccattctccaggccccgtggttgcccctggacgtgtgcgtctgctgctccggggtggagctggggtgtgggatgcacggcctcgtgggggccgggccgtcctccagccccgctgctccctggccagcccccttgtcgctgtcggtcccgtctaaccatgatgccttaacatgtggagtgtaccgtggggcctcactagcctctaactccctgtgtctgcatgagcatgtggcctccccgtcccttccccggtggcgaacccagtgacccagggacacgtggggtgtgctgctgctgctccccagcccaccagtgcctggccagcctgcccccttccctggacagggctgtggagatggctccggcggcttggggaaagccaaattgccaaaactcaagtcacctcagtaccatccaggaggctgggtattgtcctgcctctgccttttctgtctcagcgggcagtgcccagagcccacacccccccaagagccctcgatggacagcctcacccaccccacctgggcccagccaggagccccgcctggccatcagtatttattgcctccgtccgtgccgtccctgggccactggcctggcgcctgttcccccaggctctcagtgccaccacccccggcaggccttccctgacccagccaggaacaaacaagggaccaagtgcacacattgctgagagccgtctcctgtgcctcccccgccccatccccggtcttcgtgttgtgtctgccaggctcaggcagaggcgcctgtccctgcttcttttctgaccgggaaataaatgcccctgaagga

SEQ ID NO: 58988 - DNA, 1833 bp, Homo sapiens
  misc_feature (2)..(2): n is a, c, g, or t
tnaggctaggtacgaggctggtgttaatcggccgaggctgaaccgcgcggccgaaccctccggtgtcccgacccaggctaagcttgagcatggctgagcaggagcccacagccgagcagctggcccagattgcagcggagaacgaggaggatgagcactcggtcaactacaagcccccggcccagaagagcatccaggagatccaggagctggacaaggacgacgagagcctgcgaaagtacaaggaggccctgctgggccgcgtggccgtttccgcagaccccaacgtccccaacgtcgtggtgactggcctgaccctggtgtgcagctcggccccgggccccctggagctggacctgacgggcgacctggagagcttcaagaagcagtcgtttgtgctgaaggagggtgtggagtaccggataaaaatctctttccgggttaaccgagagatagtgtccggcatgaagtacatccagcatacgtacaggaaaggcgtcaagaagctatgggccccgggccgaggagtacgagttcctgacccccgtggaggaggcacccaagggtatgctggcccggggcagctacagcatcaagtcccgcttcacagacgacgacaagaccgaccacctgtcctgggagtggaatctcaccatcaagaaggactggaaggactgagcccagccagaggcgggcagggcagactgacggacggacgacggacaggcggatgtgtcccccccagcccctcccctccccataccaaagtgctgacaggccctccgtgcccctcccaccctggtccgcctccctggcctggctcaaccgagtgcctccgacccccctcctcagccctcccccacccacaggcccagcctcctcggtctcctgtctcgttgctgcttctgcctgtgctgtgggggagagaggccgcagccaggcctctgctgccctttctgtgccccccaggttctatctccccgtcacacccgaggcctggcttcaggagggagcggagcagccattctccaggccccgtggttgcccctggacgtgtgcgtctgctgctccggggtggagctggggtgtgggatgcacggcctcgtgggggccgggccgtcctccagccccgctgctccctggccagcccccttgtcgctgtcggtcccgtctaaccatgatgccttaacatgtggagtgtaccgtggggcctcactagcctctaactccctgtgtctgcatgagcatgtggcctccccgtcccttccccggtggcgaacccagtgacccagggacacgtggggtgtgctgctgctgctccccagcccaccagtgcctggccagcctgcccccttccctggacagggctgtggagatggctccggcggcttggggaaagccaaattgccaaaactcaagtcacctcagtaccatccaggaggctgggtattgtcctgcctctgccttttctgtctcagcgggcagtgcccagagcccacacccccccaagagccctcgatggacagcctcacccaccccacctgggcccagccaggagccccgcctggccatcagtatttattgcctccgtccgtgccgtccctgggccactggcctggcgcctgttcccccaggctctcagtgccaccacccccggcaggccttccctgacccagccaggaacaaacaagggaccaagtgcacacattgctgagagccgtctcctgtgcctcccccgccccatccccggtcttcgtgttgtgtctgccaggctcaggcagaggcgcctgtccctgcttcttttctgaccgggaaataaatgcccctgaagga

SEQ ID NO: 58989 - DNA, 1718 bp, Homo sapiens
  misc_feature (2)..(2): n is a, c, g, or t
tnaggctaggtacgaggctggtgttaatcggccgaggctgaaccgcgcggccgaaccctccggtgtcccgacccaggctaagcttgagcatggctgagcaggagcccacagccgagcagctggcccagattgcagcggagaacgaggaggatgagcactcggtcaactacaagcccccggcccagaagagcatccaggagatccaggagctggacaaggacgacgagagcctgcgaaagtacaaggaggccctgctgggccgcgtggccgtttccgcagaccccaacgtccccaacgtcgtggtgactggcctgaccctggtgtgcagctcggccccgggccccctggagctggacctgacggttgacaagactgactacatggtaggcagctatgggccccgggccgaggagtacgagttcctgacccccgtggaggaggcacccaagggtatgctggcccggggcagctacagcatcaagtcccgcttcacagacgacgacaagaccgaccacctgtcctgggagtggaatctcaccatcaagaaggactggaaggactgagcccagccagaggcgggcagggcagactgacggacggacgacggacaggcggatgtgtcccccccagcccctcccctccccataccaaagtgctgacaggccctccgtgcccctcccaccctggtccgcctccctggcctggctcaaccgagtgcctccgacccccctcctcagccctcccccacccacaggcccagcctcctcggtctcctgtctcgttgctgcttctgcctgtgctgtgggggagagaggccgcagccaggcctctgctgccctttctgtgccccccaggttctatctccccgtcacacccgaggcctggcttcaggagggagcggagcagccattctccaggccccgtggttgcccctggacgtgtgcgtctgctgctccggggtggagctggggtgtgggatgcacggcctcgtgggggccgggccgtcctccagccccgctgctccctggccagcccccttgtcgctgtcggtcccgtctaaccatgatgccttaacatgtggagtgtaccgtggggcctcactagcctctaactccctgtgtctgcatgagcatgtggcctccccgtcccttccccggtggcgaacccagtgacccagggacacgtggggtgtgctgctgctgctccccagcccaccagtgcctggccagcctgcccccttccctggacagggctgtggagatggctccggcggcttggggaaagccaaattgccaaaactcaagtcacctcagtaccatccaggaggctgggtattgtcctgcctctgccttttctgtctcagcgggcagtgcccagagcccacacccccccaagagccctcgatggacagcctcacccaccccacctgggcccagccaggagccccgcctggccatcagtatttattgcctccgtccgtgccgtccctgggccactggcctggcgcctgttcccccaggctctcagtgccaccacccccggcaggccttccctgacccagccaggaacaaacaagggaccaagtgcacacattgctgagagccgtctcctgtgcctcccccgccccatccccggtcttcgtgttgtgtctgccaggctcaggcagaggcgcctgtccctgcttcttttctgaccgggaaataaatgcccctgaagga

SEQ ID NO: 58990 - DNA, 1455 bp, Homo sapiens
  misc_feature (2)..(2): n is a, c, g, or t
tnaggctaggtacgaggctggtgttaatcggccgaggctgaaccgcgcggccgaaccctccggtgtcccgacccaggctaagcttgagcatggctgagcaggagcccacagccgagcagctggcccagattgcagcggagaacgaggaggatgagcactcggtcaactacaagcccccggcccagaagagcatccaggagatccaggagctggacaaggacgacgagagcctgcgaaagtacaaggaggccctgctgggccgcgtggccgtttccgcagaccccaacgtccccaacgtcgtggtgactggcctgaccctggtgtgcagctcggccccgggccccctggagctggacctgacgggcgacctggagagcttcaagaagcagtcgtttgtgctgaaggagggtgtggagtaccggataaaaatctctttccgggttaaccgagagatagtgtccggcatgaagtacatccagcatacgtacaggaaaggcgtcaagattgacaagactgactacatggtaggcagctatgggccccgggccgaggagtacgagttcctgacccccgtggaggaggcacccaagggttctatctccccgtcacacccgaggcctggcttcaggagggagcggagcagccattctccaggccccgtggttgcccctggacgtgtgcgtctgctgctccggggtggagctggggtgtgggatgcacggcctcgtgggggccgggccgtcctccagccccgctgctccctggccagcccccttgtcgctgtcggtcccgtctaaccatgatgccttaacatgtggagtgtaccgtggggcctcactagcctctaactccctgtgtctgcatgagcatgtggcctccccgtcccttccccggtggcgaacccagtgacccagggacacgtggggtgtgctgctgctgctccccagcccaccagtgcctggccagcctgcccccttccctggacagggctgtggagatggctccggcggcttggggaaagccaaattgccaaaactcaagtcacctcagtaccatccaggaggctgggtattgtcctgcctctgccttttctgtctcagcgggcagtgcccagagcccacacccccccaagagccctcgatggacagcctcacccaccccacctgggcccagccaggagccccgcctggccatcagtatttattgcctccgtccgtgccgtccctgggccactggcctggcgcctgttcccccaggctctcagtgccaccacccccggcaggccttccctgacccagccaggaacaaacaagggaccaagtgcacacattgctgagagccgtctcctgtgcctcccccgccccatccccggtcttcgtgttgtgtctgccaggctcaggcagaggcgcctgtccctgcttcttttctgaccgggaaataaatgcccctgaagga

SEQ ID NO: 58991 - DNA, 1580 bp, Homo sapiens
  misc_feature (2)..(2): n is a, c, g, or t
tnaggctaggtacgaggctggtgttaatcggccgaggctgaaccgcgcggccgaaccctccggtgtcccgacccaggctaagcttgagcatggctgagcaggagcccacagccgagcagctggcccagattgcagcggagaacgaggaggatgagcactcggtcaactacaagcccccggcccagaagagcatccaggagatccaggagctggacaaggacgacgagagcctgcgaaagtacaaggaggccctgctgggccgcgtggccgtttccgcagaccccaacgtccccaacgtcgtggtgactggcctgaccctggtgtgcagctcggccccgggccccctggagctggacctgacgggcgacctggagagcttcaagaagcagtcgtttgtgctgaaggagggtgtggagtaccggataaaaatctctttccgggttaaccgagagatagtgtccggcatgaagtacatccagcatacgtacaggaaaggcgtcaagattgacaagactgactacatggtaggcagctatgggccccgggccgaggagtacgagttcctgacccccgtggaggaggcacccaagggtatgctggcccggggcagctacagcatcaagtcccgcttcacagacgacgacaagaccgaccacctgtcctgggagtggaatctcaccatcaagaaggactggaaggactgagcccagccagaggcgggcagggcagactgacggacggacgacggacaggcggatgtgtcccccccagcccctcccctccccataccaaagtgctgacaggccctccgtgcccctcccaccctggtccgcctccctggcctggctcaaccgagtgcctccgacccccctcctcagccctcccccacccacaggcccagcctcctcggtctcctgtctcgttgctgcttctgcctgtgctgtgggggagagaggccgcagccaggcctctgctgccctttctgtgccccccaggttctatctccccgtcacacccgaggcctggcttcaggagggagcggagcagccattctccaggccccgtggttgcccctggacgtgtgcgtctgctgctccggggtggagctggggtgtgggatgcacggcctcgtgggggccgggccgtcctccagccccgctgctccctggccagcccccttgtcgctgtcggtcccgtctaaccatgatgccttaacatgtggagtgtaccgtggggcctcactagcctctaactccctgtgtctgcatgagcatgtggcctccccgtcccttccccggtggcgaacccagtgacccagggacacgtggggtgtgctgctgctgctccccagcccaccagtgcctggccagcctgcccccttccctggacagggctgtggagatggctccggcggcttggggaaagccaaattgccaaaactcaagtcacctcagtaccatccaggaggctgggtattgtcctgcctctgccttttctgtctcagcgggcagtgcccagagcccacacccccccaagagccctcgatggacagcctggcataaaggtgggggacaggctca

SEQ ID NO: 58992 - DNA, 1623 bp, Homo sapiens
  misc_feature (2)..(2): n is a, c, g, or t
tnaggctaggtacgaggctggtgttaatcggccgaggctgaaccgcgcggccgaaccctccggtgtcccgacccaggctaagcttgagcatggctgagcaggagcccacagccgagcagctggcccagattgcagcggagaacgaggaggatgagcactcggtcaactacaagcccccggcccagaagagcatccaggagatccaggagctggacaaggacgacgagagcctgcgaaagtacaaggaggccctgctgggccgcgtggccgtttccgcagaccccaacgtccccaacgtcgtggtgactggcctgaccctggtgtgcagctcggccccgggccccctggagctggacctgacgggcgacctggagagcttcaagaagcagtcgtttgtgctgaaggagggtgtggagtaccggataaaaatctctttccgggttaaccgagagatagtgtccggcatgaagtacatccagcatacgtacaggaaaggcgtcaagattgacaagactgactacatggtaggcagctatgggccccgggccgaggagtacgagttcctgacccccgtggaggaggcacccaagggtatgctggcccggggcagctacagcatcaagtcccgcttcacagacgacgacaagaccgaccacctgtcctgggagtggaatctcaccatcaagaaggactggaaggactgagcccagccagaggcgggcagggcagactgacggacggacgacggacaggcggatgtgtcccccccagcccctcccctccccataccaaagtgctgacaggccctccgtgcccctcccaccctggtccgcctccctggcctggctcaaccgagtgcctccgacccccctcctcagccctcccccacccacaggcccagcctcctcggtctcctgtctcgttgctgcttctgcctgtgctgtgggggagagaggccgcagccaggcctctgctgccctttctgtgccccccaggttctatctccccgtcacacccgaggcctggcttcaggagggagcggagcagccattctccaggccccgtggttgcccctggacgtgtgcgtctgctgctccggggtggagctggggtgtgggatgcacggcctcgtgggggccgggccgtcctccagccccgctgctccctggccagcccccttgtcgctgtcggtcccgtctaaccatgatgccttaacatgtggagtgtaccgtggggcctcactagcctctaactccctgtgtctgcatgagcatgtggcctccccgtcccttccccggtggcgaacccagtgacccaggcacccaccccacctgggcccagccaggagccccgcctggccatcagtatttattgcctccgtccgtgccgtccctgggccactggcctggcgcctgttcccccaggctctcagtgccaccacccccggcaggccttccctgacccagccaggaacaaacaagggaccaagtgcacacattgctgagagccgtctcctgtgcctcccccgccccatccccggtcttcgtgttgtgtctgccaggctcaggcagaggcgcctgtccctgcttcttttctgaccgggaaataaatgcccctgaagga

SEQ ID NO: 58993 - DNA, 1250 bp, Homo sapiens
  misc_feature (2)..(2): n is a, c, g, or t
tnaggctaggtacgaggctggtgttaatcggccgaggctgaaccgcgcggccgaaccctccggtgtcccgacccaggctaagcttgagcatggctgagcaggagcccacagccgagcagctggcccagattgcagcggagaacgaggaggatgagcactcggtcaactacaagcccccggcccagaagagcatccaggagatccaggagctggacaaggacgacgagagcctgcgaaagtacaaggaggccctgctgggccgcgtggccgtttccgcagaccccaacgtccccaacgtcgtggtgactggcctgaccctggtgtgcagctcggccccgggccccctggagctggacctgacgggcgacctggagagcttcaagaagcagtcgtttgtgctgaaggagggtgtggagtaccggataaaaatctctttccgggttaaccgagagatagtgtccggcatgaagtacatccagcatacgtacaggaaaggcgtcaagattgacaagactgactacatggtaggcagctatgggccccgggccgaggagtacgagttcctgacccccgtggaggaggcacccaagggtatgctggcccggggcagctacagcatcaagtcccgcttcacagacgacgacaagaccgaccacctgtcctgggagtggaatctcaccatcaagaaggactggaaggactgagcccagccagaggcgggcagggcagactgacggacggacgacggacaggcggatgtgtcccccccagcccctcccctccccataccaaagtgctgacaggccctccgtgcccctcccaccctggtccgcctccctggcctggctcaaccgagtgcctccgacccccctcctcagccctcccccacccacaggcccagcctcctcggtctcctgtctcgttgctgcttctgcctgtgctgtgggggagagaggccgcagccaggcctctgctgccctttctgtgccccccaggttctatctccccgtcacacccgaggcctggcttcaggagggagcggagcagccattctccaggccccgtggttgcccctggacgtgtgcgtctgctgctccggggtggagctggggtgtgggatgcacggcctcgtgggggccgggccgtcctccagccccgctgctccctggccagcccccttgtcgctgtcggtcccgtctaaccatgatgccttaacatgtggagtgtaaaaaaaaaaaacccacgcgtcc

SEQ ID NO: 58994 - DNA, 1471 bp, Homo sapiens
  misc_feature (2)..(2): n is a, c, g, or t
tnaggctaggtacgaggctggtgttaatcggccgaggctgaaccgcgcggccgaaccctccggtgtcccgacccaggctaagcttgagcatggctgagcaggagcccacagccgagcagctggcccagattgcagcggagaacgaggaggatgagcactcggtcaactacaagcccccggcccagaagagcatccaggagatccaggagctggacaaggacgacgagagcctgcgaaagtacaaggaggccctgctgggccgcgtggccgtttccgcagaccccaacgtccccaacgtcgtggtgactggcctgaccctggtgtgcagctcggccccgggccccctggagctggacctgacgggcgacctggagagcttcaagaagcagtcgtttgtgctgaaggagggtgtggagtaccggataaaaatctctttccgggttaaccgagagatagtgtccggcatgaagtacatccagcatacgtacaggaaaggcgtcaagattgacaagactgactacatggtaggcagctatgggccccgggccgaggagtacgagttcctgacccccgtggaggaggcacccaagggtatgctggcccggggcagctacagcatcaagtcccgcttcacagacgacgacaagaccgaccacctgtcctgggagtggaatctcaccatcaagaaggactggaaggactgagcccagccagaggcgggcagggcagactgacggacggacgacggacaggcggatgtgtcccccccagcccctcccctccccataccaaagtgctgacaggccctccgtgcccctcccaccctggtccgcctccctggcctggctcaaccgagtgcctccgacccccctcctcagccctcccccacccacaggcccagcctcctcggtctcctgtctcgttgctgcttctgcctgtgctgtgggggagagaggccgcagccaggcctctgctgccctttctgtgccccccaggttctatctccccgtcacacccgaggcctggcttcaggagggagcggagcagccattctccaggccccgtggttgcccctggacgtgtgcgtctgctgctccggggtggagctggggtgtgggatgcagagataacagaacttggtggctgattggaggcagggagtgagggagagggaggagcaaagactaactgtcagttctcaagagccggctggagctctttctttccctccagtgagaacaacatgcccagaaccaacaaaaccgaattccaactggagctgccggtgaaatatgctgtctacatggtggtcaccaggtgctggcttccaggactttagctgagcctccacttctgggctggacatggctgattgtgcatctgtgtgcataagtctgtgcatgtgtgtgtgtgtgagagtctgaggatctctgtgcatgtatgtgtgcatgggtgagtatttggcatgggt

SEQ ID NO: 58995 - DNA, 1445 bp, Homo sapiens
  misc_feature (2)..(2): n is a, c, g, or t
tnaggctaggtacgaggctggtgttaatcggccgaggctgaaccgcgcggccgaaccctccggtgtcccgacccaggctaagcttgagcatggctgagcaggagcccacagccgagcagctggcccagattgcagcggagaacgaggaggatgagcactcggtcaactacaagcccccggcccagaagagcatccaggagatccaggagctggacaaggacgacgagagcctgcgaaagtacaaggaggccctgctgggccgcgtggccgtttccgcagaccccaacgtccccaacgtcgtggtgactggcctgaccctggtgtgcagctcggccccgggccccctggagctggacctgacgggcgacctggagagcttcaagaagcagtcgtttgtgctgaaggagggtgtggagtaccggataaaaatctctttccgggttaaccgagagatagtgtccggcatgaagtacatccagcatacgtacaggaaaggcgtcaagattgacaagactgactacatggtaggcagctatgggccccgggccgaggagtacgagttcctgacccccgtggaggaggcacccaagggttctatctccccgtcacacccgaggcctggcttcaggagggagcggagcagccattctccaggccccgtggttgcccctggacgtgtgcgtctgctgctccggggtggagctggggtgtgggatgcacggcctcgtgggggccgggccgtcctccagccccgctgctccctggccagcccccttgtcgctgtcggtcccgtctaaccatgatgccttaacatgtggagtgtaccgtggggcctcactagcctctaactccctgtgtctgcatgagcatgtggcctccccgtcccttccccggtggcgaacccagtgacccagggacacgtggggtgtgctgctgctgctccccagcccaccagtgcctggccagcctgcccccttccctggacagggctgtggagatggctccggcggcttggggaaagccaaattgccaaaactcaagtcacctcagtaccatccaggaggctgggtattgtcctgcctctgccttttctgtctcagcgggcagtgcccagagcccacacccccccaagagccctcgatggacagcctcacccaccccacctgggcccagccaggagccccgcctggccatcagtatttattgcctccgtccgtgccgtccctgggccactggcctggcgcctgttcccccaggctctcagtgccaccacccccggcaggccttccctgacccagccaggaacaaacaagggaccaagtgcacacattgctgagagccgtctcctgtgcctcccccgccccatccccggtcttcgtgttgtgtctgccaggctcaggcagaggcgcctaaacgctggttctgccgaaaggcccccttccccc

SEQ ID NO: 58996 - DNA, 1001 bp, Homo sapiens
  misc_feature (2)..(2): n is a, c, g, or t
tnaggctaggtacgaggctggtgttaatcggccgaggctgaaccgcgcggccgaaccctccggtgtcccgacccaggctaagcttgagcatggctgagcaggagcccacagccgagcagctggcccagattgcagcggagaacgaggaggatgagcactcggtcaactacaagcccccggcccagaagagcatccaggagatccaggagctggacaaggacgacgagagcctgcgaaagtacaaggaggccctgctgggccgcgtggccgtttccgcagaccccaacgtccccaacgtcgtggtgactggcctgaccctggtgtgcagctcggccccgggccccctggagctggacctgacgggcgacctggagagcttcaagaagcagtcgtttgtgctgaaggagggtgtggagtaccggataaaaatctctttccgggttaaccgagagatagtgtccggcatgaagtacatccagcatacgtacaggaaaggcgtcaagattgacaagactgactacatggtaggcagctatgggccccgggccgaggagtacgagttcctgacccccgtggaggaggcacccaagggtatgctggcccggggcagctacagcatcaagtcccgcttcacagacgacgacaagaccgaccacctgtcctgggagtggaatctcaccatcaagaaggactggaaggactgagcccagccagaggcgggcagggcagactgacggacggacgacggacaggcggatgtgtcggtttttttcccccgaagggccatatcgatatcgcaataccaaaaaatgcttgacaaggggcatagcgaatgccccggactcaaaacgcgtggagcacaggaggacacctgtgagccatggggcccaaaactaagatgtgccaacgaagaccgcaccgctcctataagacgctctacagcacaaccacagaaatcgggccaaagcacacgcatcagggctgaccaggtagctcatgac

SEQ ID NO: 58997 - DNA, 990 bp, Homo sapiens
  misc_feature (2)..(2): n is a, c, g, or t
tnaggctaggtacgaggctggtgttaatcggccgaggctgaaccgcgcggccgaaccctccggtgtcccgacccaggctaagcttgagcatggctgagcaggagcccacagccgagcagctggcccagattgcagcggagaacgaggaggatgagcactcggtcaactacaagcccccggcccagaagagcatccaggagatccaggagctggacaaggacgacgagagcctgcgaaagtacaaggaggccctgctgggccgcgtggccgtttccgcagaccccaacgtccccaacgtcgtggtgactggcctgaccctggtgtgcagctcggccccgggccccctggagctggacctgacgggcgacctggagagcttcaagaagcagtcgtttgtgctgaaggagggtgtggagtaccggataaaaatctctttccgggttaaccgagagatagtgtccggcatgaagtacatccagcatacgtacaggaaaggcgtcaagattgacaagactgactacatggtaggcagctatgggccccgggccgaggagtacgagttcctgacccccgtggaggaggcacccaagggtatgctggcccggggcagctacagcatcaagtcccgcttcacagacgacgacaagaccgaccacctgtcctgggagtggaatctcaccatcaagaaggactggaaggactgagcccagccagaggcgggcagggcagactgacggacggacgacggacaggcggatgtgtccccccccccccccccccccccccccacccccccccccccccccccccccccccccccccccccccccacccaccacgcgcccggccccgcgcgtgcccgcggcgtgcgcccgccagcccgcccccccgccgccccggcgcgccccgtcgtcctccccggcctccccactccccgccgtgctccgcccccccgccccgcccctcgccccgtccccctcctcccgccgc

SEQ ID NO: 58998 - DNA, 1105 bp, Homo sapiens
  misc_feature (2)..(2): n is a, c, g, or t
tnaggctaggtacgaggctggtgttaatcggccgaggctgaaccgcgcggccgaaccctccggtgtcccgacccaggctaagcttgagcatggctgagcaggagcccacagccgagcagctggcccagattgcagcggagaacgaggaggatgagcactcggtcaactacaagcccccggcccagaagagcatccaggagatccaggagctggacaaggacgacgagagcctgcgaaagtacaaggaggccctgctgggccgcgtggccgtttccgcagaccccaacgtccccaacgtcgtggtgactggcctgaccctggtgtgcagctcggccccgggccccctggagctggacctgacgggcgacctggagagcttcaagaagcagtcgtttgtgctgaaggagggtgtggagtaccggataaaaatctctttccgggttaaccgagagatagtgtccggcatgaagtacatccagcatacgtacaggaaaggcgtcaagattgacaagactgactacatggtaggcagctatgggccccgggccgaggagtacgagttcctgacccccgtggaggaggcacccaagggtatgctggcccggggcagctacagcatcaagtcccgcttcacagacgacgacaagaccgaccacctgtcctgggagtggaatctcaccatcaagaaggactggaaggactgagcccagccagaggcgggcagggcagactgacggacggacgacggacaggcggatgtgttcctccggacagcacagaggaggtaaaatgccatttgactccagtgctgggtctcctgtgccttctcattacagtggttacagttgtaaaaggcagctctagcccttttctccagagacagggcagggacaggcaggaagctcttcctacgtggaaggggaatccattgtggagaggatccgtatgacttctgctcgctgagtgggtgatatgtgctgcgtcatatggatgatggaatccatggcaacctctggattggcgtggaccaagctgcggatttgcttgaggacgtagtctctgctgatgcatttgatgttttcctctattaccgagtgaacaccat

SEQ ID NO: 58999 - DNA, 814 bp, Homo sapiens
  misc_feature (2)..(2): n is a, c, g, or t
tnaggctaggtacgaggctggtgttaatcggccgaggctgaaccgcgcggccgaaccctccggtgtcccgacccaggctaagcttgagcatggctgagcaggagcccacagccgagcagctggcccagattgcagcggagaacgaggaggatgagcactcggtcaactacaagcccccggcccagaagagcatccaggagatccaggagctggacaaggacgacgagagcctgcgaaagtacaaggaggccctgctgggccgcgtggccgtttccgcagaccccaacgtccccaacgtcgtggtgactggcctgaccctggtgtgcagctcggccccgggccccctggagctggacctgacgggcgacctggagagcttcaagaagcagtcgtttgtgctgaaggagggtgtggagtaccggataaaaatctctttccgggttaaccgagagatagtgtccggcatgaagtacatccagcatacgtacaggaaaggcgtcaagattgacaagactgactacatggtaggcagctatgggccccgggccgaggagtacgagttcctgacccccgtggaggaggcacccaagggtatgctggcccggggcagctacagcatcaagtcccgcttcacagacgacgacaagaccgaccacctgtcctgggagtggaatctcaccatcaagaaggactggaaggactgagcccagccagaggcgggcagggcagactgacggacggacgacggacaggcggatgtgtgcggtgcagtgaagaggaggagaaaagaaagaaaagggaaaaaggaagagaa

SEQ ID NO: 59000 - DNA, 789 bp, Homo sapiens
  misc_feature (2)..(2): n is a, c, g, or t
tnaggctaggtacgaggctggtgttaatcggccgaggctgaaccgcgcggccgaaccctccggtgtcccgacccaggctaagcttgagcatggctgagcaggagcccacagccgagcagctggcccagattgcagcggagaacgaggaggatgagcactcggtcaactacaagcccccggcccagaagagcatccaggagatccaggagctggacaaggacgacgagagcctgcgaaagtacaaggaggccctgctgggccgcgtggccgtttccgcagaccccaacgtccccaacgtcgtggtgactggcctgaccctggtgtgcagctcggccccgggccccctggagctggacctgacgggcgacctggagagcttcaagaagcagtcgtttgtgctgaaggagggtgtggagtaccggataaaaatctctttccgggttaaccgagagatagtgtccggcatgaagtacatccagcatacgtacaggaaaggcgtcaagattgacaagactgactacatggtaggcagctatgggccccgggccgaggagtacgagttcctgacccccgtggaggaggcacccaagggtatgctggcccggggcagctacagcatcaagtcccgcttcacagacgacgacaagaccgaccacctgtcctgggagtggaatctcaccatcaagaaggactggaaggactgagcccagccagaggcgggcagggcagactgacggacggacgacggacaggcggatgtgttctgtgctagtcgggatcctatagagt

SEQ ID NO: 59001 - DNA, 977 bp, Homo sapiens
  misc_feature (2)..(2): n is a, c, g, or t
tnaggctaggtacgaggctggtgttaatcggccgaggctgaaccgcgcggccgaaccctccggtgtcccgacccaggctaagcttgagcatggctgagcaggagcccacagccgagcagctggcccagattgcagcggagaacgaggaggatgagcactcggtcaactacaagcccccggcccagaagagcatccaggagatccaggagctggacaaggacgacgagagcctgcgaaagtacaaggaggccctgctgggccgcgtggccgtttccgcagaccccaacgtccccaacgtcgtggtgactggcctgaccctggtgtgcagctcggccccgggccccctggagctggacctgacgggcgacctggagagcttcaagaagcagtcgtttgtgctgaaggagggtgtggagtaccggataaaaatctctttccgggttaaccgagagatagtgtccggcatgaagtacatccagcatacgtacaggaaaggcgtcaagattgacaagactgactacatggtaggcagctatgggccccgggccgaggagtacgagttcctgacccccgtggaggaggcacccaagggtatgctggcccggggcagctacagcatcaagtcccgcttcacagacgacgacaagaccgaccacctgtcctgggagtggaacacccaccccacctgggcccagccaggagccccgcctggccatcagtatttattgcctccgtccgtgccgtccctgggccactggcctggcgcctgttcccccaggctctcagtgccaccacccccggcaggccttccctgacccagccaggaacaaacaagggaccaagtgcacacattgctgagagccgtctcctgtgcctcccccgccccatccccggtcttcgtgttgtgtctgccaggctcaggcagaggcgcctgtccctgcttcttttctgaccgggaaataaatgcccctgaagga

SEQ ID NO: 59002 - DNA, 712 bp, Homo sapiens
  misc_feature (2)..(2): n is a, c, g, or t
tnaggctaggtacgaggctggtgttaatcggccgaggctgaaccgcgcggccgaaccctccggtgtcccgacccaggctaagcttgagcatggctgagcaggagcccacagccgagcagctggcccagattgcagcggagaacgaggaggatgagcactcggtcaactacaagcccccggcccagaagagcatccaggagatccaggagctggacaaggacgacgagagcctgcgaaagtacaaggaggccctgctgggccgcgtggccgtttccgcagaccccaacgtccccaacgtcgtggtgactggcctgaccctggtgtgcagctcggccccgggccccctggagctggacctgacgggcgacctggagagcttcaagaagcagtcgtttgtgctgaaggagggtgtggagtaccggataaaaatctctttccgggttaaccgagagatagtgtccggcatgaagtacatccagcatacgtacaggaaaggcgtcaagattgacaagactgactacatggtaggctacagcatcaagtcccgcttcacagacgacgacaagaccgaccacctgtcctgggagtggaatctcaccatcaagaaggactggaaggactgagcccagccagaggcgggcagggcagactgacggacggacgacggacaggcggatgtgtaggctccccggaagtggggcccgggcccccc

SEQ ID NO: 59003 - DNA, 742 bp, Homo sapiens
  misc_feature (2)..(2): n is a, c, g, or t
tnaggctaggtacgaggctggtgttaatcggccgaggctgaaccgcgcggccgaaccctccggtgtcccgacccaggctaagcttgagcatggctgagcaggagcccacagccgagcagctggcccagattgcagcggagaacgaggaggatgagcactcggtcaactacaagcccccggcccagaagagcatccaggagatccaggagctggacaaggacgacgagagcctgcgaaagtacaaggaggccctgctgggccgcgtggccgtttccgcagaccccaacgtccccaacgtcgtggtgactggcctgaccctggtgtgcagctcggccccgggccccctggagctggacctgacgggcgacctggagagcttcaagaagcagtcgtttgtgctgaaggagggtgtggagtaccggataaaaatctctttccgggttaaccgagagatagtgtccggcatgaagtacatccagcatacgtacaggaaaggcgtcaagattgacaagactgactacatggtaggcagctatgggccccgggccgaggagtacgagttccggcaggccttccctgacccagccaggaacaaacaagggaccaagtgcacacattgctgagagccgtctcctgtgcctcccccgccccatccccggtcttcgtgttgtgtctgccaggctcaggcagaggcgcctgtccctgcttcttttctgaccgggaaataaatgcccctgaagga

SEQ ID NO: 59004 - DNA, 667 bp, Homo sapiens
  misc_feature (2)..(2): n is a, c, g, or t
tnaggctaggtacgaggctggtgttaatcggccgaggctgaaccgcgcggccgaaccctccggtgtcccgacccaggctaagcttgagcatggctgagcaggagcccacagccgagcagctggcccagattgcagcggagaacgaggaggatgagcactcggtcaactacaagcccccggcccagaagagcatccaggagatccaggagctggacaaggacgacgagagcctgcgaaagtacaaggaggccctgctgggccgcgtggccgtttccgcagaccccaacgtccccaacgtcgtggtgactggcctgaccctggtgtgcagctcggccccgggccccctggagctggacctgacgggcgacctggagagcttcaagaagcagtcgtttgtgctgaaggagggtgtggagtaccggataaaaatctctttccgggttaaccgagagatagtgtccggcatgaagtacatccagcatacgtacaggaaaggcgtcaagattgacaagactgactacatggtaggcagctatgggccccgggccgaggagtacgagttccctcccccgccccatccccggtcttcgtgttgtgtctgccaggctcaggcagaggcgcctgtccctgcttcttttctgaccgggaaataaatgcccctgaagga

SEQ ID NO: 59005 - DNA, 552 bp, Homo sapiens
  misc_feature (2)..(2): n is a, c, g, or t
tnaggctaggtacgaggctggtgttaatcggccgaggctgaaccgcgcggccgaaccctccggtgtcccgacccaggctaagcttgagcatggctgagcaggagcccacagccgagcagctggcccagattgcagcggagaacgaggaggatgagcactcggtcaactacaagcccccggcccagaagagcatccaggagatccaggagctggacaaggacgacgagagcctgcgaaagtacaaggaggccctgctgggccgcgtggccgtttccgcagaccccaacgtccccaacgtcgtggtgactggcctgaccctggtgtgcagctcggccccgggccccctggagctggacctgacgggcgacctggagagcttcaagaagcagtcgtttgtgctgaaggagggtgtggagtaccggataaaaatctctttccgggttaaccgagagatagtgtccggcatgaagtacatccagcatacgtacaggaaaggcgtcaagaaagactactacactggtagcagccacggccatcgtaacggggggcgcg

SEQ ID NO: 59006 - DNA, 2090 bp, Homo sapiens
  misc_feature (2)..(2): n is a, c, g, or t
tnaggctaggtacgaggctggtgttaatcggccgaggctgaaccgcgcggccgaaccctccggtgtcccgacccaggctaagcttgagcatggctgagcaggagcccacagccgagcagctggcccagattgcagcggagaacgaggaggatgagcactcggtcaactacaagcccccggcccagaagagcatccaggagatccaggagctggacaaggacgacgagagcctgcgaaagtacaaggaggccctgctgggccgcgtggccgtttccgcagaccccaacgtccccaacgtcgtggtgactggcctgaccctggtgtgcagctcggccccgggccccctggagctggacctgacggggtgagtgccctgcggccgcgggggtccgggcggcccctggtggggatctcgggaagtgcagccagggggccgcgcagggctggggcttcgcgcagggctgctgggcagtcattgagggggaggtccccccaacaggcgacctggagagcttcaagaagcagtcgtttgtgctgaaggagggtgtggagtaccggataaaaatctctttccgggggtaagctacaggctgctgtggccagggaatggaggcggggctggggctggggtccggaccgaccttccctgatcctcgcttcgggtcctgcaggttaaccgagagatagtgtccggcatgaagtacatccagcatacgtacaggaaaggcgtcaagattgacaagactgactacatggtaggcagctatgggccccgggccgaggagtacgagttcctgacccccgtggaggaggcacccaagggtatgctggcccggggcagctacagcatcaagtcccgcttcacagacgacgacaagaccgaccacctgtcctgggagtggaatctcaccatcaagaaggactggaaggactgagcccagccagaggcgggcagggcagactgacggacggacgacggacaggcggatgtgtcccccccagcccctcccctccccataccaaagtgctgacaggccctccgtgcccctcccaccctggtccgcctccctggcctggctcaaccgagtgcctccgacccccctcctcagccctcccccacccacaggcccagcctcctcggtctcctgtctcgttgctgcttctgcctgtgctgtgggggagagaggccgcagccaggcctctgctgccctttctgtgccccccaggttctatctccccgtcacacccgaggcctggcttcaggagggagcggagcagccattctccaggccccgtggttgcccctggacgtgtgcgtctgctgctccggggtggagctggggtgtgggatgcacggcctcgtgggggccgggccgtcctccagccccgctgctccctggccagcccccttgtcgctgtcggtcccgtctaaccatgatgccttaacatgtggagtgtaccgtggggcctcactagcctctaactccctgtgtctgcatgagcatgtggcctccccgtcccttccccggtggcgaacccagtgacccagggacacgtggggtgtgctgctgctgctccccagcccaccagtgcctggccagcctgcccccttccctggacagggctgtggagatggctccggcggcttggggaaagccaaattgccaaaactcaagtcacctcagtaccatccaggaggctgggtattgtcctgcctctgccttttctgtctcagcgggcagtgcccagagcccacacccccccaagagccctcgatggacagcctcacccaccccacctgggcccagccaggagccccgcctggccatcagtatttattgcctccgtccgtgccgtccctgggccactggcctggcgcctgttcccccaggctctcagtgccaccacccccggcaggccttccctgacccagccaggaacaaacaagggaccaagtgcacacattgctgagagccgtctcctgtgcctcccccgccccatccccggtcttcgtgttgtgtctgccaggctcaggcagaggcgcctgtccctgcttcttttctgaccgggaaataaatgcccctgaagga

SEQ ID NO: 59007 - DNA, 1772 bp, Homo sapiens
  misc_feature (2)..(2): n is a, c, g, or t
tnaggctaggtacgaggctggtgttaatcggccgaggctgaaccgcgcggccgaaccctccggtgtcccgacccaggctaagcttgagcatggctgagcaggagcccacagccgagcagctggcccagattgcagcggagaacgaggaggatgagcactcggtcaactacaagcccccggcccagaagagcatccaggagatccaggagctggacaaggacgacgagagcctgcgaaagtacaaggaggccctgctgggccgcgtggccgtttccgcagaccccaacgtccccaacgtcgtggtgactggcctgaccctggtgtgcagctcggccccgggccccctggagctggacctgacgggcgacctggagagcttcaagaagcagtcgtttgtgctgaaggagggtgtggagtaccggataaaaatctctttccgggttaaccgagagatagtgtccggcatgaagtacatccagcatacgtacaggaaaggcgtcaagattgacaagactgactacatggtaggcagctatgggccccgggccgaggagtacgagttcctgacccccgtggaggaggcacccaagggtatgctggcccggggcagctacagcatcaagtcccgcttcacagacgacgacaagaccgaccacctgtcctgggagtggaatctcaccatcaagaaggactggaaggactgagcccagccagaggcgggcagggcagactgacggacggacgacggacaggcggatgtgtcccccccagcccctcccctccccataccaaagtgctgacaggccctccgtgcccctcccaccctggtccgcctccctggcctggctcaaccgagtgcctccgacccccctcctcagccctcccccacccacaggcccagcctcctcggtctcctgtctcgttgctgcttctgcctgtgctgtgggggagagaggccgcagccaggcctctgctgccctttctgtgccccccaggttctatctccccgtcacacccgaggcctggcttcaggagggagcggagcagccattctccaggccccgtggttgcccctggacgtgtgcgtctgctgctccggggtggagctggggtgtgggatgcacggcctcgtgggggccgggccgtcctccagccccgctgctccctggccagcccccttgtcgctgtcggtcccgtctaaccatgatgccttaacatgtggagtgtaccgtggggcctcactagcctctaactccctgtgtctgcatgagcatgtggcctccccgtcccttccccggtggcgaacccagtgacccagggacacgtggggtgtgctgctgctgctccccagcccaccagtgcctggccagcctgcccccttccctggacagggctgtggagatggctccggcggcttggggaaagccaaattgccaaaactcaagtcacctcagtaccatccaggaggctgggtattgtcctgcctctgccttttctgtctcagcgggcagtgcccagagcccacacccccccaagagccctcgatggacagccttggcgcctgttcccccaggctctcagtgccaccacccccggcaggccttccctgacccagccaggaacaaacaagggaccaagtgcacacattgctgagagccgtctcctgtgcctcccccgccccatccccggtcttcgtgttgtgtctgccaggctcaggcagaggcgcctgtccctgcttcttttctgaccgggaaataaatgcccctgaagga

SEQ ID NO: 59008 - DNA, 1071 bp, Homo sapiens
  misc_feature (2)..(2): n is a, c, g, or t
tnaggctaggtacgaggctggtgttaatcggccgaggctgaaccgcgcggccgaaccctccggtgtcccgacccaggctaagcttgagcatggctgagcaggagcccacagccgagcagctggcccagattgcagcggagaacgaggaggatgagcactcggtcaactacaagcccccggcccagaagagcatccaggagatccaggagctggacaaggacgacgagagcctgcgaaagtacaaggaggccctgctgggccgcgtggccgtttccgcagaccccaacgtccccaacgtcgtggtgactggcctgaccctggtgtgcagctcggccccgggccccctggagctggacctgacgggcgacctggagagcttcaagaagcagtcgtttgtgctgaaggagggtgtggagtaccggataaaaatctctttccggccgtggggcctcactagcctctaactccctgtgtctgcatgagcatgtggcctccccgtcccttccccggtggcgaacccagtgacccagggacacgtggggtgtgctgctgctgctccccagcccaccagtgcctggccagcctgcccccttccctggacagggctgtggagatggctccggcggcttggggaaagccaaattgccaaaactcaagtcacctcagtaccatccaggaggctgggtattgtcctgcctctgccttttctgtctcagcgggcagtgcccagagcccacacccccccaagagccctcgatggacagcctcacccaccccacctgggcccagccaggagccccgcctggccatcagtatttattgcctccgtccgtgccgtccctgggccactggcctggcgcctgttcccccaggctctcagtgccaccacccccggcaggccttccctgacccagccaggaacaaacaagggaccaagtgcacacattgctgagagccgtctcctgtgcctcccccgccccatccccggtcttcgtgttgtgtctgccaggctcaggcagaggcgcctgtccctgcttcttttctgaccgggaaataaatgcccctgaagga

SEQ ID NO: 59009 - DNA, 1066 bp, Homo sapiens
  misc_feature (2)..(2): n is a, c, g, or t
tnaggctaggtacgaggctggtgttaatcggccgaggctgaaccgcgcggccgaaccctccggtgtcccgacccaggctaagcttgagcatggctgagcaggagcccacagccgagcagctggcccagattgcagcggagaacgaggaggatgagcactcggtcaactacaagcccccggcccagaagagcatccaggagatccaggagctggacaaggacgacgagagcctgcgaaagtacaaggaggccctgctgggccgcgtggccgtttccgcagaccccaacgtccccaacgtcgtggtgactggcctgaccctggtgtgcagctcggccccgggccccctggagctggacctgacgggcgacctggagagcttcaagaagcagtcgtttgtgctgaaggagggtgtggagtaccggataaaaatctctttccgggttaaccgagagatagtgtccggcatgaagtacatccagcatacgtacaggaaaggcgtcaagattgacaagactgactacatggtaggcagctatgggccccgggccgaggagtacgagttcctgacccccgtggaggaggcacccaagggtatgctggcccggggcagctacagcatcaagtcccgcttcacagacgacgacaagaccgaccacctgtcctgggagtggaatctcaccatcaagaaggactggaaggactgagcccagccagaggcgggcagggcagactgacggacggacgacggacaggcggatgtgtcacccaccccacctgggcccagccaggagccccgcctggccatcagtatttattgcctccgtccgtgccgtccctgggccactggcctggcgcctgttcccccaggctctcagtgccaccacccccggcaggccttccctgacccagccaggaacaaacaagggaccaagtgcacacattgctgagagccgtctcctgtgcctcccccgccccatccccggtcttcgtgttgtgtctgccaggctcaggcagaggcgcctgtccctgcttcttttctgaccgggaaataaatgcccctgaagga

SEQ ID NO: 59010 - DNA, 1229 bp, Homo sapiens
  misc_feature (2)..(2): n is a, c, g, or t
tnaggctaggtacgaggctggtgttaatcggccgaggctgaaccgcgcggccgaaccctccggtgtcccgacccaggctaagcttgagcatggctgagcaggagcccacagccgagcagctggcccagattgcagcggagaacgaggaggatgagcactcggtcaactacaagcccccggcccagaagagcatccaggagatccaggagctggacaaggacgacgagagcctgcgaaagtacaaggaggccctgctgggccgcgtggccgtttccgcagaccccaacgtccccaacgtcgtggtgactggcctgaccctggtgtgcagctcggccccgggccccctggagctggacctgacgggcgacctggagagcttcaagaagcagtcgtttgtgctgaaggagggtgtggagtaccggataaaaatctctttccgggttaaccgagagatagtgtccggcatgaagtacatccagcatacgtacaggaaaggcgtcaagattgacaagactgactacatggtaggcagctatgggccccgggccgaggagtacgagttcctgacccccgtggaggaggcacccaagggtatgctggcccggggcagctacagcatcaagtcccgcttcacagacgacgacaagaccgaccacctgtcctgggagtggaatctcaccatcaagaaggactggaaggactgagcccagccagaggcgggcagggcagactgacggacggacgacggacaggcggatgtgtgcggcgtgatcctcaccggggttcttcagtattttctagccactcctcccagctcttctgtgctgtccacttgggaagctaaggctctcaaaacgggcatcacccagttgacccatctctcagacctctctgagcttggaagaagcctgttctgagcctcaccctatcagtcagtagagagagatgtccagacaaaaatatctttcaggaaagttctcccctgcagcaatattggtttccttctgttaaatatcaggaatatagggccgggtgcggctggctcaccacctgtaatcccagcacttctgggaggctgaggctgggcggaacacctgaggtcaggtgtacgacaccaagcaggcaaacatggtgaaacccgtccctactaaagatacacgacaaatgagccggcctggtagcacgttctgcatcccagtagaggctaggcacagaatctctgaactgaa

SEQ ID NO: 59011 - DNA, 1009 bp, Homo sapiens
  misc_feature (2)..(2): n is a, c, g, or t
tnaggctaggtacgaggctggtgttaatcggccgaggctgaaccgcgcggccgaaccctccggtgtcccgacccaggctaagcttgagcatggctgagcaggagcccacagccgagcagctggcccagattgcagcggagaacgaggaggatgagcactcggtcaactacaagcccccggcccagaagagcatccaggagatccaggagctggacaaggacgacgagagcctgcgaaagtacaaggaggccctgctgggccgcgtggccgtttccgcagaccccaacgtccccaacgtcgtggtgactggcctgaccctggtgtgcagctcggccccgggccccctggagctggacctgacgggcgacctggagagcttcaagaagcagtcgtttgtgctgaaggagggtgtggagtaccggataaaaatctctttccgggttaaccgagagatagtgtccggcatgaagtacatccagcatacgtacaggaaaggcgtcaagattgacaagactgactacatggtaggcagctatgggccccgggccgaggagtacgagttcctgacccccgtggaggaggcacccaagggtatgctggcccggggcagctacagcatcaagtcccgcttcacagacgacgacaagaccgaccacctgtcctgggagtggaatctcaccatcaagaaggactggaaggactgagcccagccagaggcgggcagggcagactgacggacggacgacggacaggcggatgtgtgtgctgagctttggaattcctataagaaataaaatgatctatttcagtgttccttcgctttcctctgctttctgaataaatggtttcagtaacccatgctgttctctccctattctacgtctttctccctatgttgaaaaaagattcccacagtttctgatgtgtgtgtttatagtcttcaatgtatgttaacatgttaggaactgagtatcttaagagatgtcttagaatgctttagttttcataa

SEQ ID NO: 59012 - DNA, 808 bp, Homo sapiens
  misc_feature (2)..(2): n is a, c, g, or t
tnaggctaggtacgaggctggtgttaatcggccgaggctgaaccgcgcggccgaaccctccggtgtcccgacccaggctaagcttgagcatggctgagcaggagcccacagccgagcagctggcccagattgcagcggagaacgaggaggatgagcactcggtcaactacaagcccccggcccagaagagcatccaggagatccaggagctggacaaggacgacgagagcctgcgaaagtacaaggaggccctgctgggccgcgtggccgtttccgcagaccccaacgtccccaacgtcgtggtgactggcctgaccctggtgtgcagctcggccccgggccccctggagctggacctgacgggcgacctggagagcttcaagaagcagtcgtttgtgctgaaggagggtgtggagtaccggataaaaatctctttccgggttaaccgagagatagtgtccggcatgaagtacatccagcatacgtacaggaaaggcgtcaagattgacaagactgactacatggtaggcagctatgggccccgggccgaggagtacgagttcctgacccccgtggaggaggcacccaagggtatgctggcccggggcagctacagcatcaagtcccgcttcacagacgacgacaagaccgaccacctgtcctgggagtggaatctcaccatcaagaaggactggaaggactgagcccagccagaggcgggcagggcagactgacggacggacgacggacaggcggatgtgttccctcccagcacgtagctcgtccttcctcttgagtctacctgcat

SEQ ID NO: 59013 - DNA, 899 bp, Homo sapiens
  misc_feature (2)..(2): n is a, c, g, or t
tnaggctaggtacgaggctggtgttaatcggccgaggctgaaccgcgcggccgaaccctccggtgtcccgacccaggctaagcttgagcatggctgagcaggagcccacagccgagcagctggcccagattgcagcggagaacgaggaggatgagcactcggtcaactacaagcccccggcccagaagagcatccaggagatccaggagctggacaaggacgacgagagcctgcgaaagtacaaggaggccctgctgggccgcgtggccgtttccgcagaccccaacgtccccaacgtcgtggtgactggcctgaccctggtgtgcagctcggccccgggccccctggagctggacctgacgggcgacctggagagcttcaagaagcagtcgtttgtgctgaaggagggtgtggagtaccggataaaaatctctttccgggttaaccgagagatagtgtccggcatgaagtacatccagcatacgtacaggaaaggcgtcaagattgacaagactgactacatggtaggcagctatgggccccgggccgaggagtacgagttcctgacccccgtggaggaggcacccaagggtatgctggcccggggcagctacagcatcaagtcccgcttcacagacgacgacaagaccgaccacctgtcctgggagtggaatctcaccatcaagaaggactggaaggactgagcccatgcacaagatggctgtggcatgcggcatgaacctgactgtgactggagctgactgtgaaccaggccgtgattgttgtccgccgcacaagaagcctgaaccacaccataacgcagatcgggaagacacccacggaacgcaacaaaagagtatgaacaacaggaacaacacgaaaggacaaacacagcagac

SEQ ID NO: 59014 - DNA, 781 bp, Homo sapiens
  misc_feature (2)..(2): n is a, c, g, or t
tnaggctaggtacgaggctggtgttaatcggccgaggctgaaccgcgcggccgaaccctccggtgtcccgacccaggctaagcttgagcatggctgagcaggagcccacagccgagcagctggcccagattgcagcggagaacgaggaggatgagcactcggtcaactacaagcccccggcccagaagagcatccaggagatccaggagctggacaaggacgacgagagcctgcgaaagtacaaggaggccctgctgggccgcgtggccgtttccgcagaccccaacgtccccaacgtcgtggtgactggcctgaccctggtgtgcagctcggccccgggccccctggagctggacctgacgggcgacctggagagcttcaagaagcagtcgtttgtgctgaaggagggtgtggagtaccggataaaaatctctttccgggttaaccgagagatagtgtccggcatgaagtacatccagcatacgtacaggaaaggcgtcaagattgacaagactgactacatggtaggcagctatgggccccgggccgaggagtacgagttcctggcgcctgttcccccaggctctcagtgccaccacccccggcaggccttccctgacccagccaggaacaaacaagggaccaagtgcacacattgctgagagccgtctcctgtgcctcccccgccccatccccggtcttcgtgttgtgtctgccaggctcaggcagaggcgcctgtccctgcttcttttctgaccgggaaataaatgcccctgaagga

SEQ ID NO: 59015 - DNA, 959 bp, Homo sapiens
  misc_feature (2)..(2): n is a, c, g, or t
tnaggctaggtacgaggctggtgttaatcggccgaggctgaaccgcgcggccgaaccctccggtgtcccgacccaggctaagcttgagcatggctgagcaggagcccacagccgagcagctggcccagattgcagcggagaacgaggaggatgagcactcggtcaactacaagcccccggcccagaagagcatccaggagatccaggagctggacaaggacgacgagagcctgcgaaagtacaaggaggccctgctgggccgcgtggccgtttccgcagaccccaacgtccccaacgtcgtggtgactggcctgaccctggtgtgcagctcggccccgggccccctggagctggacctgacgggcgacctggagagcttcaagaagcagtcgtttgtgctgaaggagggtgtggagtaccggataaaaatctctttccgggttaaccgagagatagtgtccggcatgaagtacatccagcatacgtacaggaaaggcgtcaagattgacaagactgactacatggtaggcagctatgggccccgggccgaggagtacgagttcctggcgcctgttcccccaggctctcagtgccaccacccccggcaggccttccctgacccagccaggaacaaacaagggaccaagtgcacacattgctgagagccgtctcctgtgcctcccccgccccatccccggtcttcgtgttgtgtctgccaggctcaggcagaggcgcctgtccctgcttcttttctgaccgggaaataaatgcccctgaaggaaaaaacaaaacaacaaacacaaagacaaacacaaaaacaacaacaaaacacaacaaccacaacacaacaaccacaaacaacaaaaaaaagaaacaaaaaaggggggcgcgcgggcgcaagcaattattcacctccgacgggggcgccaccacgactgatgcccgcaccccggacgatt

SEQ ID NO: 59016 - DNA, 696 bp, Homo sapiens
  misc_feature (2)..(2): n is a, c, g, or t
tnaggctaggtacgaggctggtgttaatcggccgaggctgaaccgcgcggccgaaccctccggtgtcccgacccaggctaagcttgagcatggctgagcaggagcccacagccgagcagctggcccagattgcagcggagaacgaggaggatgagcactcggtcaactacaagcccccggcccagaagagcatccaggagatccaggagctggacaaggacgacgagagcctgcgaaagtacaaggaggccctgctgggccgcgtggccgtttccgcagaccccaacgtccccaacgtcgtggtgactggcctgaccctggtgtgcagctcggccccgggccccctggagctggacctgacgggcgacctggagagcttcaagaagcagtcgtttgtgctgaaggagggtgtggagtaccggataaaaatctctttccgggttaaccgagagatagtgtccggcatgaagtacatccagtggcgcctgttcccccaggctctcagtgccaccacccccggcaggccttccctgacccagccaggaacaaacaagggaccaagtgcacacattgctgagagccgtctcctgtgcctcccccgccccatccccggtcttcgtgttgtgtctgccaggctcaggcagaggcgcctgtccctgcttcttttctgaccgggaaataaatgcccctgaagga

SEQ ID NO: 59017 - DNA, 917 bp, Homo sapiens
gcctctgctgccctttctgtgccccccaggttctatctccccgtcacacccgaggcctggcttcaggagggagcggagcagccattctccaggccccgtggttgcccctggacgtgtgcgtctgctgctccggggtggagctggggtgtgggatgcacggcctcgtgggggccgggccgtcctccagccccgctgctccctggccagcccccttgtcgctgtcggtcccgtctaaccatgatgccttaacatgtggagtgtaccgtggggcctcactagcctctaactccctgtgtctgcatgagcatgtggcctccccgtcccttccccggtggcgaacccagtgacccagggacacgtggggtgtgctgctgctgctccccagcccaccagtgcctggccagcctgcccccttccctggacagggctgtggagatggctccggcggcttggggaaagccaaattgccaaaactcaagtcacctcagtaccatccaggaggctgggtattgtcctgcctctgccttttctgtctcagcgggcagtgcccagagcccacacccccccaagagccctcgatggacagcctcacccaccccacctgggcccagccaggagccccgcctggccatcagtatttattgcctccgtccgtgccgtccctgggccactggcctggcgcctgttcccccaggctctcagtgccaccacccccggcaggccttccctgacccagccaggaacaaacaagggaccaagtgcacacattgctgagagccgtctcctgtgcctcccccgccccatccccggtcttcgtgttgtgtctgccaggctcaggcagaggcgcctgtccctgcttcttttctgaccgggaaataaatgcccctgaaggaggagctgggggtgtctgctgcttg

SEQ ID NO: 59018 - DNA, 1785 bp, Homo sapiens
gcggccgcctcgcctccccacccctggccgcccctccccacctcgcccaagggggccggaacggcgtcggcgcgcgggggcttttcggagcagtcgagtggaaaatagactttaacccgctttgtggcggccggggcgccctgagcgctctccaaaccacggctcccggcgctcaggcgggccgctgccaagacccggcctggagtccccgcagagttgcgcggcgcacggaccccgtggccttggggcgtcaggaggcccaacccagatctgcgcgcccaggcagcgctcaggccgctagaatggaccccggcagcggcgaggaagcggaactctctgcggctccctctccgcagtgcgccggcaaggtccaggtcccagcctccccaccgccgcccgcgccctcctaggcctcggagcggcgcctttctgcggcctcgaaggtggggtgggaaagtttggggagtcccggctctcacagcctgtcgtgagaactgcccccggggaattcgtccgccgtacggaaaaactggccggagcagagtcgtccgcggttccgcggtcgcgggtggaaggtgacaggtcgagggaggtcaggctgcttctgcgtgtcctgacggctggcgtgttctcttgagatgggctcgggctacttggccagcttcaatttaagccacagtgtctccgaggccctgacctggtccggcccgccgacacttgagcccccagagcctcagagaaggcgagggggtggatctcccagtgccgaggcccgccgtcctggtccaagccggtcgcggcaccgtgtctgggcactggagctgcttccagccccgcgaacagctggagggtggcagtgggaccgctccggcggcttctcccgcgcagtgccccgcctggccccttgtgaagggagtgagcgtcccctttccagagctgtcccccgtgacatccagaaaacgcgaaacctcaggaacaaggtcgcagcttcagaccgcggcccaggaggccgatggtggccagcgacgtgccccaggacgggctgcttctgcacggccccttcgcacgcaagcccaagcggatccgcacggccttctcgccctcgcagctgctgcggctggagcgcgccttcgagaagaaccactacgtggtgggcgccgagcggaagcagctggccggcagtctcagcctctccgagacgcaggtgaaggtgtggttccagaaccggaggacaaagtacaaacggcagaagctggaggaggaagggcctgagtccgagcagaagaagaagggctcccatcacatcaaccggtggcgcattgccacgaagcaggccaatggggaggacatcgatgtcacctccaatgactagggtgggcaaccacaaacccacgagggcagagtgctgcttgctgctggccaggcccctgcgtgggcccaagctggactctggccactccctggccaggctttggggaggcctggagtcatggccccacagggcttgaagcccggggccgccattgacagagggacaagcaatgggctggctgaggcctgggaccacttggccttctcctcggagagcctgcctgcctgggcgggcccgcccgccaccgcagcctcccagctgctctccgtgtctccaatctcccttttgttttgatgcatttctgttttaatttattttccaggcaccactgtagtttagtgatccccagtgtcccccttccctatgggaataataaaagtctctctcttaatgacacgggcatccagctccag

SEQ ID NO: 59019 - DNA, 1192 bp, Homo sapiens
tggggcaggtgagcggcggccaatgggcgagcgcggggcaggtgcccgctaactcgcgcctcgcagcgctgggcggccggggctgggcagggcagtgcggggacaccgggggctggggtcggtcccagcgggactccgaaaggagggagacgagctcaaccctcgggccttactggcagctcgcagcctagcacggagcccgcgcctgtgcgggcgcctggagctgcccgctccgccgcagcagccgccgcgcctggccgtacgctgtggccggaccccgcggtcgctcgctcacacacccctcgccgctccgcgcctggctcgcccgcgggggccgagcgcgagcgggcgggcgggggaggtgaggggtgcgggcgggtgtgcatgtgcctggctgggtgcacaccccgcaaggcggcggcgccaggacgcggagcgctccccagagcccggctgcctcgcacagctcccgcggctgcgaccatgttccagcccgcggccaagcgcggctttaccatagagtccttggtggccaaggacggcggcaccggcgggggcactggcggcgggggcgcgggctcccatctcctggcggcggccgcctccgaggaaccgctccggcccacggcgctcaactaccctcaccccagcgcggccgaggcggccttcgtgagtggcttccctgccgcggccgccgcgggcgcgggccgctcgctctacggtgggcccgagctcgtgttccccgaggccatgaaccaccccgcgctgaccgtgcatccggcgcaccagctgggcgcctccccgctgcagcccccgcactccttcttcggcgcccagcaccgggaccctctccatttctacccctgggtcctgcggaaccgcttcttcggccaccgcttccaggccagcgacgtgccccaggacgggctgcttctgcacggccccttcgcacgcaagcccaagcggatccgcacggccttctcgccctcgcagctgctgcggctggagcgcgccttcgagaagaaccactacgtggtgggcgccgagcggaagcagctggccggcagtctcagcctctccgagacgcaggtccgacgtgttggagtggggctcagcgaccctcagcctagctgctgccctggaggtggatttcagtctctgcgtgccggccggctcccagagttgcgagagg

SEQ ID NO: 59020 - DNA, 1041 bp, Homo sapiens
tggggcaggtgagcggcggccaatgggcgagcgcggggcaggtgcccgctaactcgcgcctcgcagcgctgggcggccggggctgggcagggcagtgcggggacaccgggggctggggtcggtcccagcgggactccgaaaggagggagacgagctcaaccctcgggccttactggcagctcgcagcctagcacggagcccgcgcctgtgcgggcgcctggagctgcccgctccgccgcagcagccgccgcgcctggccgtacgctgtggccggaccccgcggtcgctcgctcacacacccctcgccgctccgcgcctggctcgcccgcgggggccgagcgcgagcgggcgggcgggggaggtgaggggtgcgggcgggtgtgcatgtgcctggctgggtgcacaccccgcaaggcggcggcgccaggacgcggagcgctccccagagcccggctgcctcgcacagctcccgcggctgcgaccatgttccagcccgcggccaagcgcggctttaccatagagtccttggtggccaaggacggcggcaccggcgggggcactggcggcgggggcgcgggctcccatctcctggcggcggccgcctccgaggaaccgctccggcccacggcgctcaactaccctcaccccagcgcggccgaggcggccttcgtgagtggcttccctgccgcggccgccgcgggcgcgggccgctcgctctacggtgggcccgagctcgtgttccccgaggccatgaaccaccccgcgctgaccgtgcatccggcgcaccagctgggcgcctccccgctgcagcccccgcactccttcttcggcgcccagcaccgggaccctctccatttctacccctgggtcctgcggaaccgcttcttcggccaccgcttccagggtgagtgtccacgctgtgcccgccgaggcggccggccggcgcccgtgctgcggcgatgcgggggaggctcgggggcgcgcggggctgtttagaagttactgccgggaaggctgcaggtccgcggaggtagattccca

SEQ ID NO: 59021 - DNA, 819 bp, Homo sapiens
gtttttaatgagttagtagcctgagcattcagccgcaagactagtgcaagcagccagcgacgtgccccaggacgggctgcttctgcacggccccttcgcacgcaagcccaagcggatccgcacggccttctcgccctcgcagctgctgcggctggagcgcgccttcgagaagaaccactacgtggtgggcgccgagcggaagcagctggccggcagtctcagcctctccgagacgcaggtgaaggtgtggttccagaaccggaggacaaagtacaaacggcagaagctggaggaggaagggcctgagtccgagcagaagaagaagggctcccatcacatcaaccggtggcgcattgccacgaagcaggccaatggggaggacatcgatgtcacctccaatgactagggtgggcaaccacaaacccacgagggcagagtgctgcttgctgctggccaggcccctgcgtgggcccaagctggactctggccactccctggccaggctttggggaggcctggagtcatggccccacagggcttgaagcccggggccgccattgacagagggacaagcaatgggctggctgaggcctgggaccacttggccttctcctcggagagcctgcctgcctgggcgggcccgcccgccaccgcagcctcccagctgctctccgtgtctccaatctcccttttgttttgatgcatttctgttttaatttattttccaggcaccactgtagtttagtgatccccagtgtcccccttccctatgggaataataaaagtctctctcttaatgacacgggcatccagctccag

SEQ ID NO: 59022 - DNA, 405 bp, Homo sapiens
  misc_feature (25)..(25): n is a, c, g, or t
cgcaaatcccacgaaggcagagtgngcttgctgctggccaggcccctgtgaaggtgtggttccagaaccggaggacaaagtacaaacggcagaagctggaggaggaagggcctgagtccgagcagaagaagaagggctcccatcacatcaaccggtggcgcattgccacgaagcaggccaatggggaggacatcgatgtcacctccaatgactaggctgggcgggcccgcccgccaccgcagcctcccagctgctctccgtgtctccaatctcccttttgttttgatgcatttctgttttaatttattttccaggcaccactgtagtttagtgatccccagtgtcccccttccctatgggaataataaaagtctctctcttaatgacacgggcatccagctccag

SEQ ID NO: 59023 - DNA, 485 bp, Homo sapiens
tcctccctgtccttgtctgtccaaggagaatgaggtctcactggtggatttcggactaccctgaggagctggcacctgagggacaaggccccccacctgcccagctccagcctctgatgaggggtgggagagagctacatgaggttgctaagaaagctccctggccaggctttggggaggcctggagtcatggccccacagggcttgaagcccggggccgccattgacagagggacaagcaatgggctggctgaggcctgggaccacttggccttctcctcggagagcctgcctgcctgggcgggcccgcccgccaccgcagcctcccagctgctctccgtgtctccaatctcccttttgttttgatgcatttctgttttaatttattttccaggcaccactgtagtttagtgatccccagtgtcccccttccctatgggaataataaaagtctctctcttaatgacacgggcatccagctccag

SEQ ID NO: 59024 - DNA, 1670 bp, Homo sapiens
tggggcaggtgagcggcggccaatgggcgagcgcggggcaggtgcccgctaactcgcgcctcgcagcgctgggcggccggggctgggcagggcagtgcggggacaccgggggctggggtcggtcccagcgggactccgaaaggagggagacgagctcaaccctcgggccttactggcagctcgcagcctagcacggagcccgcgcctgtgcgggcgcctggagctgcccgctccgccgcagcagccgccgcgcctggccgtacgctgtggccggaccccgcggtcgctcgctcacacacccctcgccgctccgcgcctggctcgcccgcgggggccgagcgcgagcgggcgggcgggggaggtgaggggtgcgggcgggtgtgcatgtgcctggctgggtgcacaccccgcaaggcggcggcgccaggacgcggagcgctccccagagcccggctgcctcgcacagctcccgcggctgcgaccatgttccagcccgcggccaagcgcggctttaccatagagtccttggtggccaaggacggcggcaccggcgggggcactggcggcgggggcgcgggctcccatctcctggcggcggccgcctccgaggaaccgctccggcccacggcgctcaactaccctcaccccagcgcggccgaggcggccttcgtgagtggcttccctgccgcggccgccgcgggcgcgggccgctcgctctacggtgggcccgagctcgtgttccccgaggccatgaaccaccccgcgctgaccgtgcatccggcgcaccagctgggcgcctccccgctgcagcccccgcactccttcttcggcgcccagcaccgggaccctctccatttctacccctgggtcctgcggaaccgcttcttcggccaccgcttccaggccagcgacgtgccccaggacgggctgcttctgcacggccccttcgcacgcaagcccaagcggatccgcacggccttctcgccctcgcagctgctgcggctggagcgcgccttcgagaagaaccactacgtggtgggcgccgagcggaagcagctggccggcagtctcagcctctccgagacgcaggtgaaggtgtggttccagaaccggaggacaaagtacaaacggcagaagctggaggaggaagggcctgagtccgagcagaagaagaagggctcccatcacatcaaccggtggcgcattgccacgaagcaggccaatggggaggacatcgatgtcacctccaatgactagggtgggcaaccacaaacccacgagggcagagtgctgcttgctgctggccaggcccctgcgtgggcccaagctggactctggccactccctggccaggctttggggaggcctggagtcatggccccacagggcttgaagcccggggccgccattgacagagggacaagcaatgggctggctgaggcctgggaccacttggccttctcctcggagagcctgcctgcctgggcgggcccgcccgccaccgcagcctcccagctgctctccgtgtctccaatctcccttttgttttgatgcatttctgttttaatttattttccaggcaccactgtagtttagtgatccccagtgtcccccttccctatgggaataataaaagtctctctcttaatgacacgggcatccagctccag

SEQ ID NO: 59025 - DNA, 2520 bp, Homo sapiens
ccgccggctttgtgtgccgcgcgcgggcccgggccgcccgcgcctcgcctgggttccggggccgccgctgacccgcccgggctccgagcgccgcgcccgccgggccggccccgcctcctgccctcctccgcctccgcctcctcctgccgccgggcgggcgggctgcagccgccctccgcgctcgcctgccagctccctcgccgcgcgtccgtcctccgtcctcccgggccagccagccagccagccagccgggccggcggcgggcaccaggccgtcccgatgcccgagccaggccccaggatgaacggcttctcgctgggcgagctgtgctggctcttctgctgcccgccctgcccgagccgcatcgccgccaagctggccttcctgccgcccgagcccacctacacggtgctggcgccggagcagcgcggcgccggcgcgtccgccccggccccggcccaggctaccgccgccgccgccgcggcccagccggcaccgcagcagcccgaggagggcgcgggcgcggggcccggtgcgtgcagcctgcacctcagcgagcgcgccgactggcagtactcgcagcgcgagctggacgccgtcgaggtcttcttctcgcgcacggcccgggacaaccggctcggctgcatgttcgtgcgctgcgcgccctccagccgctacacgctgctcttctcgcacggcaacgccgtggacctgggccagatgtgcagcttctacattggcctcggctcccgcatcaactgcaacatcttctcctacgactactcgggatacggcgtcagctcgggcaagccctccgagaagaacctctacgccgacatcgacgccgcgtggcaggcgctgcgcacccggtatggcgtgagtcccgagaacattatcctctatggtcagagcattgggactgtccccacggtagacttggcctcgaggtatgaatgcgcagcggtaattctccattcccctctgatgtctggtttgcgtgtggcttttccggataccaggaaaacatactgctttgatgctttccccagcattgacaagatatctaaagtcacctctcctgtgttggtcattcatggtacagaggatgaggtcatcgatttctcccatggcctagcgatgtacgagcgctgtccccgagccgtggagcccctttgggttgaaggggctgggcataatgacatagagctttatgcacaatacctagaaagactaaaacagttcatatctcacgaacttcctaattcctgaagacaacaacttgatcttacctcatttactgtgaacagaagagtcctctgttttgcacatgctttaactgggtagctgtaaaggcttgataaccatgaagaagtgcccaacctttagggtgttctaatcaaagagctgatgaaatctcagtcttttgtatctagaggtggttctgctaattcacacaacacgttaaactgaacagtcgtgattcccagcttcattaccttgcaggaatgggaatgagagctgaatgtagggacaattttctagtgctgtataaagtagcctcgcatctgtttctcaaccttatccatcatttctgacattcatgcaggacttgccctgttgccaccaatgttctcggtatttcacatgcagctctctttctgccactggatacatgggttcaatccatttgtgaagctgtgatagtgtaactggaaagctagtgtggtgaaaattcctttattattttttgttaacatgctgatctttcccggacaaatgaactgaagggtaatttactggaactctcgtgtacagcttcatcaactgtaaccatataaatataactggaatattcttaaacaaaaagaaactaggggtttttttaagtgtaaatttattactagccaacagagttttactattttgattgtctggttggtttaacaaagagcctagctgactttccttctgtaaagtcctccttgtaggcttttttaaagtactgtacatatttgcaatcacattgtgcatagattcttaatggtagatatgatttcttttgtcaggctacaacaatgaactgcagattccttgtttgtaatgtaaatgattgaatacattttgttaatatgtttttattcctatgttttgctattaaaaattttataacatttccaagacaaaaattccaagtttatgctttgaagaatttatgtaattaaaatttcactaaactaatctttttagtttaggaattatttgggttttgacactggaagttgcgccaaataagcatcagaaataggagatgcttaacattgctatactacttgtgttggttaggggtttggatttgggggttctttggttttaatttttttttccacatttaaaagccttaaatgtactgtaagcctcagatcgttgtacaactggactgcggttgattgccagtttgtgtactgttgcttggatgcggcacagtggttggtaatggaataaaggatgcatggatcagaa

SEQ ID NO: 59026 - DNA, 186 bp, Homo sapiens
atgcatcgagctcggcacccagggagccctttggttttaatttttttttccacatttaaaagccttaaatgtactgtaagcctcagatcgttgtacaactggactgcggttgattgccagtttgtgtactgttgcttggatgcggcacagtggttggtaatggaataaaggatgcatggatcagaa

SEQ ID NO: 59027 - DNA, 1534 bp, Homo sapiens
gctcatatttcttactagatctttctctggagccagtttgcgaacacatgcgagacctttagacattgacaagatatctaaagtcacctctcctgtgttggtcattcatggtacagaggatgaggtcatcgatttctcccatggcctagcgatgtacgagcgctgtccccgagccgtggagcccctttgggttgaaggggctgggcataatgacatagagctttatgcacaatacctagaaagactaaaacagttcatatctcacgaacttcctaattcctgaagacaacaacttgatcttacctcatttactgtgaacagaagagtcctctgttttgcacatgctttaactgggtagctgtaaaggcttgataaccatgaagaagtgcccaacctttagggtgttctaatcaaagagctgatgaaatctcagtcttttgtatctagaggtggttctgctaattcacacaacacgttaaactgaacagtcgtgattcccagcttcattaccttgcaggaatgggaatgagagctgaatgtagggacaattttctagtgctgtataaagtagcctcgcatctgtttctcaaccttatccatcatttctgacattcatgcaggacttgccctgttgccaccaatgttctcggtatttcacatgcagctctctttctgccactggatacatgggttcaatccatttgtgaagctgtgatagtgtaactggaaagctagtgtggtgaaaattcctttattattttttgttaacatgctgatctttcccggacaaatgaactgaagggtaatttactggaactctcgtgtacagcttcatcaactgtaaccatataaatataactggaatattcttaaacaaaaagaaactaggggtttttttaagtgtaaatttattactagccaacagagttttactattttgattgtctggttggtttaacaaagagcctagctgactttccttctgtaaagtcctccttgtaggcttttttaaagtactgtacatatttgcaatcacattgtgcatagattcttaatggtagatatgatttcttttgtcaggctacaacaatgaactgcagattccttgtttgtaatgtaaatgattgaatacattttgttaatatgtttttattcctatgttttgctattaaaaattttataacatttccaagacaaaaattccaagtttatgctttgaagaatttatgtaattaaaatttcactaaactaatctttttagtttaggaattatttgggttttgacactggaagttgcgccaaataagcatcagaaataggagatgcttaacattgctatactacttgtgttggttaggggtttggatttgggggttctttggttttaatttttttttccacatttaaaagccttaaatgtactgtaagcctcagatcgttgtacaactggactgcggttgattgccagtttgtgtactgttgcttggatgcggcacagtggttggtaatggaataaaggatgcatggatcagaa

SEQ ID NO: 59028 - DNA, 1522 bp, Homo sapiens
gtgataggtaaggaaagaggcaggaggaggggaagaggccggggcctaggtcattgacaagatatctaaagtcacctctcctgtgttggtcattcatggtacagaggatgaggtcatcgatttctcccatggcctagcgatgtacgagcgctgtccccgagccgtggagcccctttgggttgaaggggctgggcataatgacatagagctttatgcacaatacctagaaagactaaaacagttcatatctcacgaacttcctaattcctgaagacaacaacttgatcttacctcatttactgtgaacagaagagtcctctgttttgcacatgctttaactgggtagctgtaaaggcttgataaccatgaagaagtgcccaacctttagggtgttctaatcaaagagctgatgaaatctcagtcttttgtatctagaggtggttctgctaattcacacaacacgttaaactgaacagtcgtgattcccagcttcattaccttgcaggaatgggaatgagagctgaatgtagggacaattttctagtgctgtataaagtagcctcgcatctgtttctcaaccttatccatcatttctgacattcatgcaggacttgccctgttgccaccaatgttctcggtatttcacatgcagctctctttctgccactggatacatgggttcaatccatttgtgaagctgtgatagtgtaactggaaagctagtgtggtgaaaattcctttattattttttgttaacatgctgatctttcccggacaaatgaactgaagggtaatttactggaactctcgtgtacagcttcatcaactgtaaccatataaatataactggaatattcttaaacaaaaagaaactaggggtttttttaagtgtaaatttattactagccaacagagttttactattttgattgtctggttggtttaacaaagagcctagctgactttccttctgtaaagtcctccttgtaggcttttttaaagtactgtacatatttgcaatcacattgtgcatagattcttaatggtagatatgatttcttttgtcaggctacaacaatgaactgcagattccttgtttgtaatgtaaatgattgaatacattttgttaatatgtttttattcctatgttttgctattaaaaattttataacatttccaagacaaaaattccaagtttatgctttgaagaatttatgtaattaaaatttcactaaactaatctttttagtttaggaattatttgggttttgacactggaagttgcgccaaataagcatcagaaataggagatgcttaacattgctatactacttgtgttggttaggggtttggatttgggggttctttggttttaatttttttttccacatttaaaagccttaaatgtactgtaagcctcagatcgttgtacaactggactgcggttgattgccagtttgtgtactgttgcttggatgcggcacagtggttggtaatggaataaaggatgcatggatcagaa

SEQ ID NO: 59029 - DNA, 2291 bp, Homo sapiens
  misc_feature (2121)..(2121): n is a, c, g, or t
  misc_feature (2127)..(2127): n is a, c, g, or t
  misc_feature (2150)..(2150): n is a, c, g, or t
  misc_feature (2194)..(2194): n is a, c, g, or t
  misc_feature (2209)..(2209): n is a, c, g, or t
  misc_feature (2227)..(2227): n is a, c, g, or t
  misc_feature (2247)..(2247): n is a, c, g, or t
  misc_feature (2250)..(2251): n is a, c, g, or t
  misc_feature (2263)..(2263): n is a, c, g, or t
  misc_feature (2274)..(2274): n is a, c, g, or t
ccgccggctttgtgtgccgcgcgcgggcccgggccgcccgcgcctcgcctgggttccggggccgccgctgacccgcccgggctccgagcgccgcgcccgccgggccggccccgcctcctgccctcctccgcctccgcctcctcctgccgccgggcgggcgggctgcagccgccctccgcgctcgcctgccagctccctcgccgcgcgtccgtcctccgtcctcccgggccagccagccagccagccagccgggccggcggcgggcaccaggccgtcccgatgcccgagccaggccccaggatgaacggcttctcgctgggcgagctgtgctggctcttctgctgcccgccctgcccgagccgcatcgccgccaagctggccttcctgccgcccgagcccacctacacggtgctggcgccggagcagcgcggcgccggcgcgtccgccccggccccggcccaggctaccgccgccgccgccgcggcccagccggcaccgcagcagcccgaggagggcgcgggcgcggggcccggtgcgtgcagcctgcacctcagcgagcgcgccgactggcagtactcgcagcgcgagctggacgccgtcgaggtcttcttctcgcgcacggcccgggacaaccggctcggctgcatgttcgtgcgctgcgcgccctccagccgctacacgctgctcttctcgcacggcaacgccgtggacctgggccagatgtgcagcttctacattggcctcggctcccgcatcaactgcaacatcttctcctacgactactcgggatacggcgtcagctcgggcaagccctccgagaagaacctctacgccgacatcgacgccgcgtggcaggcgctgcgcacccggtatggcgtgagtcccgagaacattatcctctatggtcagagcattgggactgtccccacggtagacttggcctcgaggtatgaatgcgcagcggtaattctccattcccctctgatgtctggtttgcgtgtggcttttccggataccaggaaaacatactgctttgatgctttccccagcattgacaagatatctaaagtcacctctcctgtgttggtcattcatggtacagaggatgaggtcatcgatttctcccatggcctagcgatgtacgagcgctgtccccgagccgtggagcccctttgggttgaaggggctgggcataatgacatagagctttatgcacaatacctagaaagactaaaacagttcatatctcacgaacttcctaattcctgaagacaacaacttgatcttacctcatttactgtgaacagaagagtcctctgttttgcacatgctttaactgggtagctgtaaaggcttgataaccatgaagaagtgcccaacctttagggtgttctaatcaaagagctgatgaaatctcagtcttttgtatctagaggtggttctgctaattcacacaacacgttaaactgaacagtcgtgattcccagcttcattaccttgcaggaatgggaatgagagctgaatgtagggacaattttctagtgctgtataaagtagcctcgcatctgtttctcaaccttatccatcatttctgacattcatgcaggacttgccctgttgccaccaatgttctcggtatttcacatgcagctctctttctgccactggatacatgggttcaatccatttgtgaagctgtgatagtgtaactggaaagctagtgtggtgaaaattcctttattattttttgttaacatgctgatctttcccggacaaatgaactgaagggtaatttactggaactctcgtgtacagcttcatcaactgtaaccatataaatataactggaatattcttaaacaaaaagaaactaggggtttttttaagtgtaaatttattactagccaacagagttttactattttgattgtctggttggtttaacaaagagcctagctgactttccttctgtaaagtcctccttgtaggcttttttaaagtactgtacatatttgcaatcacattgtgcatagattcttaatggtagatatgatttcttttgtcaggctacaacaatgaactgcagattccttgtttgtaatgatgatccttgtatatgtntatccntgtttgctttaaattttaacttncagacaaatcagtttgttgaaattgtttaattctaaatttgtgnattgggtgcgggggncaactaaaaaggagtacntggggggggggggggaacanaanngggagaaggggngaggggggggnggaaaagttggagtttg

SEQ ID NO: 59030 - DNA, 933 bp, Homo sapiens
ttcatctagactacttcatcatacctacccctccatatgccaaaaaggcaaataaataagtaaactcaaaacatcaatgtcatatttaaatatagtattttttcagattttaataataaacaaaccctagaagctgattcaattagtggtcaaatccagattaggctatattaaaactagtcctggtaggtatgatgcgtccttcatcatacctactctcgtgtacagcttcatcaactgtaaccatataaatataactggaatattcttaaacaaaaagaaactaggggtttttttaagtgtaaatttattactagccaacagagttttactattttgattgtctggttggtttaacaaagagcctagctgactttccttctgtaaagtcctccttgtaggcttttttaaagtactgtacatatttgcaatcacattgtgcatagattcttaatggtagatatgatttcttttgtcaggctacaacaatgaactgcagattccttgtttgtaatgtaaatgattgaatacattttgttaatatgtttttattcctatgttttgctattaaaaattttataacatttccaagacaaaaattccaagtttatgctttgaagaatttatgtaattaaaatttcactaaactaatctttttagtttaggaattatttgggttttgacactggaagttgcgccaaataagcatcagaaataggagatgcttaacattgctatactacttgtgttggttaggggtttggatttgggggttctttggttttaatttttttttccacatttaaaagccttaaatgtactgtaagcctcagatcgttgtacaactggactgcggttgattgccagtttgtgtactgttgcttggatgcggcacagtggttggtaatggaataaaggatgcatggatcagaa

SEQ ID NO: 59031 - DNA, 2055 bp, Homo sapiens
ccgccggctttgtgtgccgcgcgcgggcccgggccgcccgcgcctcgcctgggttccggggccgccgctgacccgcccgggctccgagcgccgcgcccgccgggccggccccgcctcctgccctcctccgcctccgcctcctcctgccgccgggcgggcgggctgcagccgccctccgcgctcgcctgccagctccctcgccgcgcgtccgtcctccgtcctcccgggccagccagccagccagccagccgggccggcggcgggcaccaggccgtcccgatgcccgagccaggccccaggatgaacggcttctcgctgggcgagctgtgctggctcttctgctgcccgccctgcccgagccgcatcgccgccaagctggccttcctgccgcccgagcccacctacacggtgctggcgccggagcagcgcggcgccggcgcgtccgccccggccccggcccaggctaccgccgccgccgccgcggcccagccggcaccgcagcagcccgaggagggcgcgggcgcggggcccggtgcgtgcagcctgcacctcagcgagcgcgccgactggcagtactcgcagcgcgagctggacgccgtcgaggtcttcttctcgcgcacggcccgggacaaccggctcggctgcatgttcgtgcgctgcgcgccctccagccgctacacgctgctcttctcgcacggcaacgccgtggacctgggccagatgtgcagcttctacattggcctcggctcccgcatcaactgcaacatcttctcctacgactactcgggatacggcgtcagctcgggcaagccctccgagaagaacctctacgccgacatcgacgccgcgtggcaggcgctgcgcacccggtatggcgtgagtcccgagaacattatcctctatggtcagagcattgggactgtccccacggtagacttggcctcgaggtatgaatgcgcagcggtaattctccattcccctctgatgtctggtttgcgtgtggcttttccggataccaggaaaacatactgctttgatgctttccccagcattgacaagatatctaaagtcacctctcctgtgttggtcattcatggtacagaggatgaggtcatcgatttctcccatggcctagcgatgtacgagcgctgtccccgagccgtggagcccctttgggttgaaggggctgggcataatgacatagagctttatgcacaatacctagaaagactaaaacagttcatatctcacgaacttcctaattcctgaagacaacaacttgatcttacctcatttactgtgaacagaagagtcctctgttttgcacatgctttaactgggtagctgtaaaggcttgataaccatgaagaagtgcccaacctttagggtgttctaatcaaagagctgatgaaatctcagtcttttgtatctagaggtggttctgctaattcacacaacacgttaaactgaacagtcgtgattcccagcttcattaccttgcaggaatgggaatgagagctgaatgtagggacaattttctagtgctgtataaagtagcctcgcatctgtttctcaaccttatccatcatttctgacattcatgcaggacttgccctgttgccaccaatgttctcggtatttcacatgcagctctctttctgccactggatacatgggttcaatccatttgtgaagctgtgatagtgtaactggaaagctagtgtggtgaaaattcctttattattttttgttaacatgctgatctttcccggacaaatgaactgaagggtaatttactggaactctcgtgtacagcttcatcaactgtaaccatataaatataactggaatattcttaaacaaaaagaaactaggggtttttttaagtgtaaatttattactagccaacagagttttactattttgattgtctggttggtttaacaaagagcctagctgactttccttctgtaaagtcctccttgtaggagctttgaacgagatatacaccaggactacacaatcactgccgtaatgtaccgtgacagtaccagg

SEQ ID NO: 59032 - DNA, 2292 bp, Homo sapiens
ccgccggctttgtgtgccgcgcgcgggcccgggccgcccgcgcctcgcctgggttccggggccgccgctgacccgcccgggctccgagcgccgcgcccgccgggccggccccgcctcctgccctcctccgcctccgcctcctcctgccgccgggcgggcgggctgcagccgccctccgcgctcgcctgccagctccctcgccgcgcgtccgtcctccgtcctcccgggccagccagccagccagccagccgggccggcggcgggcaccaggccgtcccgatgcccgagccaggccccaggatgaacggcttctcgctgggcgagctgtgctggctcttctgctgcccgccctgcccgagccgcatcgccgccaagctggccttcctgccgcccgagcccacctacacggtgctggcgccggagcagcgcggcgccggcgcgtccgccccggccccggcccaggctaccgccgccgccgccgcggcccagccggcaccgcagcagcccgaggagggcgcgggcgcggggcccggtgcgtgcagcctgcacctcagcgagcgcgccgactggcagtactcgcagcgcgagctggacgccgtcgaggtcttcttctcgcgcacggcccgggacaaccggctcggctgcatgttcgtgcgctgcgcgccctccagccgctacacgctgctcttctcgcacggcaacgccgtggacctgggccagatgtgcagcttctacattggcctcggctcccgcatcaactgcaacatcttctcctacgactactcgggatacggcgtcagctcgggcaagccctccgagaagaacctctacgccgacatcgacgccgcgtggcaggcgctgcgcacccggtatggcgtgagtcccgagaacattatcctctatggtcagagcattgggactgtccccacggtagacttggcctcgaggtatgaatgcgcagcggtaattctccattcccctctgatgtctggtttgcgtgtggcttttccggataccaggaaaacatactgctttgatgctttccccagcattgacaagatatctaaagtcacctctcctgtgttggtcattcatggtacagaggatgaggtcatcgatttctcccatggcctagcgatgtacgagcgctgtccccgagccgtggagcccctttgggttgaaggggctgggcataatgacatagagctttatgcacaatacctagaaagactaaaacagttcatatctcacgaacttcctaattcctgaagacaacaacttgatcttacctcatttactgtgaacagaagagtcctctgttttgcacatgctttaactgggtagctgtaaaggcttgataaccatgaagaagtgcccaacctttagggtgttctaatcaaagagctgatgaaatctcagtcttttgtatctagaggtggttctgctaattcacacaacacgttaaactgaacagtcgtgattcccagcttcattaccttgcaggaatgggaatgagagctgaatgtagggacaattttctagtgctgtataaagtagcctcgcatctgtttctcaaccttatccatcatttctgacattcatgcaggacttgccctgttgccaccaatgttctcggtatttcacatgcagctctctttctgccactggatacatgggttcaatccatttgtgaagctgtgatagtgtaactggaaagctagtgtggtgaaaattcctttattattttttgttaacatgctgatctttcccggacaaatgaactgaagggtaatttactggaactctcgtgtacagcttcatcaactgtaaccatataaatataactggaatattcttaaacaaaaagaaactaggggtttttttaagtgtaaatttattactagccaacagagttttactattttgattgtctggttggtttaacaaagagcctagctgactttccttctgtaaagtcctccttgtaggcttttttaaagtactgtacatatttgcaatcacattgtgcatagattcttaatggtagatatgatttcttttgtcaggctacaacaatgaactgcagattccttgtttgtaatgtaaatgattgaatacattttgttaatatgttttacctactatcggatcggtgtaaaacagaacggccatgaacacaagccaagacgcatacagctagactatagaggatagccaccgcattcgacagcgatcagcaccaagattcaatccaggcatgggacagccagaatcagcgcgatcgcagatctg

SEQ ID NO: 59033 - DNA, 973 bp, Homo sapiens
  misc_feature (756)..(756): n is a, c, g, or t
  misc_feature (762)..(762): n is a, c, g, or t
  misc_feature (770)..(770): n is a, c, g, or t
  misc_feature (772)..(772): n is a, c, g, or t
  misc_feature (780)..(780): n is a, c, g, or t
  misc_feature (789)..(789): n is a, c, g, or t
tatctcgtgttaatgtgaatgaccgggcgggggttatagtacgaacttgactggccgtcgttttacacctgcgttatgtcgttcagaccctagaagatgactttcagcagaccctgaggaggcaacggcagcacctgcagcaatccattgcaaacatggtgctttcctgtgacaagcagccccacaatgtcagggatgttatcaagtggctggtcaaagcagtaactgaagatggattgactcagcccccaaatggaaatcaaacgtcttcaggaacaggaatcttgaaagccagcagtagccacccttcttcccagcccaacctgacaaagaacaccaatcagctgattgtgtgccagcttcagaggatgctctccatagccgtagaggtggacaggacccccacctgcagctccaataaaattgccgagatgatgtttgggtttgtgctggacattcctgagaggagccagagagaaatgttctttactaccatggaaagccaccttctgcgctgcaaagtgttagaaatcatattcctccacagctgtgagacacccacccgcctgcctctgtctctggcccaggccctctactttctgaataattctacgtcactgctcaagtgtcagtcagataaaagccagtggcagacttgggacgaattggttgagcatctgcagtttctgctgtccagttatcaacatgttttaagagaacacttaaggagttccgtgatcgaccgaaaggacttantaatcnaaaggatnangcccaaancccaggcangagatgacatcacagtggtaaacgttgagaagcaaaatgagggcttccgaagcgctgatccagatgccgggggaggctcttggtcccccaatcccagacaaagtgccttgtgaagccctgcctctatgagaggattaacctatgcaaccctcaaaggggaggctgaggcgcactaagcaaaacc

SEQ ID NO: 59034 - DNA, 595 bp, Homo sapiens
ggagaaaactgtatggcaaatacatattttctcctgtatcaaagaaatttaaatcattttaagtcactctggacctgtttcttcatctgcaaaacagggaagttatagattagatgatccttatagttccctatatccttaaggttgtgtggttctatttttgaatttaaaagcagcttgcttttacagctcaaccccaggttctgagaggttcaaatagtatgttctggcaaaagggattcaggtaggtgaaattgctaaataaaagcatgctgatggtttgagtagttctccctgaccttgtgtgtgctttataagatcctttagtagtctctactctcgatgtacactggtggggacctcctcccagccagagagtggctccttgccagaccctcacactcatctgtgtcctatgttctggactcaggattgtgtgccagcttcagaggatgctctccatagccgtagaggtggacaggacccccacctgcagctccaataaaattgccgagatgatgtttgggtttgtgctggacattcctgagaggagccagaggtgagtcttgattttgttggggagagcagttattta

SEQ ID NO: 59035 - DNA, 1340 bp, Homo sapiens
  misc_feature (1123)..(1123): n is a, c, g, or t
  misc_feature (1129)..(1129): n is a, c, g, or t
  misc_feature (1137)..(1137): n is a, c, g, or t
  misc_feature (1139)..(1139): n is a, c, g, or t
  misc_feature (1147)..(1147): n is a, c, g, or t
  misc_feature (1156)..(1156): n is a, c, g, or t
ggatcatttcacctgtaacagaatacccaactcaggcttggcccaacagtcaagttgagccaagccaacagacttggctcaatcagctcgcatgactggaagttcatcagtagagtggacatcatggcggtttgatctagcagcacaggagtcattaaagaaccagtttctctttctctgttttgccatctgtagttttgggtatatcctgaggttgataggttcagtgagagggagagattgacttcccatggctgcctcttaaatcaaatgatctacaatcctagagattccagtagatatctgattgcagcttaggtgttagaaaattataattatctgcagatgcctagatcctttgaacaagtaataatacttaaaaaatggtttctgaaaccttataagggacaaactctgcctgggcgagtccttttcctgcgttatgtcgttcagaccctagaagatgactttcagcagaccctgaggaggcaacggcagcacctgcagcaatccattgcaaacatggtgctttcctgtgacaagcagccccacaatgtcagggatgttatcaagtggctggtcaaagcagtaactgaagatggattgactcagcccccaaatggaaatcaaacgtcttcaggaacaggaatcttgaaagccagcagtagccacccttcttcccagcccaacctgacaaagaacaccaatcagctgattgtgtgccagcttcagaggatgctctccatagccgtagaggtggacaggacccccacctgcagctccaataaaattgccgagatgatgtttgggtttgtgctggacattcctgagaggagccagagagaaatgttctttactaccatggaaagccaccttctgcgctgcaaagtgttagaaatcatattcctccacagctgtgagacacccacccgcctgcctctgtctctggcccaggccctctactttctgaataattctacgtcactgctcaagtgtcagtcagataaaagccagtggcagacttgggacgaattggttgagcatctgcagtttctgctgtccagttatcaacatgttttaagagaacacttaaggagttccgtgatcgaccgaaaggacttantaatcnaaaggatnangcccaaancccaggcangagatgacatcacagtggtaaacgttgagaagcaaaatgagggcttccgaagcgctgatccagatgccgggggaggctcttggtcccccaatcccagacaaagtgccttgtgaagccctgcctctatgagaggattaacctatgcaaccctcaaaggggaggctgaggcgcactaagcaaaacc

SEQ ID NO: 59036 - DNA, 1518 bp, Homo sapiens
  misc_feature (1301)..(1301): n is a, c, g, or t
  misc_feature (1307)..(1307): n is a, c, g, or t
  misc_feature (1315)..(1315): n is a, c, g, or t
  misc_feature (1317)..(1317): n is a, c, g, or t
  misc_feature (1325)..(1325): n is a, c, g, or t
  misc_feature (1334)..(1334): n is a, c, g, or t
agcgggctcggggcggggccggcgtggcggtggcccgggttgtagccgccgccgctgccgcgcgcccccgccgccgccacctcagaagcaggaaccgaagtcgtcgccgccgccgccactgactgggtcttcggtcggggcccgcagccatggaggatttcatcgtgatctcggacgacagcggctctgagagctccgggggcgccctgcccgggccggtcgcggaggccgcgccgggccctgtcgcgaacctccggcgctgctgccccgccggaccgtgaacaagggtcaaaaattagaacccatccctcatcgaagactaagaatggtaacaaataccattgaagagaattttcctctggggactgtgcagtttttgatggactttgtgtcaccccagcattacccaccaagagaaatcgtggctcacatcatccagaaaatcttgctcagtggctctgagactgtggatgtcctaaaggaggcctacatgcttctcatgaaaattcaacagctacatccagccaatgccaagacagtggagtgggactggaaactgctcacctatgtcatggaggaagagggacaaactctgcctgggcgagtccttttcctgcgttatgtcgttcagaccctagaagatgactttcagcagaccctgaggaggcaacggcagcacctgcagcaatccattgcaaacatggtgctttcctgtgacaagcagccccacaatgtcagggatgttatcaagtggctggtcaaagcagtaactgaagatggattgactcagcccccaaatggaaatcaaacgtcttcaggaacaggaatcttgaaagccagcagtagccacccttcttcccagcccaacctgacaaagaacaccaatcagctgattgtgtgccagcttcagaggatgctctccatagccgtagaggtggacaggacccccacctgcagctccaataaaattgccgagatgatgtttgggtttgtgctggacattcctgagaggagccagagagaaatgttctttactaccatggaaagccaccttctgcgctgcaaagtgttagaaatcatattcctccacagctgtgagacacccacccgcctgcctctgtctctggcccaggccctctactttctgaataattctacgtcactgctcaagtgtcagtcagataaaagccagtggcagacttgggacgaattggttgagcatctgcagtttctgctgtccagttatcaacatgttttaagagaacacttaaggagttccgtgatcgaccgaaaggacttantaatcnaaaggatnangcccaaancccaggcangagatgacatcacagtggtaaacgttgagaagcaaaatgagggcttccgaagcgctgatccagatgccgggggaggctcttggtcccccaatcccagacaaagtgccttgtgaagccctgcctctatgagaggattaacctatgcaaccctcaaaggggaggctgaggcgcactaagcaaaacc

SEQ ID NO: 59037 - DNA, 789 bp, Homo sapiens
gtccttccagccatgtgggttcagcggaaagagaagcaaaaccactcttcctaaaatgttagaagctgctcttcgcttaccttggggcctttgcattgggagctgtttttcacatcaaagaatatgtgctgaatggaattttagtattttgctgtcgttttaatattttcgtctggtcttcctcagttcttccagacgctttctgagagaatgggggcaggagctctagccatctgtcaaagtaaagcagcggttcggctgaaagaagacatgaaaaagatagtggcagtgccattaaatgaacagaaggattttacctatcagaagttatttggagtcagtctccaagaacttgaacggcaggggctcaccgagaatggcattccagcagtagtgtggaatatagtggaatatttgacgcagcatggacttacccaagaaggtctttttagggtgaatggtaacgtgaaggtggtggaacaacttcgactgaagttcgagagtggagtgcccgtggagctcgggaaggacggtgatgtctgctcagcagccagtctgttgaagctgtttctgagggagctgcctgacagtctgatcacctcagcgttgcagcctcgattcattcaactctttcaggatggcagaaatgatgttcaggagagtagcttaagagacttaataaaagagctggcagaaaccactactgcctcctcaagtacctttgccagttcttgacaaaagtagccaagcatcatgtgcagaatcgcatgaatgttcacaatctcgcca

SEQ ID NO: 59038 - DNA, 408 bp, Homo sapiens
ccactgtactccagccggggcaacagaatgagactccatttcaaaataaataaataaataaaaattaaaaaaattaaaaataataaaaaaacattaaggtagaaaagataaatgaagttaagaatttggttggcgctctccctctccttcatctccgtctcccgctttccacggtctccccctctccctcgtctccgtctcccactttccacggtctccctctgttgccgaggctggactgtactgccgcgatctcggctcactgcaaccttcctgcctgattctcctgcctcagcctgccgagtgcctgggattgcaggcacgcgccgccacgcctgactggtttttgtgttttttggtggagacggggtttcgccatgttggccgggctggtctccagctcctgac

SEQ ID NO: 59039 - DNA, 874 bp, Homo sapiens
atggcaacagcagagcattaggccaagtatgaggtcattatgtacatgggtcctcgtgtgaccacacaggtcacaggaacatgaagctagacctgagtgtatattcagataggtaaatcttacagatttttaaaactcaataaaagaaaaactacatttcatgtataaacacaaaaattggaattaaattggcaatagcattgggatttgtgctcagagtcacagtttacatctgaccacaatttccatatgaatttattaagataaaacagtaagaattttaaagaaggtttctgaaatttaaaaattataataacataattaactttgatattttaattccatgtaatttaaaacatttaatagatatataatgttccactattaatttaactagaagtataaaaataaaacatatataataaaaatattctacttacttttaaattatctatattatactgagtaaaagaaaatttaggaatataaataaatgagcatttttgaacacataaaaatattttcttgctgtttttaggagacttttagcaggagaggagcttacctctcatctacctctgcttggacaaaccagtgatgtgatttgcaaataggttgtaacttcacccaaaacacatcacagtaaagaaatgtagtgacttccagagaatttgacctaactaagaatttgtaaaagagaaaagcattgtccttatgcctaaagtacatgactgtttctttttaagttacatgtatatttacctgaccaatttgttttactctgtatttcaagttatcaagtgaaattattttggaataaattaatgagttgtttgttctgaataaatgtgcatgttacaaatgcaaacacgtg

SEQ ID NO: 59040 - DNA, 673 bp, Homo sapiens
cttagctgctgaagaaggagagtcgcattcagccagggatcactgagcattcaaaagtccatctgagacctgctttcattgcactgcctcgtgaggagctgtaggagaagatatcataactattccccacttctaattgttagaagcaacagctgtctatcaagaacaatctgaggattgtgcacaaattgatttggttctatcaagtgctggctttcgattccagtctgacttcactaccacaggagcttcttgctcaggcttctgttccggctccattctctccctgccattataatgccatccactgcagcaccatctcttcaatcagaaaacattcatgatctcattccacctgaagccagtgcctctgtaatgtgtagcagaatcctatggagaagttgtaaaaacacaaaatgttggccccaccccaagagtttctgattttgcaggtctggagagggcctgtgatacgtacttctaacaagctcccaggcgatgctaatgttgctggtctagaaacacactttgagagccactgttttacaatgtattcacccagcttatgcaatcaactactatcacagcaaagtccaaagaatgctccttatttgtttgttatactggagtttggcttggctaaatattatttgaaactgaatggctgttgatt

SEQ ID NO: 59041 - DNA, 192 bp, Homo sapiens
  misc_feature (189)..(189): n is a, c, g, or t
  misc_feature (191)..(191): n is a, c, g, or t
acgcttggcactaatgggcacttgatagatgtttatttttgcatgaatggcatgtaaatttattacctaattaaatcatttggaggacaggcagtaagattcagatgtaaatactactggttgcatgcttctgctctgcaagactggcttcttgtgacatactgataatcggtcactgtgaatctgggnant

SEQ ID NO: 59042 - DNA, 757 bp, Homo sapiens
tttacaaaacaatgcagttgagcctcctccagtccaatgaaaacatactccctgggagtgcgcacaggtgattctaatgtgcgaccttagctgccctagcttttcaggtgaatgccatatttgtgcttgaatttctcaacgagcttactgctgcttacatccaacaggcaatttcactttctcatcaagggactgagttgctggactgttgtataagcacaggttacattgcaacccatttttttccttttttttttttttttgtttgagactatgtttcgccgtgttgcctaggctggactcaaacttctgggctcaagtgatcctctctcttcagcctcttgaggagatggggctttagctaccgtgcctggcttgcaacccatttttgaaactaatgggtttttgtgtatttgtgataaatgtgtatctaccacatattgagtgctttccatttctctggaactgtgctaagtactttattttatttaatccccacaacgattgtggggtcagcatccctgtccctattatactgatgaagaaacaggctcagagagactatgtggcttgcttcaggtcacccagtttaaaaagtgctgagtgtggattgggttcatagctctctgacttaatgctcttaagcatcattttgtgccgttcattcagggtcttgattgaagagttgagggccagttagccacccacaatgaactggaagtaaacatggagaggtcgtcacagtgtcactcgaggc

SEQ ID NO: 59043 - DNA, 251 bp, Homo sapiens
aaattttaagggtcatttcttactttcccagtgattgtttctccctggctggttttcaaaagcatttggggagtttcgtgtttaaaacagtttctttggcttcatcctggagtttctgattcattgagccttgggtagaatctcaaaatctgtattatttttaatttccaaatgattccagttgctaggtccatcagatctaaccctctttcaaacacaaagcaggtcttccttgttggaagaaagaaata

SEQ ID NO: 59044 - DNA, 452 bp, Homo sapiens
tgtgagcatagatgtttgaatgcagactatactgtaggtttcacatttaaacatatttgaacatatttagggacaaattattaaaatagttatatgatcaggcatatcataagtgatagaatattcccagagtttgaatattttgcataaaagatacagggtaggcaatgatatcaaacatctaaaccaaattggccattccaattattttaatccagggatttttctgttataaagtttgagaagtagaaaatgggctttctccttattttttaatcctttacagaattaattttatttcaactcgagttacatctggacttttgccattaaaaaaatactgcttggttcaatccttattagcctcaggtaaaagacatctcaggaaaagtgacacaaaagaggcaacctctaagttttacattttttatctcctccacagttcttctaat

SEQ ID NO: 59045 - DNA, 896 bp, Homo sapiens
atgtgtttaggatgaacacatagatgaaatgcataatatgaacatgagccagtacttaaagagctcgtggtgtgtgccaggagtgtgttttccatgcattcttcctgagaagtaggtttgattatacagtatctattttacagataaaggttgaggtcttttctttctaaggtgttattagacagctatagacatggacaccaaaacttgttgagccttcagcattgtaaaggcttggcttaccttccatcaccctcagcagttctgctggaagggaaaaatggaaacagggcccttaattttttctcattattggattaattggaagcactaggcatggtgtgctgcctggtggatagtagaggctcagtaaatgtttattgaatataaatctgaatcagaccaagtgaaaaaaagatagagaaaagcagtattagatcctggccccagactttaaaaaagtctgaggtcaccagagattttattagcatagtccatttgttaatattgcaggttaatggttggttgaaggctgaggtgaagaattgtccagtgtgtgttgcatgggattaactccagtctgggcaatttagttatctctagaaatctgttcacttcccactaggtacccctgctgctcaagaagctccaggctctgtgtttgtgttcagctgattcatttattcccaattaaaaaaaaaaacaaactagttgtaacattaaaatatgcaaataagataggtgtgactatcctaaataatcctatgtaactattctatttaaacataaataggaaggtataactgccataagtcatcacgagtgtatttcaaagccagatctgattgatatttctgtttacccttagctcaggtaattaagagttgacaccaagg

SEQ ID NO: 59046 - DNA, 332 bp, Homo sapiens
ttctttcttcttctttttttaaaggtcctgctttaaaaaccagaaggacacagagcccaaagttaggtcatgaggctttggccttgacaccaagggatgctgtctccttgccggaagcagctcaccaaagccggcagagaacccaggttccgtggggccacgatgtggggctccgcgggcgccccggcgctggccgacttcctgtctcctgggtcagatgctgctccgcactgcagctatggtcgcatgcagtgcctgccgaagcccgcagcaggaatgctgccttcggtgattttaatttcacttttctacttctctcaataacaaaatcc

SEQ ID NO: 59047 - DNA, 350 bp, Homo sapiens
ttcagaagcaccttcttgctaccgaagcgcctctctcagccctgacccttgtggttgagcatgcttccagcctgggcagtgcatggctgctctggagagaaatcccatgttatacttcaaactcgggcagtgcatgcctcccctgcagagaaatcctgtgtttcaactagatatttgtaacacctacatccttacaatgcagttaatcagatgatttatgtatttttagttgcgtagcctagaatgaatccagtttttttatgatcttagctttaacgtcgtccacaccccagtttgtccccaacaaaacaaaccagcaagatatttaataaatatttgtctttgtcatt

SEQ ID NO: 59048 - DNA, 301 bp, Homo sapiens
tgacccctgaccattttatgtactcaataaatagcaactataattcatctaatgataacaatgctcattttgaagctttaaaaatatgtaaaagcataaaggagaaagtagacataatctctagtcctaccactcagaggcaacaaatgttaatgttttagcatcttttcttcaccttccattcacacacatatatgtccacacagttgattttgcagtgtgcaaacaactttgtacggtgtgtattagccagggtttcatcagagaaggagagccacctcaagtcaatggtaaggagatc

SEQ ID NO: 59049 - DNA, 412 bp, Homo sapiens
gctaatttttaaatttttagtagagacggggttttgaactcctggtctccaacgcctgacctcaagtgatccacccgcctcagcctcccaaagtgctaagattacagctcgtgttcttcagttgtcttccctacgctgctgcctcggcagtcactatctcctcaggaagcagtcccacccgcccctttctcttccacggcatccacaccatccggatgcctggattcaaatgccacgtcaccacttgccagctgcagtgccttcgacaagtttctcaatcactctgtgcctcagcgtcctcctctgtaaaacggcgaatgatggtagcgcctacctcataagcttgtgaggattaagtgagagtctatccagtgttgaggagagtggcataaataaagcgcctagtggtagc

SEQ ID NO: 59050 - DNA, 325 bp, Homo sapiens
cgcaaggatcaggaactatatccagaacaagcaccacttccaatgctagcttatcattatagactcatcttatcttttattatttctggcctctgagaagcccttactttgtctccagtggagccaggaaataagagttttgatttattttttcaatccatcattttttagtgtgctaaactgcaatgagtttcctgtacctttagcctaccatattgccaaaaacaaaaggttaaggttccttaaccttaaggtagaaaaaataaaataaagtaacactttacagcatagtagaaaaggcagagtctgtagtgataatttaaaa

SEQ ID NO: 59051 - DNA, 425 bp, Homo sapiens
ttccagcaagttttcagcagactcagtgaccttttcctaagaccctctgcaatccatggggtgcttggtagaaatttgtacctccatgcttgtcaaactacagccattcagtgaatataatggatggtacaataaaataaattatttaaatagtagtaatagaacaaaaagcactgtatgtttttggggatacaatatcattgctggaataagcaattccttgagcagtaactaatgctaatgggaagacactatggctgcatgtcattctcggagttactctgattctgaggttcaaagctactattgtacaatctgggacttttactggtctgcaagtcttagtcttcagggtacctacactcagaaatcaagtaacctccttttgtctctgttagaactttctcatgcaagcttagtatgtt

SEQ ID NO: 59052 - DNA, 404 bp, Homo sapiens
catgatacgatgctctccatctgtgtaatcaagttattgatgataaaatgtgacactatagtaagtaatacattacaaataaatagtaatgtgtttatatatctctctctgattttaattgccttaaaattaagaattatattttatttgtgttcccaaagtctagcatactatttgcaatgtgagtaaaatattcgaaaactaattccaacaataattttctaatattctgtatgaaaaactggagaagcaaaagtttcttcaattcagagtctgataacaattctaggcttgatgtcatggagtgggtgtagaattgcctacatattggctgcaagaacctgagcacttcagctgttgtgggcatcagacagcttaagtgggcaaaactcaaaagtactagt

SEQ ID NO: 59053 - DNA, 555 bp, Homo sapiens
aaagtgctgggactacaggcgtgagccactgcatccggcctaggtggggttttgtccccgttctgcaggagggagactgaggctcggaggttcagggcctgcttggctgtacccagccccagtatatgccttggccacactagtcagatccttcccctcccactcctgccaccctgctcctgccctgtcccataatccaggttgaatgggggtggggatttggggagcaaggagggctcaaagagatggagataggcctgttgtcaggccaaagtgcaggttgggcactgggagtggggccaaccatagagcccccacccctgccagggtgtgggctgctcgaggaagacaggagtggcctggggcatgtgtgagattggcctgtggcctcaccctgtgggtggcaccagctctggccatggctttcccctttgccccaattcctggctcttctgaagccagatttggccgagggccctcactgggtactgagacagttccagaaaggactctagagccagccgagtccctccactctgcttccatccaagttct

SEQ ID NO: 59054 - DNA, 540 bp, Homo sapiens
tccccccaaccctccgtgggttaaagcatccatgtttacagaatgaaagatgagggcaggataccacttctcctagggatcatcatcattttgtggggctatagtccagagaggtgaaggacccatcttgtgactgcacagctaccctgtggcatgactgagactataatcttctggattcttcaggaaaccctggtagctgatgaaactgccctagaacgacagcaagacaatagggccatgaaagcataagccctgaagtctggacactgagagaattctaggcttgacttctctgtacagccatcttgggagtgctcaaccctttgaatcggatgtctagaatggactcagatgtcactgtgcaggtgactcacgcctagaatcctctgcctatcgtgacagggagaagcctgtgtgaccctgtggccatctcagtctctgcagggcatctgtagctttggaggtacctgggcaagagactgcctttcctactagagcttctgccatccctctgtcactatttaaagcattgcctgc

SEQ ID NO: 59055 - DNA, 1038 bp, Homo sapiens
aaggtaggcataaaccaggaccgggaccccaagagcttaagattcggtctcaatagaatatattcaagctgatttgtttgttagaacacccttcagttgcaatatgctaatcccactttacaaagaatataaaagctatattttgaagacttgagttatttcagaaaaaactacagccctttttgtcttacctgccttttactttcgtgtggatatgtgaagcattgggtcgggaactagctgtagaacacaactaaaaactcatgtcttttttcacagaataatgtgccagttttttgtagcaatgttatttctcttggaagcagaaatgctttgtaccagagcacctccaaactgcattgaggagaagttccagaaccatcccctttttccatttttatataatttataaagaaagattaaagccatgttgactattttacagccactggagttaactaacccttccttgtatctgtcttcccaggagagaatgaagcaaaacaggaatttggttttcttttgatgtccagttacaccatccattctgttaattttgaaaaaatataccctccctttagtttgttgggggatataaattattctcaggaagaatataatgaactgtacagttactttgacctattaaaaaggtgttaccagtaaaaaaaaaaaaaaaaaaaaaaaaaaaaaaaaaaaaaaaaaaaaaaaaaaaaaaaaaaaaaaaaaaaaaaaaaaaaaaaaaaaaaaaaaaaaaaaaaaaaaaaaaaaaggggggcgcggcgccaacataaaatcttactgccgtcgtgagtagaacaacaagatgatagccacctcccccccttttttgatggaaaagagcagcggcaccacatcattatgtgctgagtatttattaatattaatcaagctgggacgtggctctttttataaaaacaaattcggtgccagcaggagaaaacaatatatagctatgttttttttaggaagaaaaacacacttctgtgtgggcgagatatatcatcgcgcaacatc

SEQ ID NO: 59056 - DNA, 696 bp, Homo sapiens
acaggagctgagtcactcatcattgctctctcatttgcttctaacgactgaaacctctgttgctcccagaagacaagatttatttattttccatttaaagttagaattgggttgtaaaagcaatgtatgctgagtagagccatcctcaaaccaaggggagtgtttgactcaggcacaaacaaccacaagcttctgagtttggcagtcagaagtcaggtgcagcctgccccgaggggtgccagctggaactgttggcgcctgtgactctcctgggtccccaccagccctcaccgagtgctggagccactagagcagcagcctcagcagccctgctgacagctacaacgagggtgtcaaggtgggcatctgagcctgtgcagcaccttctgcttgcaggatttgtggtgtcccctagttctcagttgatgtgttcatgtcatagagtggagttggtgctgaaaatagaacagtgcagagtggaactgcagtgagacccaggagtcaattggtctggttctgaacccctctgagagtcagggaaaagctttatgcaaacattttcttttccattttcctctcagtgtaatagattttaggaattcagtcagattctgattttctacatacatcttcctctgatcagacagaatgttttctttagaacaaagtgccaagattgtttctggttttaaaaat

SEQ ID NO: 59057 - DNA, 745 bp, Homo sapiens
agcacggcctcgagggcgcgacgcgccgccgccgccgccgccggtcccggaccactgtgagcccgcggcgtgaggcgtgggaggaagcgcggctgctgtcgcccagcgccgccccgtcgtcgtctgccttcgcttcacggcgccgagccgcggtccgaaatatgacagatacctagcatctagcaaaataatggcagctgcttaccttgaccccaacttgaatcacacaccaaattcgagtactaagactcacctgggtactggtatggaacgttctcctggtgcaatggagcgagtattaaaggtctttcattattttgaaagcaatagtgagccaaccacctgggccagtattatcaggcatggagatgctactgatgtcaggggcatcattcagaagatagtggacagtcacaaagtaaagcatgtggcctgctatggattccgcctcagtcacctgcggtcagaggaggttcactggcttcacgtggatatgggcgtctccagtgtgagggagaagtatgagcttgctcacccaccagaggagtgcaagtaagatacaaaccttgctttggtgtgatgcacaccttgatttcttttgcgtttttaaaaacatgcacaagattacaaatgtatatgttcaattttcacactgcttgtccattacaatctggtataaataaaatcgttagtaattattaccgattgatcttcttctagacctctagtctagctttgggtatac

SEQ ID NO: 59058 - DNA, 652 bp, Homo sapiens
cttagtcttgcttgtggatcgaagcaaatactatcacagcgaggaactgggactttgtgtgcagactcctggcttgatctttataggattgggtgtatgttgttggaactggcaggccaagaggccctgaaaccagcaggtgccatctatatggagaaaagcggatgtagtccatttccagtgtgttgggctaaagaatatgacagatacctagcatctagcaaaataatggcagctgcttaccttgaccccaacttgaatcacacaccaaattcgagtactaagactcacctgggtactggtatggaacgttctcctggtgcaatggagcgagtattaaaggtctttcattattttgaaagcaatagtgagccaaccacctgggccagtattatcaggcatggagatgctactgatgtcagggtaagtacgtttttccatgagacatctttaatgtttatttaggttaaaatgtaatggcatgtatgaaaaaagatagtgtaataatttttatttaacttatcggggacttttcatattacagaaatgctatttttaattataagatttattagttaatatgtgactgaccagcgttctaattgttgtaaagtttcttagaaaaataatgactggatcatattttagtcat

SEQ ID NO: 59059 - DNA, 227 bp, Homo sapiens
aggaggggaggccggtggccgtgaggaggttgggggccctcgcggaggccgagaggcttaaggaggcagaactggggctcccttgcatcttccagttacaaattcagtgccttctgcagtttccccagagctcctcaagaataacggaagggaggtatagtaatggttaagaaactttgcaaagaaagtgaataatgccagtactgtcaccttttggaacttgttgg

SEQ ID NO: 59060 - DNA, 4502 bp, Homo sapiens
agcacggcctcgagggcgcgacgcgccgccgccgccgccgccggtcccggaccactgtgagcccgcggcgtgaggcgtgggaggaagcgcggctgctgtcgcccagcgccgccccgtcgtcgtctgccttcgcttcacggcgccgagccgcggtccgagcagaactggggctcccttgcatcttccagttacaaattcagtgccttctgcagtttccccagagctcctcaagaataacggaagggagaatatgacagatacctagcatctagcaaaataatggcagctgcttaccttgaccccaacttgaatcacacaccaaattcgagtactaagactcacctgggtactggtatggaacgttctcctggtgcaatggagcgagtattaaaggtctttcattattttgaaagcaatagtgagccaaccacctgggccagtattatcaggcatggagatgctactgatgtcaggggcatcattcagaagatagtggacagtcacaaagtaaagcatgtggcctgctatggattccgcctcagtcacctgcggtcagaggaggttcactggcttcacgtggatatgggcgtctccagtgtgagggagaagtatgagcttgctcacccaccagaggagtggaaatatgaattgagaattcgttatttgccaaaaggatttctaaaccagtttactgaagataagccaactttgaatttcttctatcaacaggtgaagagcgattatatgttagagatagctgatcaagtggaccaggaaattgctttgaagttgggttgtctagaaatacggcgatcatactgggagatgcggggcaatgcactagaaaagaagtctaactatgaagtattagaaaaagatgttggtttaaagcgattttttcctaagagtttactggattctgtcaaggccaaaacactaagaaaactgatccaacaaacatttagacaatttgccaaccttaatagagaagaaagtattctgaaattctttgagatcctgtctccagtctacagatttgataaggaatgcttcaagtgtgctcttggttcaagctggattatttcagtggaactggcaatcggcccagaagaaggaatcagttacctaacggacaagggctgcaatcccacacatcttgctgacttcactcaagtgcaaaccattcagtattcaaacagtgaagacaaggacagaaaaggaatgctacaactaaaaatagcaggtgcacccgagcctctgacagtgacggcaccatccctaaccattgcggagaatatggctgacctaatagatgggtactgccggctggtgaatggaacctcgcagtcatttatcatcagacctcagaaagaaggtgaacgggctttgccatcaataccaaagttggccaacagcgaaaagcaaggcatgcggacacacgccgtctctgtgtcagaaacagatgattatgctgagattatagatgaagaagatacttacaccatgccctcaaccagggattatgagattcaaagagaaagaatagaacttggacgatgtattggagaaggccaatttggagatgtacatcaaggcatttatatgagtccagagaatccagctttggcggttgcaattaaaacatgtaaaaactgtacttcggacagcgtgagagagaaatttcttcaagaagccttaacaatgcgtcagtttgaccatcctcatattgtgaagctgattggagtcatcacagagaatcctgtctggataatcatggagctgtgcacacttggagagctgaggtcatttttgcaagtaaggaaatacagtttggatctagcatctttgatcctgtatgcctatcagcttagtacagctcttgcatatctagagagcaaaagatttgtacacagggacattgctgctcggaatgttctggtgtcctcaaatgattgtgtaaaattaggagactttggattatcccgatatatggaagatagtacttactacaaagcttccaaaggaaaattgcctattaaatggatggctccagagtcaatcaattttcgacgttttacctcagctagtgacgtatggatgtttggtgtgtgtatgtgggagatactgatgcatggtgtgaagccttttcaaggagtgaagaacaatgatgtaatcggtcgaattgaaaatggggaaagattaccaatgcctccaaattgtcctcctaccctctacagccttatgacgaaatgctgggcctatgaccccagcaggcggcccaggtttactgaacttaaagctcagctcagcacaatcctggaggaagagaaggctcagcaagaagagcgcatgaggatggagtccagaagacaggccacagtgtcctgggactccggagggtctgatgaagcaccgcccaagcccagcagaccgggttatcccagtccgaggtccagcgaaggattttatcccagcccacagcacatggtacaaaccaatcattaccaggtttctggctaccctggttcacatggaatcacagccatggctggcagcatctatccaggtcaggcatctcttttggaccaaacagattcatggaatcatagacctcaggagatagcaatgtggcagcccaatgtggaggactctacagtattggacctgcgagggattgggcaagtgttgccaacccatctgatggaagagcgtctaatccgacagcaacaggaaatggaagaagatcagcgctggctggaaaaagaggaaagatttctgaaacctgatgtgagactctctcgaggcagtattgacagggaggatggaagtcttcagggtccgattggaaaccaacatatatatcagcctgtgggtaaaccagatcctgcagctccaccaaagaaaccgcctcgccctggagctcccggtcatctgggaagccttgccagcctcagcagccctgctgacagctacaacgagggtgtcaagcttcagccccaggaaatcagcccccctcctactgccaacctggaccggtcgaatgataaggtgtacgagaatgtgacgggcctggtgaaagctgtcatcgagatgtccagtaaaatccagccagccccaccagaggagtatgtccctatggtgaaggaagtcggcttggccctgaggacattattggccactgtggatgagaccattcccctcctaccagccagcacccaccgagagattgagatggcacagaagctattgaactctgacctgggtgagctcatcaacaagatgaaactggcccagcagtatgtcatgaccagcctccagcaagagtacaaaaagcaaatgctgactgctgctcacgccctggctgtggatgccaaaaacttactcgatgtcattgaccaagcaagactgaaaatgcttgggcagacgagaccacactgagcctcccctaggagcacgtcttgctaccctcttttgaagatgttctctagccttccaccagcagcgaggaattaaccctgtgtcctcagtcgccagcacttacagctccaacttttttgaatgaccatctggttgaaaaatctttctcatataagtttaaccacactttgatttgggttcattttttgttttgtttttttcaatcatgatattcagaaaaatccaggatccaaaatgtggcgtttttctaagaatgaaaattatatgtaagcttttaagcatcatgaagaacaatttatgttcacattaagatacgttctaaagggggatggccaaggggtgacatcttaattcctaaactaccttagctgcatagtggaagaggagagcatgaagcaaagaattccaggaaacccaagaggctgagaattcttttgtctaccatagaattattatccagactggaatttttgtttgttagaacacccttcagttgcaatatgctaatcccactttacaaagaatataaaagctatattttgaagacttgagttatttcagaaaaaactacagccctttttgtcttacctgccttttactttcgtgtggatatgtgaagcattgggtcgggaactagctgtagaacacaactaaaaactcatgtcttttttcacagaataatgtgccagttttttgtagcaatgttatttctcttggaagcagaaatgctttgtaccagagcacctccaaactgcattgaggagaagttccagaaccatcccctttttccatttttatataatttataaagaaagattaaagccatgttgactattttacagccactggagttaactaacccttccttgtatctgtcttcccaggagagaatgaagcaaaacaggaatttggttttcttttgatgtccagttacaccatccattctgttaattttgaaaaaatataccctccctttagtttgttgggggatataaattattctcaggaagaatataatgaactgtacagttactttgacctattaaaaaggtgttaccagtaaa

SEQ ID NO: 59061 - DNA, 3718 bp, Homo sapiens
ccggtgtgaaggccatgagtgattactgggttgttggaaagaagtctaactatgaagtattagaaaaagatgttggtttaaagcgattttttcctaagagtttactggattctgtcaaggccaaaacactaagaaaactgatccaacaaacatttagacaatttgccaaccttaatagagaagaaagtattctgaaattctttgagatcctgtctccagtctacagatttgataaggaatgcttcaagtgtgctcttggttcaagctggattatttcagtggaactggcaatcggcccagaagaaggaatcagttacctaacggacaagggctgcaatcccacacatcttgctgacttcactcaagtgcaaaccattcagtattcaaacagtgaagacaaggacagaaaaggaatgctacaactaaaaatagcaggtgcacccgagcctctgacagtgacggcaccatccctaaccattgcggagaatatggctgacctaatagatgggtactgccggctggtgaatggaacctcgcagtcatttatcatcagacctcagaaagaaggtgaacgggctttgccatcaataccaaagttggccaacagcgaaaagcaaggcatgcggacacacgccgtctctgtgtcagaaacagatgattatgctgagattatagatgaagaagatacttacaccatgccctcaaccagggattatgagattcaaagagaaagaatagaacttggacgatgtattggagaaggccaatttggagatgtacatcaaggcatttatatgagtccagagaatccagctttggcggttgcaattaaaacatgtaaaaactgtacttcggacagcgtgagagagaaatttcttcaagaagcctgccattacacatctttgcactggaattggtgcagatatataagtgatcctaatgttgatgcctgcccagaccccaggaatgcagagttaacaatgcgtcagtttgaccatcctcatattgtgaagctgattggagtcatcacagagaatcctgtctggataatcatggagctgtgcacacttggagagctgaggtcatttttgcaagtaaggaaatacagtttggatctagcatctttgatcctgtatgcctatcagcttagtacagctcttgcatatctagagagcaaaagatttgtacacagggacattgctgctcggaatgttctggtgtcctcaaatgattgtgtaaaattaggagactttggattatcccgatatatggaagatagtacttactacaaagcttccaaaggaaaattgcctattaaatggatggctccagagtcaatcaattttcgacgttttacctcagctagtgacgtatggatgtttggtgtgtgtatgtgggagatactgatgcatggtgtgaagccttttcaaggagtgaagaacaatgatgtaatcggtcgaattgaaaatggggaaagattaccaatgcctccaaattgtcctcctaccctctacagccttatgacgaaatgctgggcctatgaccccagcaggcggcccaggtttactgaacttaaagctcagctcagcacaatcctggaggaagagaaggctcagcaagaagagcgcatgaggatggagtccagaagacaggccacagtgtcctgggactccggagggtctgatgaagcaccgcccaagcccagcagaccgggttatcccagtccgaggtccagcgaaggattttatcccagcccacagcacatggtacaaaccaatcattaccaggtttctggctaccctggttcacatggaatcacagccatggctggcagcatctatccaggtcaggcatctcttttggaccaaacagattcatggaatcatagacctcaggagatagcaatgtggcagcccaatgtggaggactctacagtattggacctgcgagggattgggcaagtgttgccaacccatctgatggaagagcgtctaatccgacagcaacaggaaatggaagaagatcagcgctggctggaaaaagaggaaagatttctgattggaaaccaacatatatatcagcctgtgggtaaaccagatcctgcagctccaccaaagaaaccgcctcgccctggagctcccggtcatctgggaagccttgccagcctcagcagccctgctgacagctacaacgagggtgtcaagcttcagccccaggaaatcagcccccctcctactgccaacctggaccggtcgaatgataaggtgtacgagaatgtgacgggcctggtgaaagctgtcatcgagatgtccagtaaaatccagccagccccaccagaggagtatgtccctatggtgaaggaagtcggcttggccctgaggacattattggccactgtggatgagaccattcccctcctaccagccagcacccaccgagagattgagatggcacagaagctattgaactctgacctgggtgagctcatcaacaagatgaaactggcccagcagtatgtcatgaccagcctccagcaagagtacaaaaagcaaatgctgactgctgctcacgccctggctgtggatgccaaaaacttactcgatgtcattgaccaagcaagactgaaaatgcttgggcagacgagaccacactgagcctcccctaggagcacgtcttgctaccctcttttgaagatgttctctagccttccaccagcagcgaggaattaaccctgtgtcctcagtcgccagcacttacagctccaacttttttgaatgaccatctggttgaaaaatctttctcatataagtttaaccacactttgatttgggttcattttttgttttgtttttttcaatcatgatattcagaaaaatccaggatccaaaatgtggcgtttttctaagaatgaaaattatatgtaagcttttaagcatcatgaagaacaatttatgttcacattaagatacgttctaaagggggatggccaaggggtgacatcttaattcctaaactaccttagctgcatagtggaagaggagagcatgaagcaaagaattccaggaaacccaagaggctgagaattcttttgtctaccatagaattattatccagactggaatttttgtttgttagaacacccttcagttgcaatatgctaatcccactttacaaagaatataaaagctatattttgaagacttgagttatttcagaaaaaactacagccctttttgtcttacctgccttttactttcgtgtggatatgtgaagcattgggtcgggaactagctgtagaacacaactaaaaactcatgtcttttttcacagaataatgtgccagttttttgtagcaatgttatttctcttggaagcagaaatgctttgtaccagagcacctccaaactgcattgaggagaagttccagaaccatcccctttttccatttttatataatttataaagaaagattaaagccatgttgactattttacagccactggagttaactaacccttccttgtatctgtcttcccaggagagaatgaagcaaaacaggaatttggttttcttttgatgtccagttacaccatccattctgttaattttgaaaaaatataccctccctttagtttgttgggggatataaattattctcaggaagaatataatgaactgtacagttactttgacctattaaaaaggtgttaccagtaaa

SEQ ID NO: 59062 - DNA, 4848 bp, Homo sapiens
agcacggcctcgagggcgcgacgcgccgccgccgccgccgccggtcccggaccactgtgagcccgcggcgtgaggcgtgggaggaagcgcggctgctgtcgcccagcgccgccccgtcgtcgtctgccttcgcttcacggcgccgagccgcggtccgaaatatgacagatacctagcatctagcaaaataatggcagctgcttaccttgaccccaacttgaatcacacaccaaattcgagtactaagactcacctgggtactggtatggaacgttctcctggtgcaatggagcgagtattaaaggtctttcattattttgaaagcaatagtgagccaaccacctgggccagtattatcaggcatggagatgctactgatgtcaggggcatcattcagaagatagtggacagtcacaaagtaaagcatgtggcctgctatggattccgcctcagtcacctgcggtcagaggaggttcactggcttcacgtggatatgggcgtctccagtgtgagggagaagtatgagcttgctcacccaccagaggagtggaaatatgaattgagaattcgttatttgccaaaaggatttctaaaccagtttactgaagataagccaactttgaatttcttctatcaacaggtgaagagcgattatatgttagagatagctgatcaagtggaccaggaaattgctttgaagttgggttgtctagaaatacggcgatcatactgggagatgcggggcaatgcactagaaaagaagtctaactatgaagtattagaaaaagatgttggtttaaagcgattttttcctaagagtttactggattctgtcaaggccaaaacactaagaaaactgatccaacaaacatttagacaatttgccaaccttaatagagaagaaagtattctgaaattctttgagatcctgtctccagtctacagatttgataaggaatgcttcaagtgtgctcttggttcaagctggattatttcagtggaactggcaatcggcccagaagaaggaatcagttacctaacggacaagggctgcaatcccacacatcttgctgacttcactcaagtgcaaaccattcagtattcaaacagtgaagacaaggacagaaaaggaatgctacaactaaaaatagcaggtgcacccgagcctctgacagtgacggcaccatccctaaccattgcggagaatatggctgacctaatagatgggtactgccggctggtgaatggaacctcgcagtcatttatcatcagacctcagaaagaaggtgaacgggctttgccatcaataccaaagttggccaacagcgaaaagcaaggcatgcggacacacgccgtctctgtgtcagaaacagatgattatgctgagattatagatgaagaagatacttacaccatgccctcaaccagggattatgagattcaaagagaaagaatagaacttggacgatgtattggagaaggccaatttggagatgtacatcaaggcatttatatgagtccagagaatccagctttggcggttgcaattaaaacatgtaaaaactgtacttcggacagcgtgagagagaaatttcttcaagaagccttaacaatgcgtcagtttgaccatcctcatattgtgaagctgattggagtcatcacagagaatcctgtctggataatcatggagctgtgcacacttggagagctgaggtcatttttgcaagtaaggaaatacagtttggatctagcatctttgatcctgtatgcctatcagcttagtacagctcttgcatatctagagagcaaaagatttgtacacagggacattgctgctcggaatgttctggtgtcctcaaatgattgtgtaaaattaggagactttggattatcccgatatatggaagatagtacttactacaaagcttccaaaggaaaattgcctattaaatggatggctccagagtcaatcaattttcgacgttttacctcagctagtgacgtatggatgtttggtgtgtgtatgtgggagatactgatgcatggtgtgaagccttttcaaggagtgaagaacaatgatgtaatcggtcgaattgaaaatggggaaagattaccaatgcctccaaattgtcctcctaccctctacagccttatgacgaaatgctgggcctatgaccccagcaggcggcccaggtttactgaacttaaagctcagctcagcacaatcctggaggaagagaaggctcagcaagaagagcgcatgaggatggagtccagaagacaggccacagtgtcctgggactccggagggtctgatgaagcaccgcccaagcccagcagaccgggttatcccagtccgaggtccagcgaaggattttatcccagcccacagcacatggtacaaaccaatcattaccaggtttctggctaccctggttcacatggaatcacagccatggctggcagcatctatccaggtcaggcatctcttttggaccaaacagattcatggaatcatagacctcaggagatagcaatgtggcagcccaatgtggaggactctacagtattggacctgcgagggattgggcaagtgttgccaacccatctgatggaagagcgtctaatccgacagcaacaggaaatggaagaagatcagcgctggctggaaaaagaggaaagatttctgatgcagtgtgggaaaacagtcttgtaattgaactcatttgctactttggcaagacagctaaatccgtataagccatattctgtcagaaagccgcaagtaatgcctgatatttttatcctggggttgcgggtatctcagtgaagaagaaagccatctgtgctacttggaatagaggtaaagtgcaggttctccagcactgggtgggccagtgcaggtaccagtctgtaaggtgtgcgtgtgtggagaggaatgcagttcttcccaaggcagccaaccttcatttatcatcactggaatttttttgaaacgggggaactttcaactcttcttattcagaggacaattgtgttaaaaaggaaggaatttaatacagaatctgtcaaaaattttcaaatcaaaaatgaaattgttttgattttgttttaatttcttcagaaacctgatgtgagactctctcgaggcagtattgacagggaggatggaagtcttcagggtccgattggaaaccaacatatatatcagcctgtgggtaaaccagatcctgcagctccaccaaagaaaccgcctcgccctggagctcccggtcatctgggaagccttgccagcctcagcagccctgctgacagctacaacgagggtgtcaagcttcagccccaggaaatcagcccccctcctactgccaacctggaccggtcgaatgataaggtgtacgagaatgtgacgggcctggtgaaagctgtcatcgagatgtccagtaaaatccagccagccccaccagaggagtatgtccctatggtgaaggaagtcggcttggccctgaggacattattggccactgtggatgagaccattcccctcctaccagccagcacccaccgagagattgagatggcacagaagctattgaactctgacctgggtgagctcatcaacaagatgaaactggcccagcagtatgtcatgaccagcctccagcaagagtacaaaaagcaaatgctgactgctgctcacgccctggctgtggatgccaaaaacttactcgatgtcattgaccaagcaagactgaaaatgcttgggcagacgagaccacactgagcctcccctaggagcacgtcttgctaccctcttttgaagatgttctctagccttccaccagcagcgaggaattaaccctgtgtcctcagtcgccagcacttacagctccaacttttttgaatgaccatctggttgaaaaatctttctcatataagtttaaccacactttgatttgggttcattttttgttttgtttttttcaatcatgatattcagaaaaatccaggatccaaaatgtggcgtttttctaagaatgaaaattatatgtaagcttttaagcatcatgaagaacaatttatgttcacattaagatacgttctaaagggggatggccaaggggtgacatcttaattcctaaactaccttagctgcatagtggaagaggagagcatgaagcaaagaattccaggaaacccaagaggctgagaattcttttgtctaccatagaattattatccagactggaatttttgtttgttagaacacccttcagttgcaatatgctaatcccactttacaaagaatataaaagctatattttgaagacttgagttatttcagaaaaaactacagccctttttgtcttacctgccttttactttcgtgtggatatgtgaagcattgggtcgggaactagctgtagaacacaactaaaaactcatgtcttttttcacagaataatgtgccagttttttgtagcaatgttatttctcttggaagcagaaatgctttgtaccagagcacctccaaactgcattgaggagaagttccagaaccatcccctttttccatttttatataatttataaagaaagattaaagccatgttgactattttacagccactggagttaactaacccttccttgtatctgtcttcccaggagagaatgaagcaaaacaggaatttggttttcttttgatgtccagttacaccatccattctgttaattttgaaaaaatataccctccctttagtttgttgggggatataaattattctcaggaagaatataatgaactgtacagttactttgacctattaaaaaggtgttaccagtaaa

SEQ ID NO: 59063 - DNA, 4546 bp, Homo sapiens
agcacggcctcgagggcgcgacgcgccgccgccgccgccgccggtcccggaccactgtgagcccgcggcgtgaggcgtgggaggaagcgcggctgctgtcgcccagcgccgccccgtcgtcgtctgccttcgcttcacggcgccgagccgcggtccgagcagaactggggctcccttgcatcttccagttacaaattcagtgccttctgcagtttccccagagctcctcaagaataacggaagggagaatatgacagatacctagcatctagcaaaataatggcagctgcttaccttgaccccaacttgaatcacacaccaaattcgagtactaagactcacctgggtactggtatggaacgttctcctggtgcaatggagcgagtattaaaggtctttcattattttgaaagcaatagtgagccaaccacctgggccagtattatcaggcatggagatgctactgatgtcaggggcatcattcagaagatagtggacagtcacaaagtaaagcatgtggcctgctatggattccgcctcagtcacctgcggtcagaggaggttcactggcttcacgtggatatgggcgtctccagtgtgagggagaagtatgagcttgctcacccaccagaggagtggaaatatgaattgagaattcgttatttgccaaaaggatttctaaaccagtttactgaagataagccaactttgaatttcttctatcaacaggtgaagagcgattatatgttagagatagctgatcaagtggaccaggaaattgctttgaagttgggttgtctagaaatacggcgatcatactgggagatgcggggcaatgcactagaaaagaagtctaactatgaagtattagaaaaagatgttggtttaaagcgattttttcctaagagtttactggattctgtcaaggccaaaacactaagaaaactgatccaacaaacatttagacaatttgccaaccttaatagagaagaaagtattctgaaattctttgagatcctgtctccagtctacagatttgataaggaatgcttcaagtgtgctcttggttcaagctggattatttcagtggaactggcaatcggcccagaagaaggaatcagttacctaacggacaagggctgcaatcccacacatcttgctgacttcactcaagtgcaaaccattcagtattcaaacagtgaagacaaggacagaaaaggaatgctacaactaaaaatagcaggtgcacccgagcctctgacagtgacggcaccatccctaaccattgcggagaatatggctgacctaatagatgggtactgccggctggtgaatggaacctcgcagtcatttatcatcagacctcagaaagaaggtgaacgggctttgccatcaataccaaagttggccaacagcgaaaagcaaggcatgcggacacacgccgtctctgtgtcagaaacagatgattatgctgagattatagatgaagaagatacttacaccatgccctcaaccagggattatgagattcaaagagaaagaatagaacttggacgatgtattggagaaggccaatttggagatgtacatcaaggcatttatatgagtccagagaatccagctttggcggttgcaattaaaacatgtaaaaactgtacttcggacagcgtgagagagaaatttcttcaagaagccttaacaatgcgtcagtttgaccatcctcatattgtgaagctgattggagtcatcacagagaatcctgtctggataatcatggagctgtgcacacttggagagctgaggtcatttttgcaagtaaggaaatacagtttggatctagcatctttgatcctgtatgcctatcagcttagtacagctcttgcatatctagagagcaaaagatttgtacacagggacattgctgctcggaatgttctggtgtcctcaaatgattgtgtaaaattaggagactttggattatcccgatatatggaagatagtacttactacaaagcttccaaaggaaaattgcctattaaatggatggctccagagtcaatcaattttcgacgttttacctcagctagtgacgtatggatgtttggtgtgtgtatgtgggagatactgatgcatggtgtgaagccttttcaaggagtgaagaacaatgatgtaatcggtcgaattgaaaatggggaaagattaccaatgcctccaaattgtcctcctaccctctacagccttatgacgaaatgctgggcctatgaccccagcaggcggcccaggtttactgaacttaaagctcagctcagcacaatcctggaggaagagaaggctcagcaagaagagcgcatgaggatggagtccagaagacaggccacagtgtcctgggactccggagggtctgatgaagcaccgcccaagcccagcagaccgggttatcccagtccgaggtccagcgaaggattttatcccagcccacagcacatggtacaaaccaatcattaccaggtttctggctaccctggttcacatggaatcacagccatggctggcagcatctatccaggtcaggcatctcttttggaccaaacagattcatggaatcatagacctcaggagatagcaatgtggcagcccaatgtggaggactctacagtattggacctgcgagggattgggcaagtgttgccaacccatctgatggaagagcgtctaatccgacagcaacaggaaatggaagaagatcagcgctggctggaaaaagaggaaagatttctgaaacctgatgtgagactctctcgaggcagtattgacagggaggatggaagtcttcagggtccgattggaaaccaacatatatatcagcctgtgggtaaaccagatcctgcagctccaccaaagaaaccgcctcgccctggagctcccggtcatctgggaagccttgccagcctcagcagccctgctgacagctacaacgagggtgtcaagcttcagccccaggaaatcagcccccctcctactgccaacctggaccggtcgaatgataaggtgtacgagaatgtgacgggcctggtgaaagctgtcatcgagatgtccagtaaaatccagccagccccaccagaggagtatgtccctatggtgaaggaagtcggcttggccctgaggacattattggccactgtggatgagaccattcccctcctaccagccagcacccaccgagagattgagatggcacagaagctattgaactctgacctgggtgagctcatcaacaagatgaaactggcccagcagtatgtcatgaccagcctccagcaagagtacaaaaagcaaatgctgactgctgctcacgccctggctgtggatgccaaaaacttactcgatgtcattgaccaagcaagactgaaaatgcttgggcagacgagaccacactgagcctcccctaggagcacgtcttgctaccctcttttgaagatgttctctagccttccaccagcagcgaggaattaaccctgtgtcctcagtcgccagcacttacagctccaacttttttgaatgaccatctggttgaaaaatctttctcatataagtttaaccacactttgatttgggttcattttttgttttgtttttttcaatcatgatattcagaaaaatccaggatccaaaatgtggcgtttttctaagaatgaaaattatatgtaagcttttaagcatcatgaagaacaatttatgttcacattaagatacgttctaaagggggatggccaaggggtgacatcttaattcctaaactaccttagctgcatagtggaagaggagagcatgaagcaaagaattccaggaaacccaagaggctgagaattcttttgtctaccatagaattattatccagactggaatttttgtttgttagaacacccttcagttgcaatatgctaatcccactttacaaagaatataaaagctatattttgaagacttgagttatttcagaaaaaactacagccctttttgtcttacctgccttttactttcgtgtggatatgtgaagcattgggtcgggaactagctgtagaacacaactaaaaactcatgtcttttttcacagaataatgtgccagttttttgtagcaatgttatttctcttggaagcagaaatgctttgtaccagagcacctccaaactgcattgaggagaagttccagaaccatcccctttttccatttttatataatttataaagaaagattaaagccatgttgactattttacagccactggagttaactaacccttccttgtatctgtcttcccaggagagaatgaagcaaaacaggaatttggttttcttttgatgtccagttacaccatccattctgttaattttgaaaaaatataccctccctttagtttgttgggggatataaattattctcaggaagaatataatgaactgtacagttactttgacctattaaaaaggtgttaccagtaaagttcttgttgtaatatccttaaaaaagcgacgcagcaccgcaca

SEQ ID NO: 59064 - DNA, 4448 bp, Homo sapiens
agcacggcctcgagggcgcgacgcgccgccgccgccgccgccggtcccggaccactgtgagcccgcggcgtgaggcgtgggaggaagcgcggctgctgtcgcccagcgccgccccgtcgtcgtctgccttcgcttcacggcgccgagccgcggtccgagcagaactggggctcccttgcatcttccagttacaaattcagtgccttctgcagtttccccagagctcctcaagaataacggaagggagaatatgacagatacctagcatctagcaaaataatggcagctgcttaccttgaccccaacttgaatcacacaccaaattcgagtactaagactcacctgggtactggtatggaacgttctcctggtgcaatggagcgagtattaaaggtctttcattattttgaaagcaatagtgagccaaccacctgggccagtattatcaggcatggagatgctactgatgtcaggggcatcattcagaagatagtggacagtcacaaagtaaagcatgtggcctgctatggattccgcctcagtcacctgcggtcagaggaggttcactggcttcacgtggatatgggcgtctccagtgtgagggagaagtatgagcttgctcacccaccagaggagtggaaatatgaattgagaattcgttatttgccaaaaggatttctaaaccagtttactgaagataagccaactttgaatttcttctatcaacaggtgaagagcgattatatgttagagatagctgatcaagtggaccaggaaattgctttgaagttgggttgtctagaaatacggcgatcatactgggagatgcggggcaatgcactagaaaagaagtctaactatgaagtattagaaaaagatgttggtttaaagcgattttttcctaagagtttactggattctgtcaaggccaaaacactaagaaaactgatccaacaaacatttagacaatttgccaaccttaatagagaagaaagtattctgaaattctttgagatcctgtctccagtctacagatttgataaggaatgcttcaagtgtgctcttggttcaagctggattatttcagtggaactggcaatcggcccagaagaaggaatcagttacctaacggacaagggctgcaatcccacacatcttgctgacttcactcaagtgcaaaccattcagtattcaaacagtgaagacaaggacagaaaaggaatgctacaactaaaaatagcaggtgcacccgagcctctgacagtgacggcaccatccctaaccattgcggagaatatggctgacctaatagatgggtactgccggctggtgaatggaacctcgcagtcatttatcatcagacctcagaaagaaggtgaacgggctttgccatcaataccaaagttggccaacagcgaaaagcaaggcatgcggacacacgccgtctctgtgtcagaaacagatgattatgctgagattatagatgaagaagatacttacaccatgccctcaaccagggattatgagattcaaagagaaagaatagaacttggacgatgtattggagaaggccaatttggagatgtacatcaaggcatttatatgagtccagagaatccagctttggcggttgcaattaaaacatgtaaaaactgtacttcggacagcgtgagagagaaatttcttcaagaagccttaacaatgcgtcagtttgaccatcctcatattgtgaagctgattggagtcatcacagagaatcctgtctggataatcatggagctgtgcacacttggagagctgaggtcatttttgcaagtaaggaaatacagtttggatctagcatctttgatcctgtatgcctatcagcttagtacagctcttgcatatctagagagcaaaagatttgtacacagggacattgctgctcggaatgttctggtgtcctcaaatgattgtgtaaaattaggagactttggattatcccgatatatggaagatagtacttactacaaagcttccaaaggaaaattgcctattaaatggatggctccagagtcaatcaattttcgacgttttacctcagctagtgacgtatggatgtttggtgtgtgtatgtgggagatactgatgcatggtgtgaagccttttcaaggagtgaagaacaatgatgtaatcggtcgaattgaaaatggggaaagattaccaatgcctccaaattgtcctcctaccctctacagccttatgacgaaatgctgggcctatgaccccagcaggcggcccaggtttactgaacttaaagctcagctcagcacaatcctggaggaagagaaggctcagcaagaagagcgcatgaggatggagtccagaagacaggccacagtgtcctgggactccggagggtctgatgaagcaccgcccaagcccagcagaccgggttatcccagtccgaggtccagcgaaggattttatcccagcccacagcacatggtacaaaccaatcattaccaggtttctggctaccctggttcacatggaatcacagccatggctggcagcatctatccaggtcaggcatctcttttggaccaaacagattcatggaatcatagacctcaggagatagcaatgtggcagcccaatgtggaggactctacagtattggacctgcgagggattgggcaagtgttgccaacccatctgatggaagagcgtctaatccgacagcaacaggaaatggaagaagatcagcgctggctggaaaaagaggaaagatttctgaaacctgatgtgagactctctcgaggcagtattgacagggaggatggaagtcttcagggtccgattggaaaccaacatatatatcagcctgtgggtaaaccagatcctgcagctccaccaaagaaaccgcctcgccctggagctcccggtcatctgggaagccttgccagcctcagcagccctgctgacagctacaacgagggtgtcaagcttcagccccaggaaatcagcccccctcctactgccaacctggaccggtcgaatgataaggtgtacgagaatgtgacgggcctggtgaaagctgtcatcgagatgtccagtaaaatccagccagccccaccagaggagtatgtccctatggtgaaggaagtcggcttggccctgaggacattattggccactgtggatgagaccattcccctcctaccagccagcacccaccgagagattgagatggcacagaagctattgaactctgacctgggtgagctcatcaacaagatgaaactggcccagcagtatgtcatgaccagcctccagcaagagtacaaaaagcaaatgctgactgctgctcacgccctggctgtggatgccaaaaacttactcgatgtcattgaccaagcaagactgaaaatgcttgggcagacgagaccacactgagcctcccctaggagcacgtcttgctaccctcttttgaagatgttctctagccttccaccagcagcgaggaattaaccctgtgtcctcagtcgccagcacttacagctccaacttttttgaatgaccatctggttgaaaaatctttctcatataagtttaaccacactttgatttgggttcattttttgttttgtttttttcaatcatgatattcagaaaaatccaggatccaaaatgtggcgtttttctaagaatgaaaattatatgtaagcttttaagcatcatgaagaacaatttatgttcacattaagatacgttctaaagggggatggccaaggggtgacatcttaattcctaaactaccttagctgcatagtggaagaggagagcatgaagcaaagaattccaggaaacccaagaggctgagaattcttttgtctaccatagaattattatccagactggaatttttgtttgttagaacacccttcagttgcaatatgctaatcccactttacaaagaatatgtcttacctgccttttactttcgtgtggatatgtgaagcattgggtcgggaactagctgtagaacacaactaaaaactcatgtcttttttcacagaataatgtgccagttttttgtagcaatgttatttctcttggaagcagaaatgctttgtaccagagcacctccaaactgcattgaggagaagttccagaaccatcccctttttccatttttatataatttataaagaaagattaaagccatgttgactattttacagccactggagttaactaacccttccttgtatctgtcttcccaggagagaatgaagcaaaacaggaatttggttttcttttgatgtccagttacaccatccattctgttaattttgaaaaaatataccctccctttagtttgttgggggatataaattattctcaggaagaatataatgaactgtacagttactttgacctattaaaaaggtgttaccagtaaa

SEQ ID NO: 59065 - DNA, 2300 bp, Homo sapiens
ccatctactgttagccacctggtgtccttagattaactcagggtggggtctagtgtgtgctactctggggttgtcagctcccctaagacaatgtgttgtctctctagcacaatcctggaggaagagaaggctcagcaagaagagcgcatgaggatggagtccagaagacaggccacagtgtcctgggactccggagggtctgatgaagcaccgcccaagcccagcagaccgggttatcccagtccgaggtccagcgaaggattttatcccagcccacagcacatggtacaaaccaatcattaccaggtttctggctaccctggttcacatggaatcacagccatggctggcagcatctatccaggtcaggcatctcttttggaccaaacagattcatggaatcatagacctcaggagatagcaatgtggcagcccaatgtggaggactctacagtattggacctgcgagggattgggcaagtgttgccaacccatctgatggaagagcgtctaatccgacagcaacaggaaatggaagaagatcagcgctggctggaaaaagaggaaagatttctgaaacctgatgtgagactctctcgaggcagtattgacagggaggatggaagtcttcagggtccgattggaaaccaacatatatatcagcctgtgggtaaaccagatcctgcagctccaccaaagaaaccgcctcgccctggagctcccggtcatctgggaagccttgccagcctcagcagccctgctgacagctacaacgagggtgtcaagcttcagccccaggaaatcagcccccctcctactgccaacctggaccggtcgaatgataaggtgtacgagaatgtgacgggcctggtgaaagctgtcatcgagatgtccagtaaaatccagccagccccaccagaggagtatgtccctatggtgaaggaagtcggcttggccctgaggacattattggccactgtggatgagaccattcccctcctaccagccagcacccaccgagagattgagatggcacagaagctattgaactctgacctgggtgagctcatcaacaagatgaaactggcccagcagtatgtcatgaccagcctccagcaagagtacaaaaagcaaatgctgactgctgctcacgccctggctgtggatgccaaaaacttactcgatgtcattgaccaagcaagactgaaaatgcttgggcagacgagaccacactgagcctcccctaggagcacgtcttgctaccctcttttgaagatgttctctagccttccaccagcagcgaggaattaaccctgtgtcctcagtcgccagcacttacagctccaacttttttgaatgaccatctggttgaaaaatctttctcatataagtttaaccacactttgatttgggttcattttttgttttgtttttttcaatcatgatattcagaaaaatccaggatccaaaatgtggcgtttttctaagaatgaaaattatatgtaagcttttaagcatcatgaagaacaatttatgttcacattaagatacgttctaaagggggatggccaaggggtgacatcttaattcctaaactaccttagctgcatagtggaagaggagagcatgaagcaaagaattccaggaaacccaagaggctgagaattcttttgtctaccatagaattattatccagactggaatttttgtttgttagaacacccttcagttgcaatatgctaatcccactttacaaagaatataaaagctatattttgaagacttgagttatttcagaaaaaactacagccctttttgtcttacctgccttttactttcgtgtggatatgtgaagcattgggtcgggaactagctgtagaacacaactaaaaactcatgtcttttttcacagaataatgtgccagttttttgtagcaatgttatttctcttggaagcagaaatgctttgtaccagagcacctccaaactgcattgaggagaagttccagaaccatcccctttttccatttttatataatttataaagaaagattaaagccatgttgactattttacagccactggagttaactaacccttccttgtatctgtcttcccaggagagaatgaagcaaaacaggaatttggttttcttttgatgtccagttacaccatccattctgttaattttgaaaaaatataccctccctttagtttgttgggggatataaattattctcaggaagaatataatgaactgtacagttactttgacctattaaaaaggtgttaccagtaaa

SEQ ID NO: 59066 - DNA, 2477 bp, Homo sapiens
ccaccccagcctcccaaagtgctgggattacaggcatgagctaccatgccctgcccaagatatactcttaagttttcttctaagaatcttagtttttaacttttacatttagacctgtacctgtaattcattttgagttaatttttgtgcatgtgggaggaagaggtcagacttcagtttttcacatgtagctatccagttgccacagcatcatttgttgaaaagactgttctttccctattgaaatgtcttagcatctttttatcattcttttcaagtaagctctattaggaaaatgtctttttcgattcataaagtacaggtttgtcaaaatcaaaaggttcattcatatgatgctctcttgattttacagcccagcagaccgggttatcccagtccgaggtccagcgaaggattttatcccagcccacagcacatggtaatgattggttgtaccatgtgctgtgggctgggataaaccaagtttctggctaccctggttcacatggaatcacagccatggctggcagcatctatccaggtcaggcatctcttttggaccaaacagattcatggaatcatagacctcaggagatagcaatgtggcagcccaatgtggaggactctacagtattggacctgcgagggattgggcaagtgttgccaacccatctgatggaagagcgtctaatccgacagcaacaggaaatggaagaagatcagcgctggctggaaaaagaggaaagatttctgaaacctgatgtgagactctctcgaggcagtattgacagggaggatggaagtcttcagggtccgattggaaaccaacatatatatcagcctgtgggtaaaccagatcctgcagctccaccaaagaaaccgcctcgccctggagctcccggtcatctgggaagccttgccagcctcagcagccctgctgacagctacaacgagggtgtcaagcttcagccccaggaaatcagcccccctcctactgccaacctggaccggtcgaatgataaggtgtacgagaatgtgacgggcctggtgaaagctgtcatcgagatgtccagtaaaatccagccagccccaccagaggagtatgtccctatggtgaaggaagtcggcttggccctgaggacattattggccactgtggatgagaccattcccctcctaccagccagcacccaccgagagattgagatggcacagaagctattgaactctgacctgggtgagctcatcaacaagatgaaactggcccagcagtatgtcatgaccagcctccagcaagagtacaaaaagcaaatgctgactgctgctcacgccctggctgtggatgccaaaaacttactcgatgtcattgaccaagcaagactgaaaatgcttgggcagacgagaccacactgagcctcccctaggagcacgtcttgctaccctcttttgaagatgttctctagccttccaccagcagcgaggaattaaccctgtgtcctcagtcgccagcacttacagctccaacttttttgaatgaccatctggttgaaaaatctttctcatataagtttaaccacactttgatttgggttcattttttgttttgtttttttcaatcatgatattcagaaaaatccaggatccaaaatgtggcgtttttctaagaatgaaaattatatgtaagcttttaagcatcatgaagaacaatttatgttcacattaagatacgttctaaagggggatggccaaggggtgacatcttaattcctaaactaccttagctgcatagtggaagaggagagcatgaagcaaagaattccaggaaacccaagaggctgagaattcttttgtctaccatagaattattatccagactggaatttttgtttgttagaacacccttcagttgcaatatgctaatcccactttacaaagaatataaaagctatattttgaagacttgagttatttcagaaaaaactacagccctttttgtcttacctgccttttactttcgtgtggatatgtgaagcattgggtcgggaactagctgtagaacacaactaaaaactcatgtcttttttcacagaataatgtgccagttttttgtagcaatgttatttctcttggaagcagaaatgctttgtaccagagcacctccaaactgcattgaggagaagttccagaaccatcccctttttccatttttatataatttataaagaaagattaaagccatgttgactattttacagccactggagttaactaacccttccttgtatctgtcttcccaggagagaatgaagcaaaacaggaatttggttttcttttgatgtccagttacaccatccattctgttaattttgaaaaaatataccctccctttagtttgttgggggatataaattattctcaggaagaatataatgaactgtacagttactttgacctattaaaaaggtgttaccagtaaa

SEQ ID NO: 59067 - DNA, 1774 bp, Homo sapiens
  misc_feature (20)..(20): n is a, c, g, or t
cccgttcactttctacgcancgctggctggaaaaagaggaaagatttctgaaacctgatgtgagactctctcgaggcagtattgacagggaggatggaagtcttcagggtccgattggaaaccaacatatatatcagcctgtgggtaaaccagatcctgcagctccaccaaagaaaccgcctcgccctggagctcccggtcatctgggaagccttgccagcctcagcagccctgctgacagctacaacgagggtgtcaagcttcagccccaggaaatcagcccccctcctactgccaacctggaccggtcgaatgataaggtgtacgagaatgtgacgggcctggtgaaagctgtcatcgagatgtccagtaaaatccagccagccccaccagaggagtatgtccctatggtgaaggaagtcggcttggccctgaggacattattggccactgtggatgagaccattcccctcctaccagccagcacccaccgagagattgagatggcacagaagctattgaactctgacctgggtgagctcatcaacaagatgaaactggcccagcagtatgtcatgaccagcctccagcaagagtacaaaaagcaaatgctgactgctgctcacgccctggctgtggatgccaaaaacttactcgatgtcattgaccaagcaagactgaaaatgcttgggcagacgagaccacactgagcctcccctaggagcacgtcttgctaccctcttttgaagatgttctctagccttccaccagcagcgaggaattaaccctgtgtcctcagtcgccagcacttacagctccaacttttttgaatgaccatctggttgaaaaatctttctcatataagtttaaccacactttgatttgggttcattttttgttttgtttttttcaatcatgatattcagaaaaatccaggatccaaaatgtggcgtttttctaagaatgaaaattatatgtaagcttttaagcatcatgaagaacaatttatgttcacattaagatacgttctaaagggggatggccaaggggtgacatcttaattcctaaactaccttagctgcatagtggaagaggagagcatgaagcaaagaattccaggaaacccaagaggctgagaattcttttgtctaccatagaattattatccagactggaatttttgtttgttagaacacccttcagttgcaatatgctaatcccactttacaaagaatataaaagctatattttgaagacttgagttatttcagaaaaaactacagccctttttgtcttacctgccttttactttcgtgtggatatgtgaagcattgggtcgggaactagctgtagaacacaactaaaaactcatgtcttttttcacagaataatgtgccagttttttgtagcaatgttatttctcttggaagcagaaatgctttgtaccagagcacctccaaactgcattgaggagaagttccagaaccatcccctttttccatttttatataatttataaagaaagattaaagccatgttgactattttacagccactggagttaactaacccttccttgtatctgtcttcccaggagagaatgaagcaaaacaggaatttggttttcttttgatgtccagttacaccatccattctgttaattttgaaaaaatataccctccctttagtttgttgggggatataaattattctcaggaagaatataatgaactgtacagttactttgacctattaaaaaggtgttaccagtaaa

SEQ ID NO: 59068 - DNA, 2181 bp, Homo sapiens
agcgtaggcccaggtgctttccagcagtcagcacagagctggctgaaaaccggggtccttgagccagagaggctccctagcgacacccactgctgcctttgacttcagtcacgacctgcaaacagatggctatccccttaaagtgcattcatatgtcagctttttataattgtacaaagaacatgtttccattaggcggctgagggcagctaagctgagccataccgttttcactgcagaattcaaactaagtggaaatccttatagtcttcatgtagaatgtttgactctttagccaaataggtaattttgtctaaaattcagtaaattcccagatggattattatcttgtggtaaatgattttggggtgaggggacattgaatcaggtctctgaaagaatctggggtttttagtataatatgtatgattccatctcatttcctttaactgagctcaaagttagaaagaaaatactgcctaatttgtcacttggaggaattactttactgtcattctcaatctgaactatatcccgcacacacaagaaaatcaatgaccttctgcaatctgctttgatctcttgtaaagaccctctctagcttgattgtggtgatctcacgccatctgctggagagcagaaaaatgactggcttctgtgttgtcagcttcagccccaggaaatcagcccccctcctactgccaacctggaccggtcgaatgataaggtgtacgagaatgtgacgggcctggtgaaagctgtcatcgagatgtccagtaaaatccagccagccccaccagaggagtatgtccctatggtgaaggaagtcggcttggccctgaggacattattggccactgtggatgagaccattcccctcctaccagccagcacccaccgagagattgagatggcacagaagctattgaactctgacctgggtgagctcatcaacaagatgaaactggcccagcagtatgtcatgaccagcctccagcaagagtacaaaaagcaaatgctgactgctgctcacgccctggctgtggatgccaaaaacttactcgatgtcattgaccaagcaagactgaaaatgcttgggcagacgagaccacactgagcctcccctaggagcacgtcttgctaccctcttttgaagatgttctctagccttccaccagcagcgaggaattaaccctgtgtcctcagtcgccagcacttacagctccaacttttttgaatgaccatctggttgaaaaatctttctcatataagtttaaccacactttgatttgggttcattttttgttttgtttttttcaatcatgatattcagaaaaatccaggatccaaaatgtggcgtttttctaagaatgaaaattatatgtaagcttttaagcatcatgaagaacaatttatgttcacattaagatacgttctaaagggggatggccaaggggtgacatcttaattcctaaactaccttagctgcatagtggaagaggagagcatgaagcaaagaattccaggaaacccaagaggctgagaattcttttgtctaccatagaattattatccagactggaatttttgtttgttagaacacccttcagttgcaatatgctaatcccactttacaaagaatataaaagctatattttgaagacttgagttatttcagaaaaaactacagccctttttgtcttacctgccttttactttcgtgtggatatgtgaagcattgggtcgggaactagctgtagaacacaactaaaaactcatgtcttttttcacagaataatgtgccagttttttgtagcaatgttatttctcttggaagcagaaatgctttgtaccagagcacctccaaactgcattgaggagaagttccagaaccatcccctttttccatttttatataatttataaagaaagattaaagccatgttgactattttacagccactggagttaactaacccttccttgtatctgtcttcccaggagagaatgaagcaaaacaggaatttggttttcttttgatgtccagttacaccatccattctgttaattttgaaaaaatataccctccctttagtttgttgggggatataaattattctcaggaagaatataatgaactgtacagttactttgacctattaaaaaggtgttaccagtaaa

SEQ ID NO: 59069 - DNA, 4367 bp, Homo sapiens
agcacggcctcgagggcgcgacgcgccgccgccgccgccgccggtcccggaccactgtgagcccgcggcgtgaggcgtgggaggaagcgcggctgctgtcgcccagcgccgccccgtcgtcgtctgccttcgcttcacggcgccgagccgcggtccgaaatatgacagatacctagcatctagcaaaataatggcagctgcttaccttgaccccaacttgaatcacacaccaaattcgagtactaagactcacctgggtactggtatggaacgttctcctggtgcaatggagcgagtattaaaggtctttcattattttgaaagcaatagtgagccaaccacctgggccagtattatcaggcatggagatgctactgatgtcaggggcatcattcagaagatagtggacagtcacaaagtaaagcatgtggcctgctatggattccgcctcagtcacctgcggtcagaggaggttcactggcttcacgtggatatgggcgtctccagtgtgagggagaagtatgagcttgctcacccaccagaggagtggaaatatgaattgagaattcgttatttgccaaaaggatttctaaaccagtttactgaagataagccaactttgaatttcttctatcaacaggtgaagagcgattatatgttagagatagctgatcaagtggaccaggaaattgctttgaagttgggttgtctagaaatacggcgatcatactgggagatgcggggcaatgcactagaaaagaagtctaactatgaagtattagaaaaagatgttggtttaaagcgattttttcctaagagtttactggattctgtcaaggccaaaacactaagaaaactgatccaacaaacatttagacaatttgccaaccttaatagagaagaaagtattctgaaattctttgagatcctgtctccagtctacagatttgataaggaatgcttcaagtgtgctcttggttcaagctggattatttcagtggaactggcaatcggcccagaagaaggaatcagttacctaacggacaagggctgcaatcccacacatcttgctgacttcactcaagtgcaaaccattcagtattcaaacagtgaagacaaggacagaaaaggaatgctacaactaaaaatagcaggtgcacccgagcctctgacagtgacggcaccatccctaaccattgcggagaatatggctgacctaatagatgggtactgccggctggtgaatggaacctcgcagtcatttatcatcagacctcagaaagaaggtgaacgggctttgccatcaataccaaagttggccaacagcgaaaagcaaggcatgcggacacacgccgtctctgtgtcagaaacagatgattatgctgagattatagatgaagaagatacttacaccatgccctcaaccagggattatgagattcaaagagaaagaatagaacttggacgatgtattggagaaggccaatttggagatgtacatcaaggcatttatatgagtccagagaatccagctttggcggttgcaattaaaacatgtaaaaactgtacttcggacagcgtgagagagaaatttcttcaagaagccttaacaatgcgtcagtttgaccatcctcatattgtgaagctgattggagtcatcacagagaatcctgtctggataatcatggagctgtgcacacttggagagctgaggtcatttttgcaagtaaggaaatacagtttggatctagcatctttgatcctgtatgcctatcagcttagtacagctcttgcatatctagagagcaaaagatttgtacacagggacattgctgctcggaatgttctggtgtcctcaaatgattgtgtaaaattaggagactttggattatcccgatatatggaagatagtacttactacaaagcttccaaaggaaaattgcctattaaatggatggctccagagtcaatcaattttcgacgttttacctcagctagtgacgtatggatgtttggtgtgtgtatgtgggagatactgatgcatggtgtgaagccttttcaaggagtgaagaacaatgatgtaatcggtcgaattgaaaatggggaaagattaccaatgcctccaaattgtcctcctaccctctacagccttatgacgaaatgctgggcctatgaccccagcaggcggcccaggtttactgaacttaaagctcagctcagcacaatcctggaggaagagaaggctcagcaagaagagcgcatgaggatggagtccagaagacaggccacagtgtcctgggactccggagggtctgatgaagcaccgcccaagcccagcagaccgggttatcccagtccgaggtccagcgaaggattttatcccagcccacagcacatggtacaaaccaatcattaccaggtttctggctaccctggttcacatggaatcacagccatggctggcagcatctatccaggtcaggcatctcttttggaccaaacagattcatggaatcatagacctcaggagatagcaatgtggcagcccaatgtggaggactctacagtattggacctgcgagggattgggcaagtgttgccaacccatctgatggaagagcgtctaatccgacagcaacaggaaatggaagaagatcagcgctggctggaaaaagaggaaagatttctgaaacctgatgtgagactctctcgaggcagtattgacagggaggatggaagtcttcagggtccgattggaaaccaacatatatatcagcctgtgggtaaaccagatcctgcagctccaccaaagaaaccgcctcgccctggagctcccggtcatctgggaagccttgccagcctcagcagccctgctgacagctacaacgagggtgtcaagcttcagccccaggaaatcagcccccctcctactgccaacctggaccggtcgaatgataaggtgtacgagaatgtgacgggcctggtgaaagctgtcatcgagatgtccagtaaaatccagccagccccaccagaggagtatgtccctatggtgaaggaagtcggcttggccctgaggacattattggccactgtggatgagaccattcccctcctaccagccagcacccaccgagagattgagatggcacagaagctattgaactctgacctgggtgagctcatcaacaagatgaaactggcccagcagtatgtcatgaccagcctccagcaagagtacaaaaagcaaatgctgactgctgctcacgccctggctgtggatgccaaaaacttactcgatgtcattgaccaagcaagactgaaaatgcttgggcagacgagaccacactgagcctcccctaggagcacgtcttgctaccctcttttgaagatgttctctagccttccaccagcagcgaggaattaaccctgtgtcctcagtcgccagcacttacagctccaacttttttgaatgaccatctggttgaaaaatctttctcatataagtttaaccacactttgatttgggttcattttttgttttgtttttttcaatcatgatattcagaaaaatccaggatccaaaatgtggcgtttttctaagaatgaacattaagatacgttctaaagggggatggccaaggggtgacatcttaattcctaaactaccttagctgcatagtggaagaggagagcatgaagcaaagaattccaggaaacccaagaggctgagaattcttttgtctaccatagaattattatccagactggaatttttgtttgttagaacacccttcagttgcaatatgctaatcccactttacaaagaatataaaagctatattttgaagacttgagttatttcagaaaaaactacagccctttttgtcttacctgccttttactttcgtgtggatatgtgaagcattgggtcgggaactagctgtagaacacaactaaaaactcatgtcttttttcacagaataatgtgccagttttttgtagcaatgttatttctcttggaagcagaaatgctttgtaccagagcacctccaaactgcattgaggagaagttccagaaccatcccctttttccatttttatataatttataaagaaagattaaagccatgttgactattttacagccactggagttaactaacccttccttgtatctgtcttcccaggagagaatgaagcaaaacaggaatttggttttcttttgatgtccagttacaccatccattctgttaattttgaaaaaatataccctccctttagtttgttgggggatataaattattctcaggaagaatataatgaactgtacagttactttgacctattaaaaaggtgttaccagtaaa

SEQ ID NO: 59070 - DNA, 2114 bp, Homo sapiens
ttgagctcaagccgtcagcctgcctccgccgcccaaagtgctgaaattgtacaggagtgagccactgcgccctgccaccatccttaaaccattttttgtatagccgaggaaggtcttgaaatagagttggcatagtagaaagcataagaccagaagtcagaactgaggcttttgtcctggcttggagattaaagagctgtgtggccttcagcacatcttactgtatctcagttgtccactctaatgtgaaagtgtttggaatagatgatctctgaagttctgtcagattctgtggttctattatgaaacaaaagccctgccagtcactgagattaataaagtctaaacagcgcaaatggagacgaagttagtcatggtgtcagggaaggctttgaatggaaggaacaagatgctggatctgcatgtgtgaatcggcatgcacaaacaggcacactataatagctgaatttctaaagtaagtaaaaaaaatgtttaaatgcatgaatgtagtgtgggaagttaaaataagaaaaaaaaaatttaaagattgatttttacatcctattgctcctaaggaagatttatttacaggaaataaagttttcttctcatggaggcactgaaagaaaggctcataaaaattccctgaaaagttcattggtgcagggcttggtggcatgtgcctgtgttcccagctagtgggaaggctgaggcaggaagattccttgagcccaggagtttgaggcaagcttggacaacacagtaagaacatctctctaaaaaagaaaaaaaaaaatcactgaaaacagttctcctgacctatctcttgtctttcagattgagatggcacagaagctattgaactctgacctgggtgagctcatcaacaagatgaaactggcccagcagtatgtcatgaccagcctccagcaagagtacaaaaagcaaatgctgactgctgctcacgccctggctgtggatgccaaaaacttactcgatgtcattgaccaagcaagactgaaaatgcttgggcagacgagaccacactgagcctcccctaggagcacgtcttgctaccctcttttgaagatgttctctagccttccaccagcagcgaggaattaaccctgtgtcctcagtcgccagcacttacagctccaacttttttgaatgaccatctggttgaaaaatctttctcatataagtttaaccacactttgatttgggttcattttttgttttgtttttttcaatcatgatattcagaaaaatccaggatccaaaatgtggcgtttttctaagaatgaaaattatatgtaagcttttaagcatcatgaagaacaatttatgttcacattaagatacgttctaaagggggatggccaaggggtgacatcttaattcctaaactaccttagctgcatagtggaagaggagagcatgaagcaaagaattccaggaaacccaagaggctgagaattcttttgtctaccatagaattattatccagactggaatttttgtttgttagaacacccttcagttgcaatatgctaatcccactttacaaagaatataaaagctatattttgaagacttgagttatttcagaaaaaactacagccctttttgtcttacctgccttttactttcgtgtggatatgtgaagcattgggtcgggaactagctgtagaacacaactaaaaactcatgtcttttttcacagaataatgtgccagttttttgtagcaatgttatttctcttggaagcagaaatgctttgtaccagagcacctccaaactgcattgaggagaagttccagaaccatcccctttttccatttttatataatttataaagaaagattaaagccatgttgactattttacagccactggagttaactaacccttccttgtatctgtcttcccaggagagaatgaagcaaaacaggaatttggttttcttttgatgtccagttacaccatccattctgttaattttgaaaaaatataccctccctttagtttgttgggggatataaattattctcaggaagaatataatgaactgtacagttactttgacctattaaaaaggtgttaccagtaaa

SEQ ID NO: 59071 - DNA, 3680 bp, Homo sapiens
agcacggcctcgagggcgcgacgcgccgccgccgccgccgccggtcccggaccactgtgagcccgcggcgtgaggcgtgggaggaagcgcggctgctgtcgcccagcgccgccccgtcgtcgtctgccttcgcttcacggcgccgagccgcggtccgaaatatgacagatacctagcatctagcaaaataatggcagctgcttaccttgaccccaacttgaatcacacaccaaattcgagtactaagactcacctgggtactggtatggaacgttctcctggtgcaatggagcgagtattaaaggtctttcattattttgaaagcaatagtgagccaaccacctgggccagtattatcaggcatggagatgctactgatgtcaggggcatcattcagaagatagtggacagtcacaaagtaaagcatgtggcctgctatggattccgcctcagtcacctgcggtcagaggaggttcactggcttcacgtggatatgggcgtctccagtgtgagggagaagtatgagcttgctcacccaccagaggagtggaaatatgaattgagaattcgttatttgccaaaaggatttctaaaccagtttactgaagataagccaactttgaatttcttctatcaacaggtgaagagcgattatatgttagagatagctgatcaagtggaccaggaaattgctttgaagttgggttgtctagaaatacggcgatcatactgggagatgcggggcaatgcactagaaaagaagtctaactatgaagtattagaaaaagatgttggtttaaagcgattttttcctaagagtttactggattctgtcaaggccaaaacactaagaaaactgatccaacaaacatttagacaatttgccaaccttaatagagaagaaagtattctgaaattctttgagatcctgtctccagtctacagatttgataaggaatgcttcaagtgtgctcttggttcaagctggattatttcagtggaactggcaatcggcccagaagaaggaatcagttacctaacggacaagggctgcaatcccacacatcttgctgacttcactcaagtgcaaaccattcagtattcaaacagtgaagacaaggacagaaaaggaatgctacaactaaaaatagcaggtgcacccgagcctctgacagtgacggcaccatccctaaccattgcggagaatatggctgacctaatagatgggtactgccggctggtgaatggaacctcgcagtcatttatcatcagacctcagaaagaaggtgaacgggctttgccatcaataccaaagttggccaacagcgaaaagcaaggcatgcggacacacgccgtctctgtgtcagaaacagatgattatgctgagattatagatgaagaagatacttacaccatgccctcaaccagggattatgagattcaaagagaaagaatagaacttggacgatgtattggagaaggccaatttggagatgtacatcaaggcatttatatgagtccagagaatccagctttggcggttgcaattaaaacatgtaaaaactgtacttcggacagcgtgagagagaaatttcttcaagaagccttaacaatgcgtcagtttgaccatcctcatattgtgaagctgattggagtcatcacagagaatcctgtctggataatcatggagctgtgcacacttggagagctgaggtcatttttgcaagtaaggaaatacagtttggatctagcatctttgatcctgtatgcctatcagcttagtacagctcttgcatatctagagagcaaaagatttgtacacagggacattgctgctcggaatgttctggtgtcctcaaatgattgtgtaaaattaggagactttggattatcccgatatatggaagatagtacttactacaaagcttccaaaggaaaattgcctattaaatggatggctccagagtcaatcaattttcgacgttttacctcagctagtgacgtatggatgtttggtgtgtgtatgtgggagatactgatgcatggtgtgaagccttttcaaggagtgaagaacaatgatgtaatcggtcgaattgaaaatggggaaagattaccaatgcctccaaattgtcctcctaccctctacagccttatgacgaaatgctgggcctatgaccccagcaggcggcccaggtttactgaacttaaagctcagctcagcacaatcctggaggaagagaaggctcagcaagaagagcgcatgaggatggagtccagaagacaggccacagtgtcctgggactccggagggtctgatgaagcaccgcccaagcccagcagaccgggttatcccagtccgaggtccagcgaaggattttatcccagcccacagcacatggtacaaaccaatcattaccaggtttctggctaccctggttcacatggaatcacagccatggctggcagcatctatccaggtcaggcatctcttttggaccaaacagattcatggaatcatagacctcaggagatagcaatgtggcagcccaatgtggaggactctacagtattggacctgcgagggattgggcaagtgttgccaacccatctgatggaagagcgtctaatccgacagcaacaggaaatggaagaagatcagcgctggctggaaaaagaggaaagatttctgaaacctgatgtgagactctctcgaggcagtattgacagggaggatggaagtcttcagggtccgattggaaaccaacatatatatcagcctgtgggtaaaccagatcctgcagctccaccaaagaaaccgcctcgccctggagctcccggtcatctgggaagccttgccagcctcagcagccctgctgacagctacaacgagggtgtcaagcttcagccccaggaaatcagcccccctcctactgccaacctggaccggtcgaatgataaggtgtacgagaatgtgacgggcctggtgaaagctgtcatcgagatgtccagtaaaatccagccagccccaccagaggagtatgtccctatggtgaaggaagtcggcttggccctgaggacattattggccactgtggatgagaccattcccctcctaccagccagcacccaccgagagattgagatggcacagaagctattgaactctgacctgggtgagctcatcaacaagatgaaactggcccagcagtatgtcatgaccagcctccagcaagagtacaaaaagcaaatgctgactgctgctcacgccctggctgtggatgccaaaaacttactcgatgtcattgaccaagcaagactgaaaatgcttgggcagacgagaccacactgagcctcccctaggagcacgtcttgctaccctcttttgaagatgttctctagccttccaccagcagcgaggaattaaccctgtgtcctcagtcgccagcacttacagctccaacttttttgaatgaccatctggttgaaaaatctttctcatataagtttaaccacactttgatttgggttcattttttgttttgtttttttcaatcatgatattcagaaaaatccaggatccaaaatgtggcgtttttctaagaatgaaaattatatgtaagcttttaagcatcatgaagaacaatttatgttcgtcatcggggtcctctaggtcgccgcaa

SEQ ID NO: 59072 - DNA, 2726 bp, Homo sapiens
agcacggcctcgagggcgcgacgcgccgccgccgccgccgccggtcccggaccactgtgagcccgcggcgtgaggcgtgggaggaagcgcggctgctgtcgcccagcgccgccccgtcgtcgtctgccttcgcttcacggcgccgagccgcggtccgaaatatgacagatacctagcatctagcaaaataatggcagctgcttaccttgaccccaacttgaatcacacaccaaattcgagtactaagactcacctgggtactggtatggaacgttctcctggtgcaatggagcgagtattaaaggtctttcattattttgaaagcaatagtgagccaaccacctgggccagtattatcaggcatggagatgctactgatgtcaggggcatcattcagaagatagtggacagtcacaaagtaaagcatgtggcctgctatggattccgcctcagtcacctgcggtcagaggaggttcactggcttcacgtggatatgggcgtctccagtgtgagggagaagtatgagcttgctcacccaccagaggagtggaaatatgaattgagaattcgttatttgccaaaaggatttctaaaccagtttactgaagataagccaactttgaatttcttctatcaacaggtgaagagcgattatatgttagagatagctgatcaagtggaccaggaaattgctttgaagttgggttgtctagaaatacggcgatcatactgggagatgcggggcaatgcactagaaaagaagtctaactatgaagtattagaaaaagatgttggtttaaagcgattttttcctaagagtttactggattctgtcaaggccaaaacactaagaaaactgatccaacaaacatttagacaatttgccaaccttaatagagaagaaagtattctgaaattctttgagatcctgtctccagtctacagatttgataaggaatgcttcaagtgtgctcttggttcaagctggattatttcagtggaactggcaatcggcccagaagaaggaatcagttacctaacggacaagggctgcaatcccacacatcttgctgacttcactcaagtgcaaaccattcagtattcaaacagtgaagacaaggacagaaaaggaatgctacaactaaaaatagcaggtgcacccgagcctctgacagtgacggcaccatccctaaccattgcggagaatatggctgacctaatagatgggtactgccggctggtgaatggaacctcgcagtcatttatcatcagacctcagaaagaaggtgaacgggctttgccatcaataccaaagttggccaacagcgaaaagcaaggcatgcggacacacgccgtctctgtgtcagaaacagatgattatgctgagattatagatgaagaagatacttacaccatgccctcaaccagggattatgagattcaaagagaaagaatagaacttggacgatgtattggagaaggccaatttggagatgtacatcaaggcatttatatgagtccagagaatccagctttggcggttgcaattaaaacatgtaaaaactgtacttcggacagcgtgagagagaaatttcttcaagaagccttaacaatgcgtcagtttgaccatcctcatattgtgaagctgattggagtcatcacagagaatcctgtctggataatcatggagctgtgcacacttggagagctgaggtcatttttgcaagtaaggaaatacagtttggatctagcatctttgatcctgtatgcctatcagcttagtacagctcttgcatatctagagagcaaaagatttgtacacagggacattgctgctcggaatgttctggtgtcctcaaatgattgtgtaaaattaggagactttggattatcccgatatatggaagatagtacttactacaaagcttccaaaggaaaattgcctattaaatggatggctccagagtcaatcaattttcgacgttttacctcagctagtgacgtatggatgtttggtgtgtgtatgtgggagatactgatgcatggtgtgaagccttttcaaggagtgaagaacaatgatgtaatcggtcgaattgaaaatggggaaagattaccaatgcctccaaattgtcctcctaccctctacagccttatgacgaaatgctgggcctatgaccccagcaggcggcccaggtttactgaacttaaagctcagctcagcacaatcctggaggaagagaaggctcagcaagaagagcgcatgaggatggagtccagaagacaggccacagtgtcctgggactccggagggtctgatgaagcaccgcccaagcccagcagaccgggttatcccagtccgaggtccagcgaaggattttatcccagcccacagcacatggtacaaaccaatcattaccaggtttctggctaccctggttcacatggaatcacagccatggctggcagcatctatccaggtcaggcatctcttttggaccaaacagattcatggaatcatagacctcaggagatagcaatgtggcagcccaatgtggaggactctacagtattggacctgcgagggattgggcaagtgttgccaacccatctgatggaagagcgtctaatccgacagcaacaggaaatggaagaagatcagcgctggctggaaaaagaggaaagatttctggtaattgtgtttctgaaaggcttctttgactttttaa

SEQ ID NO: 59073 - DNA, 475 bp, Homo sapiens
aaaaggtaccctacctaaatggctgtgaagcattgggtcgggaactagctgtagaacacaactaaaaactcatgtcttttttcacagaataatgtgccagttttttgtagcaatgttatttctcttggaagcagaaatgctttgtaccagagcacctccaaactgcattgaggagaagttccagaaccatcccctttttccatttttatataatttataaagaaagattaaagccatgttgactattttacagccactggagttaactaacccttccttgtatctgtcttcccaggagagaatgaagcaaaacaggaatttggttttcttttgatgtccagttacaccatccattctgttaattttgaaaaaatataccctccctttagtttgttgggggatataaattattctcaggaagaatataatgaactgtacagttactttgacctattaaaaaggtgttaccagtaaa

SEQ ID NO: 59074 - DNA, 768 bp, Homo sapiens
ggccttttaataatttttttttaacaaatatttattctgtaaatcaggtcctactctgggtatggggagagacagctattattttagtggattaggtctctattctcctcagactccttccgcatataacatatcaagagagagtataggacatttgatataaacaacatatcacattgtaattggtagatttcaagtattatacacaaaaaattattttgttcttttaacagaatatgacagatacctagcatctagcaaaataatggcagctgcttaccttgaccccaacttgaatcacacaccaaattcgagtactaagactcacctgggtactggtatggaacgttctcctggtgcaatggagcgagtattaaaggtctttcattattttgaaagcaatagtgagccaaccacctgggccagtattatcaggcatggagatgctactgatgtcagggtaagtacgtttttccatgagacatctttaatgtttatttaggttaaaatgtaatggcatgtatgaaaaaagatagtgtaataatttttatttaacttatcggggacttttcatattacagaaatgctatttttaattataagatttattagttaatatgtgactgaccagcgttctaattgttgtaaagtttcttagaaaaataatgactggatcatattttagtcataaaataccattgacttatttttcccttctaggttttttttttttttaactcttggatgagtactaggcaacaatgcaac

SEQ ID NO: 59075 - DNA, 4413 bp, Homo sapiens
agcacggcctcgagggcgcgacgcgccgccgccgccgccgccggtcccggaccactgtgagcccgcggcgtgaggcgtgggaggaagcgcggctgctgtcgcccagcgccgccccgtcgtcgtctgccttcgcttcacggcgccgagccgcggtccgaaatatgacagatacctagcatctagcaaaataatggcagctgcttaccttgaccccaacttgaatcacacaccaaattcgagtactaagactcacctgggtactggtatggaacgttctcctggtgcaatggagcgagtattaaaggtctttcattattttgaaagcaatagtgagccaaccacctgggccagtattatcaggcatggagatgctactgatgtcaggggcatcattcagaagatagtggacagtcacaaagtaaagcatgtggcctgctatggattccgcctcagtcacctgcggtcagaggaggttcactggcttcacgtggatatgggcgtctccagtgtgagggagaagtatgagcttgctcacccaccagaggagtggaaatatgaattgagaattcgttatttgccaaaaggatttctaaaccagtttactgaagataagccaactttgaatttcttctatcaacaggtgaagagcgattatatgttagagatagctgatcaagtggaccaggaaattgctttgaagttgggttgtctagaaatacggcgatcatactgggagatgcggggcaatgcactagaaaagaagtctaactatgaagtattagaaaaagatgttggtttaaagcgattttttcctaagagtttactggattctgtcaaggccaaaacactaagaaaactgatccaacaaacatttagacaatttgccaaccttaatagagaagaaagtattctgaaattctttgagatcctgtctccagtctacagatttgataaggaatgcttcaagtgtgctcttggttcaagctggattatttcagtggaactggcaatcggcccagaagaaggaatcagttacctaacggacaagggctgcaatcccacacatcttgctgacttcactcaagtgcaaaccattcagtattcaaacagtgaagacaaggacagaaaaggaatgctacaactaaaaatagcaggtgcacccgagcctctgacagtgacggcaccatccctaaccattgcggagaatatggctgacctaatagatgggtactgccggctggtgaatggaacctcgcagtcatttatcatcagacctcagaaagaaggtgaacgggctttgccatcaataccaaagttggccaacagcgaaaagcaaggcatgcggacacacgccgtctctgtgtcagaaacagatgattatgctgagattatagatgaagaagatacttacaccatgccctcaaccagggattatgagattcaaagagaaagaatagaacttggacgatgtattggagaaggccaatttggagatgtacatcaaggcatttatatgagtccagagaatccagctttggcggttgcaattaaaacatgtaaaaactgtacttcggacagcgtgagagagaaatttcttcaagaagccttaacaatgcgtcagtttgaccatcctcatattgtgaagctgattggagtcatcacagagaatcctgtctggataatcatggagctgtgcacacttggagagctgaggtcatttttgcaagtaaggaaatacagtttggatctagcatctttgatcctgtatgcctatcagcttagtacagctcttgcatatctagagagcaaaagatttgtacacagggacattgctgctcggaatgttctggtgtcctcaaatgattgtgtaaaattaggagactttggattatcccgatatatggaagatagtacttactacaaagcttccaaaggaaaattgcctattaaatggatggctccagagtcaatcaattttcgacgttttacctcagctagtgacgtatggatgtttggtgtgtgtatgtgggagatactgatgcatggtgtgaagccttttcaaggagtgaagaacaatgatgtaatcggtcgaattgaaaatggggaaagattaccaatgcctccaaattgtcctcctaccctctacagccttatgacgaaatgctgggcctatgaccccagcaggcggcccaggtttactgaacttaaagctcagctcagcacaatcctggaggaagagaaggctcagcaagaagagcgcatgaggatggagtccagaagacaggccacagtgtcctgggactccggagggtctgatgaagcaccgcccaagcccagcagaccgggttatcccagtccgaggtccagcgaaggattttatcccagcccacagcacatggtacaaaccaatcattaccaggtttctggctaccctggttcacatggaatcacagccatggctggcagcatctatccaggtcaggcatctcttttggaccaaacagattcatggaatcatagacctcaggagatagcaatgtggcagcccaatgtggaggactctacagtattggacctgcgagggattgggcaagtgttgccaacccatctgatggaagagcgtctaatccgacagcaacaggaaatggaagaagatcagcgctggctggaaaaagaggaaagatttctgaaacctgatgtgagactctctcgaggcagtattgacagggaggatggaagtcttcagggtccgattggaaaccaacatatatatcagcctgtgggtaaaccagatcctgcagctccaccaaagaaaccgcctcgccctggagctcccggtcatctgggaagccttgccagcctcagcagccctgctgacagctacaacgagggtgtcaagcttcagccccaggaaatcagcccccctcctactgccaacctggaccggtcgaatgataaggtgtacgagaatgtgacgggcctggtgaaagctgtcatcgagatgtccagtaaaatccagccagccccaccagaggagtatgtccctatggtgaaggaagtcggcttggccctgaggacattattggccactgtggatgagaccattcccctcctaccagccagcacccaccgagagattgagatggcacagaagctattgaactctgacctgggtgagctcatcaacaagatgaaactggcccagcagtatgtcatgaccagcctccagcaagagtacaaaaagcaaatgctgactgctgctcacgccctggctgtggatgccaaaaacttactcgatgtcattgaccaagcaagactgaaaatgcttgggcagacgagaccacactgagcctcccctaggagcacgtcttgctaccctcttttgaagatgttctctagccttccaccagcagcgaggaattaaccctgtgtcctcagtcgccagcacttacagctccaacttttttgaatgaccatctggttgaaaaatctttctcatataagtttaaccacactttgatttgggttcattttttgttttgtttttttcaatcatgatattcagaaaaatccaggatccaaaatgtggcgtttttctaagaatgaaaattatatgtaagcttttaagcatcatgaagaacaatttatgttcacattaagatacgttctaaagggggatggccaaggggtgacatcttaattcctaaactaccttagctgcatagtggaagaggagagcatgaagcaaagaattccaggaaacccaagaggctgagaattcttttgtctaccatagaattattatccagactggaatttttgtttgttagaacacccttcagttgcaatatgctaatcccactttacaaagaatataaaagctatattttgaagacttgagttatttcagaaaaaactacagccctttttgtcttacctgccttttactttcgtgtggatatgtgaagcattgggtcgggaactagctgtagaacacaactaaaaactcatgtcttttttcacagaataatgtgccagttttttgtagcaatgttatttctcttggaagcagaaatgctttgtaccagagcacctccaaactgcattgaggagaagttccagaaccatcccctttttccatttttatataatttataaagaaagattaaagccatgttgactattttacagccactggagttaactaacccttccttgtatctgtcttcccaggagagaatgaagcaaaacaggaatttggttttcttttgatgtccagttacaccatccattctgttaattttgaaaaaatataccctccctttagtttgttgggggatataaattattctcaggaagaatataatgaactgtacagttactttgacctattaaaaaggtgttaccagtaaa

SEQ ID NO: 59076 - DNA, 4665 bp, Homo sapiens
agcacggcctcgagggcgcgacgcgccgccgccgccgccgccggtcccggaccactgtgagcccgcggcgtgaggcgtgggaggaagcgcggctgctgtcgcccagcgccgccccgtcgtcgtctgccttcgcttcacggcgccgagccgcggtccgagcagaactggggctcccttgcatcttccagttacaaattcagtgccttctgcagtttccccagagctcctcaagaataacggaagggagaatatgacagatacctagcatctagcaaaataatggcagctgcttaccttgaccccaacttgaatcacacaccaaattcgagtactaagactcacctgggtactggtatggaacgttctcctggtgcaatggagcgagtattaaaggtctttcattattttgaaagcaatagtgagccaaccacctgggccagtattatcaggcatggagatgctactgatgtcaggggcatcattcagaagatagtggacagtcacaaagtaaagcatgtggcctgctatggattccgcctcagtcacctgcggtcagaggaggttcactggcttcacgtggatatgggcgtctccagtgtgagggagaagtatgagcttgctcacccaccagaggagtggaaatatgaattgagaattcgttatttgccaaaaggatttctaaaccagtttactgaagataagccaactttgaatttcttctatcaacaggtgaagagcgattatatgttagagatagctgatcaagtggaccaggaaattgctttgaagttgggttgtctagaaatacggcgatcatactgggagatgcggggcaatgcactagaaaagaagtctaactatgaagtattagaaaaagatgttggtttaaagcgattttttcctaagagtttactggattctgtcaaggccaaaacactaagaaaactgatccaacaaacatttagacaatttgccaaccttaatagagaagaaagtattctgaaattctttgagatcctgtctccagtctacagatttgataaggaatgcttcaagtgtgctcttggttcaagctggattatttcagtggaactggcaatcggcccagaagaaggaatcagttacctaacggacaagggctgcaatcccacacatcttgctgacttcactcaagtgcaaaccattcagtattcaaacagtgaagacaaggacagaaaaggaatgctacaactaaaaatagcaggtgcacccgagcctctgacagtgacggcaccatccctaaccattgcggagaatatggctgacctaatagatgggtactgccggctggtgaatggaacctcgcagtcatttatcatcagacctcagaaagaaggtgaacgggctttgccatcaataccaaagttggccaacagcgaaaagcaaggcatgcggacacacgccgtctctgtgtcagaaacagatgattatgctgagattatagatgaagaagatacttacaccatgccctcaaccagggattatgagattcaaagagaaagaatagaacttggacgatgtattggagaaggccaatttggagatgtacatcaaggcatttatatgagtccagagaatccagctttggcggttgcaattaaaacatgtaaaaactgtacttcggacagcgtgagagagaaatttcttcaagaagccttaacaatgcgtcagtttgaccatcctcatattgtgaagctgattggagtcatcacagagaatcctgtctggataatcatggagctgtgcacacttggagagctgaggtcatttttgcaagtaaggaaatacagtttggatctagcatctttgatcctgtatgcctatcagcttagtacagctcttgcatatctagagagcaaaagatttgtacacagggacattgctgctcggaatgttctggtgtcctcaaatgattgtgtaaaattaggagactttggattatcccgatatatggaagatagtacttactacaaagcttccaaaggaaaattgcctattaaatggatggctccagagtcaatcaattttcgacgttttacctcagctagtgacgtatggatgtttggtgtgtgtatgtgggagatactgatgcatggtgtgaagccttttcaaggagtgaagaacaatgatgtaatcggtcgaattgaaaatggggaaagattaccaatgcctccaaattgtcctcctaccctctacagccttatgacgaaatgctgggcctatgaccccagcaggcggcccaggtttactgaacttaaagctcagctcagcacaatcctggaggaagagaaggctcagcaagaagagcgcatgaggatggagtccagaagacaggccacagtgtcctgggactccggagggtctgatgaagcaccgcccaagcccagcagaccgggttatcccagtccgaggtccagcgaaggattttatcccagcccacagcacatggtacaaaccaatcattaccaggtttctggctaccctggttcacatggaatcacagccatggctggcagcatctatccaggtcaggcatctcttttggaccaaacagattcatggaatcatagacctcaggagatagcaatgtggcagcccaatgtggaggactctacagtattggacctgcgagggattgggcaagtgttgccaacccatctgatggaagagcgtctaatccgacagcaacaggaaatggaagaagatcagcgctggctggaaaaagaggaaagatttctgaaacctgatgtgagactctctcgaggcagtattgacagggaggatggaagtcttcagggtccgattggaaaccaacatatatatcagcctgtgggtaaaccagatcctgcagctccaccaaagaaaccgcctcgccctggagctcccggtcatctgggaagccttgccagcctcagcagccctgctgacagctacaacgagggtgtcaagcttcagccccaggaaatcagcccccctcctactgccaacctggaccggtcgaatgataaggtgtacgagaatgtgacgggcctggtgaaagctgtcatcgagatgtccagtaaaatccagccagccccaccagaggagtatgtccctatggtgaaggaagtcggcttggccctgaggacattattggccactgtggatgagaccattcccctcctaccagccagcacccaccgagagattgagatggcacagaagctattgaactctgacctgggtgagctcatcaacaagatgaaactggcccagcagtatgtcatgaccagcctccagcaagagtacaaaaagcaaatgctgactgctgctcacgccctggctgtggatgccaaaaacttactcgatgtcattgaccaagcaagactgaaaatgcttgggcagacgagaccacactgagcctcccctaggagcacgtcttgctaccctcttttgaagatgttctctagccttccaccagcagcgaggaattaaccctgtgtcctcagtcgccagcacttacagctccaacttttttgaatgaccatctggttgaaaaatctttctcatataagtttaaccacactttgatttgggttcattttttgttttgtttttttcaatcatgatattcagaaaaatccaggatccaaaatgtggcgtttttctaagaatgaaaattatatgtaagcttttaagcatcatgaagaacaatttatgttcacattaagatacgttctaaagggggatggccaaggggtgacatcttaattcctaaactaccttagctgcatagtggaagaggagagcatgaagcaaagaattccaggaaacccaagaggctgagaattcttttgtctaccatagaattattatccagactggaatttttgtttgttagaacacccttcagttgcaatatgctaatcccactttacaaagaatataaaagctatattttgaagacttgagttatttcagaaaaaactacagccctttttgtcttacctgccttttactttcgtgtggatatgtgaagcattgggtcgggaactagctgtagaacacaactaaaaactcatgtcttttttcacagaataatgtgccagttttttgtagcaatgttatttctcttggaagcagaaatgctttgtaccagagcacctccaaactgcattgaggagaagttccagaaccatcccctttttccatttttatataatttataaagaaagattaaagccatgttgactattttacagccactggagttaactaacccttccttgtatctgtcttcccaggagagaatgaagcaaaacaggaatttggttttcttttgatgtccagttacaccatccattctgttaattttgaaaaaatataccctccctttagtttgttgggggatataaattattctcaggaagaatataatgaactgtacagttactttgacctattaaaaaggtgttaccagtaaaaaaccagcacaagacacacaaactttggggcgcgcgggcccaaaaagtttcaaccccggttgggcccgggcccatggttggcaatgcgcccggtcaaggaccgggcaacagggggtcccccaaaacgcgggccgctccaaacagggtgggcggcaacggcggc

SEQ ID NO: 59077 - DNA, 4873 bp, Homo sapiens
agcacggcctcgagggcgcgacgcgccgccgccgccgccgccggtcccggaccactgtgagcccgcggcgtgaggcgtgggaggaagcgcggctgctgtcgcccagcgccgccccgtcgtcgtctgccttcgcttcacggcgccgagccgcggtccgagcagaactggggctcccttgcatcttccagttacaaattcagtgccttctgcagtttccccagagctcctcaagaataacggaagggagaatatgacagatacctagcatctagcaaaataatggcagctgcttaccttgaccccaacttgaatcacacaccaaattcgagtactaagactcacctgggtactggtatggaacgttctcctggtgcaatggagcgagtattaaaggtctttcattattttgaaagcaatagtgagccaaccacctgggccagtattatcaggcatggagatgctactgatgtcaggggcatcattcagaagatagtggacagtcacaaagtaaagcatgtggcctgctatggattccgcctcagtcacctgcggtcagaggaggttcactggcttcacgtggatatgggcgtctccagtgtgagggagaagtatgagcttgctcacccaccagaggagtggaaatatgaattgagaattcgttatttgccaaaaggatttctaaaccagtttactgaagataagccaactttgaatttcttctatcaacaggtgaagagcgattatatgttagagatagctgatcaagtggaccaggaaattgctttgaagttgggttgtctagaaatacggcgatcatactgggagatgcggggcaatgcactagaaaagaagtctaactatgaagtattagaaaaagatgttggtttaaagcgattttttcctaagagtttactggattctgtcaaggccaaaacactaagaaaactgatccaacaaacatttagacaatttgccaaccttaatagagaagaaagtattctgaaattctttgagatcctgtctccagtctacagatttgataaggaatgcttcaagtgtgctcttggttcaagctggattatttcagtggaactggcaatcggcccagaagaaggaatcagttacctaacggacaagggctgcaatcccacacatcttgctgacttcactcaagtgcaaaccattcagtattcaaacagtgaagacaaggacagaaaaggaatgctacaactaaaaatagcaggtgcacccgagcctctgacagtgacggcaccatccctaaccattgcggagaatatggctgacctaatagatgggtactgccggctggtgaatggaacctcgcagtcatttatcatcagacctcagaaagaaggtgaacgggctttgccatcaataccaaagttggccaacagcgaaaagcaaggcatgcggacacacgccgtctctgtgtcagaaacagatgattatgctgagattatagatgaagaagatacttacaccatgccctcaaccagggattatgagattcaaagagaaagaatagaacttggacgatgtattggagaaggccaatttggagatgtacatcaaggcatttatatgagtccagagaatccagctttggcggttgcaattaaaacatgtaaaaactgtacttcggacagcgtgagagagaaatttcttcaagaagccttaacaatgcgtcagtttgaccatcctcatattgtgaagctgattggagtcatcacagagaatcctgtctggataatcatggagctgtgcacacttggagagctgaggtcatttttgcaagtaaggaaatacagtttggatctagcatctttgatcctgtatgcctatcagcttagtacagctcttgcatatctagagagcaaaagatttgtacacagggacattgctgctcggaatgttctggtgtcctcaaatgattgtgtaaaattaggagactttggattatcccgatatatggaagatagtacttactacaaagcttccaaaggaaaattgcctattaaatggatggctccagagtcaatcaattttcgacgttttacctcagctagtgacgtatggatgtttggtgtgtgtatgtgggagatactgatgcatggtgtgaagccttttcaaggagtgaagaacaatgatgtaatcggtcgaattgaaaatggggaaagattaccaatgcctccaaattgtcctcctaccctctacagccttatgacgaaatgctgggcctatgaccccagcaggcggcccaggtttactgaacttaaagctcagctcagcacaatcctggaggaagagaaggctcagcaagaagagcgcatgaggatggagtccagaagacaggccacagtgtcctgggactccggagggtctgatgaagcaccgcccaagcccagcagaccgggttatcccagtccgaggtccagcgaaggattttatcccagcccacagcacatggtacaaaccaatcattaccaggtttctggctaccctggttcacatggaatcacagccatggctggcagcatctatccaggtcaggcatctcttttggaccaaacagattcatggaatcatagacctcaggagatagcaatgtggcagcccaatgtggaggactctacagtattggacctgcgagggattgggcaagtgttgccaacccatctgatggaagagcgtctaatccgacagcaacaggaaatggaagaagatcagcgctggctggaaaaagaggaaagatttctgaaacctgatgtgagactctctcgaggcagtattgacagggaggatggaagtcttcagggtccgattggaaaccaacatatatatcagcctgtgggtaaaccagatcctgcagctccaccaaagaaaccgcctcgccctggagctcccggtcatctgggaagccttgccagcctcagcagccctgctgacagctacaacgagggtgtcaagcttcagccccaggaaatcagcccccctcctactgccaacctggaccggtcgaatgataaggtgtacgagaatgtgacgggcctggtgaaagctgtcatcgagatgtccagtaaaatccagccagccccaccagaggagtatgtccctatggtgaaggaagtcggcttggccctgaggacattattggccactgtggatgagaccattcccctcctaccagccagcacccaccgagagattgagatggcacagaagctattgaactctgacctgggtgagctcatcaacaagatgaaactggcccagcagtatgtcatgaccagcctccagcaagagtacaaaaagcaaatgctgactgctgctcacgccctggctgtggatgccaaaaacttactcgatgtcattgaccaagcaagactgaaaatgcttgggcagacgagaccacactgagcctcccctaggagcacgtcttgctaccctcttttgaagatgttctctagccttccaccagcagcgaggaattaaccctgtgtcctcagtcgccagcacttacagctccaacttttttgaatgaccatctggttgaaaaatctttctcatataagtttaaccacactttgatttgggttcattttttgttttgtttttttcaatcatgatattcagaaaaatccaggatccaaaatgtggcgtttttctaagaatgaaaattatatgtaagcttttaagcatcatgaagaacaatttatgttcacattaagatacgttctaaagggggatggccaaggggtgacatcttaattcctaaactaccttagctgcatagtggaagaggagagcatgaagcaaagaattccaggaaacccaagaggctgagaattcttttgtctaccatagaattattatccagactggaatttttgtttgttagaacacccttcagttgcaatatgctaatcccactttacaaagaatataaaagctatattttgaagacttgagttatttcagaaaaaactacagccctttttgtcttacctgccttttactttcgtgtggatatgtgaagcattgggtcgggaactagctgtagaacacaactaaaaactcatgtcttttttcacagaataatgtgccagttttttgtagcaatgttatttctcttggaagcagaaatgctttgtaccagagcacctccaaactgcattgaggagaagttccagaaccatcccctttttccatttttatataatttataaagaaagattaaagccatgttgactattttacagccactggagttaactaacccttccttgtatctgtcttcccaggagagaatgaagcaaaacaggaatttggttttcttttgatgtccagttacaccatccattctgttaattttgaaaaaatataccctccctttagtttgttgggggatataaattattctcaggaagaatataatgaactgtacagttactttgacctattaaaaaggtgttaccagtaaaaaaaaaaaaaaaaaaaaaaaaaaaaaaaaaaaaaaaaaaaaaaaaaaaaaaaaaaaaaaaaaaaaaaaaaaaaaaaaaaaaaaaaaaaaaaaaaaaaaaaaaaaaggggggcgcggcgccaacataaaatcttactgccgtcgtgagtagaacaacaagatgatagccacctcccccccttttttgatggaaaagagcagcggcaccacatcattatgtgctgagtatttattaatattaatcaagctgggacgtggctctttttataaaaacaaattcggtgccagcaggagaaaacaatatatagctatgttttttttaggaagaaaaacacacttctgtgtgggcgagatatatcatcgcgcaacatc

SEQ ID NO: 59078 - DNA, 2443 bp, Homo sapiens
attattagaactctagagttgtaggaatgtaggaagagctgtttgccacagttaggacgagggtttcaaactgtctgctgagccctggggcatctgcgtggaatgggaaactagcaaagtctcgctttggctgcattctgaggggtttatgtgatggcaaacagccaagatgaagaagctgcctagcagtcgctgcagcggctgcagcgttatgtgggacttcagatagcttctgagtagtcaagcagtgcacaatcctggaggaagagaaggctcagcaagaagagcgcatgaggatggagtccagaagacaggccacagtgtcctgggactccggagggtctgatgaagcaccgcccaagcccagcagaccgggttatcccagtccgaggtccagcgaaggattttatcccagcccacagcacatggtacaaaccaatcattaccaggtttctggctaccctggttcacatggaatcacagccatggctggcagcatctatccaggtcaggcatctcttttggaccaaacagattcatggaatcatagacctcaggagatagcaatgtggcagcccaatgtggaggactctacagtattggacctgcgagggattgggcaagtgttgccaacccatctgatggaagagcgtctaatccgacagcaacaggaaatggaagaagatcagcgctggctggaaaaagaggaaagatttctgaaacctgatgtgagactctctcgaggcagtattgacagggaggatggaagtcttcagggtccgattggaaaccaacatatatatcagcctgtgggtaaaccagatcctgcagctccaccaaagaaaccgcctcgccctggagctcccggtcatctgggaagccttgccagcctcagcagccctgctgacagctacaacgagggtgtcaagcttcagccccaggaaatcagcccccctcctactgccaacctggaccggtcgaatgataaggtgtacgagaatgtgacgggcctggtgaaagctgtcatcgagatgtccagtaaaatccagccagccccaccagaggagtatgtccctatggtgaaggaagtcggcttggccctgaggacattattggccactgtggatgagaccattcccctcctaccagccagcacccaccgagagattgagatggcacagaagctattgaactctgacctgggtgagctcatcaacaagatgaaactggcccagcagtatgtcatgaccagcctccagcaagagtacaaaaagcaaatgctgactgctgctcacgccctggctgtggatgccaaaaacttactcgatgtcattgaccaagcaagactgaaaatgcttgggcagacgagaccacactgagcctcccctaggagcacgtcttgctaccctcttttgaagatgttctctagccttccaccagcagcgaggaattaaccctgtgtcctcagtcgccagcacttacagctccaacttttttgaatgaccatctggttgaaaaatctttctcatataagtttaaccacactttgatttgggttcattttttgttttgtttttttcaatcatgatattcagaaaaatccaggatccaaaatgtggcgtttttctaagaatgaaaattatatgtaagcttttaagcatcatgaagaacaatttatgttcacattaagatacgttctaaagggggatggccaaggggtgacatcttaattcctaaactaccttagctgcatagtggaagaggagagcatgaagcaaagaattccaggaaacccaagaggctgagaattcttttgtctaccatagaattattatccagactggaatttttgtttgttagaacacccttcagttgcaatatgctaatcccactttacaaagaatataaaagctatattttgaagacttgagttatttcagaaaaaactacagccctttttgtcttacctgccttttactttcgtgtggatatgtgaagcattgggtcgggaactagctgtagaacacaactaaaaactcatgtcttttttcacagaataatgtgccagttttttgtagcaatgttatttctcttggaagcagaaatgctttgtaccagagcacctccaaactgcattgaggagaagttccagaaccatcccctttttccatttttatataatttataaagaaagattaaagccatgttgactattttacagccactggagttaactaacccttccttgtatctgtcttcccaggagagaatgaagcaaaacaggaatttggttttcttttgatgtccagttacaccatccattctgttaattttgaaaaaatataccctccctttagtttgttgggggatataaattattctcaggaagaatataatgaactgtacagttactttgacctattaaaaaggtgttaccagtaaa

SEQ ID NO: 59079 - DNA, 2422 bp, Homo sapiens
gacctagtgttcccgacgtgctggctgccctttacggtttgggtccaaactgtctgctgagccctggggcatctgcgtggaatgggaaactagcaaagtctcgctttggctgcattctgaggggtttatgtgatggcaaacagccaagatgaagaagctgcctagcagtcgctgcagcggctgcagcgttatgtgggacttcagatagcttctgagtagtcaagcagtgcacaatcctggaggaagagaaggctcagcaagaagagcgcatgaggatggagtccagaagacaggccacagtgtcctgggactccggagggtctgatgaagcaccgcccaagcccagcagaccgggttatcccagtccgaggtccagcgaaggattttatcccagcccacagcacatggtacaaaccaatcattaccaggtttctggctaccctggttcacatggaatcacagccatggctggcagcatctatccaggtcaggcatctcttttggaccaaacagattcatggaatcatagacctcaggagatagcaatgtggcagcccaatgtggaggactctacagtattggacctgcgagggattgggcaagtgttgccaacccatctgatggaagagcgtctaatccgacagcaacaggaaatggaagaagatcagcgctggctggaaaaagaggaaagatttctgaaacctgatgtgagactctctcgaggcagtattgacagggaggatggaagtcttcagggtccgattggaaaccaacatatatatcagcctgtgggtaaaccagatcctgcagctccaccaaagaaaccgcctcgccctggagctcccggtcatctgggaagccttgccagcctcagcagccctgctgacagctacaacgagggtgtcaagcttcagccccaggaaatcagcccccctcctactgccaacctggaccggtcgaatgataaggtgtacgagaatgtgacgggcctggtgaaagctgtcatcgagatgtccagtaaaatccagccagccccaccagaggagtatgtccctatggtgaaggaagtcggcttggccctgaggacattattggccactgtggatgagaccattcccctcctaccagccagcacccaccgagagattgagatggcacagaagctattgaactctgacctgggtgagctcatcaacaagatgaaactggcccagcagtatgtcatgaccagcctccagcaagagtacaaaaagcaaatgctgactgctgctcacgccctggctgtggatgccaaaaacttactcgatgtcattgaccaagcaagactgaaaatgcttgggcagacgagaccacactgagcctcccctaggagcacgtcttgctaccctcttttgaagatgttctctagccttccaccagcagcgaggaattaaccctgtgtcctcagtcgccagcacttacagctccaacttttttgaatgaccatctggttgaaaaatctttctcatataagtttaaccacactttgatttgggttcattttttgttttgtttttttcaatcatgatattcagaaaaatccaggatccaaaatgtggcgtttttctaagaatgaaaattatatgtaagcttttaagcatcatgaagaacaatttatgttcacattaagatacgttctaaagggggatggccaaggggtgacatcttaattcctaaactaccttagctgcatagtggaagaggagagcatgaagcaaagaattccaggaaacccaagaggctgagaattcttttgtctaccatagaattattatccagactggaatttttgtttgttagaacacccttcagttgcaatatgctaatcccactttacaaagaatataaaagctatattttgaagacttgagttatttcagaaaaaactacagccctttttgtcttacctgccttttactttcgtgtggatatgtgaagcattgggtcgggaactagctgtagaacacaactaaaaactcatgtcttttttcacagaataatgtgccagttttttgtagcaatgttatttctcttggaagcagaaatgctttgtaccagagcacctccaaactgcattgaggagaagttccagaaccatcccctttttccatttttatataatttataaagaaagattaaagccatgttgactattttacagccactggagttaactaacccttccttgtatctgtcttcccaggagagaatgaagcaaaacaggaatttggttttcttttgatgtccagttacaccatccattctgttaattttgaaaaaatataccctccctttagtttgttgggggatataaattattctcaggaagaatataatgaactgtacagttactttgacctattaaaaaggtgttaccagtaaa

SEQ ID NO: 59080 - DNA, 4311 bp, Homo sapiens
agcacggcctcgagggcgcgacgcgccgccgccgccgccgccggtcccggaccactgtgagcccgcggcgtgaggcgtgggaggaagcgcggctgctgtcgcccagcgccgccccgtcgtcgtctgccttcgcttcacggcgccgagccgcggtccgaaatatgacagatacctagcatctagcaaaataatggcagctgcttaccttgaccccaacttgaatcacacaccaaattcgagtactaagactcacctgggtactggtatggaacgttctcctggtgcaatggagcgagtattaaaggtctttcattattttgaaagcaatagtgagccaaccacctgggccagtattatcaggcatggagatgctactgatgtcaggggcatcattcagaagatagtggacagtcacaaagtaaagcatgtggcctgctatggattccgcctcagtcacctgcggtcagaggaggttcactggcttcacgtggatatgggcgtctccagtgtgagggagaagtatgagcttgctcacccaccagaggagtggaaatatgaattgagaattcgttatttgccaaaaggatttctaaaccagtttactgaagataagccaactttgaatttcttctatcaacaggtgaagagcgattatatgttagagatagctgatcaagtggaccaggaaattgctttgaagttgggttgtctagaaatacggcgatcatactgggagatgcggggcaatgcactagaaaagaagtctaactatgaagtattagaaaaagatgttggtttaaagcgattttttcctaagagtttactggattctgtcaaggccaaaacactaagaaaactgatccaacaaacatttagacaatttgccaaccttaatagagaagaaagtattctgaaattctttgagatcctgtctccagtctacagatttgataaggaatgcttcaagtgtgctcttggttcaagctggattatttcagtggaactggcaatcggcccagaagaaggaatcagttacctaacggacaagggctgcaatcccacacatcttgctgacttcactcaagtgcaaaccattcagtattcaaacagtgaagacaaggacagaaaaggaatgctacaactaaaaatagcaggtgcacccgagcctctgacagtgacggcaccatccctaaccattgcggagaatatggctgacctaatagatgggtactgccggctggtgaatggaacctcgcagtcatttatcatcagacctcagaaagaaggtgaacgggctttgccatcaataccaaagttggccaacagcgaaaagcaaggcatgcggacacacgccgtctctgtgtcagaaacagatgattatgctgagattatagatgaagaagatacttacaccatgccctcaaccagggattatgagattcaaagagaaagaatagaacttggacgatgtattggagaaggccaatttggagatgtacatcaaggcatttatatgagtccagagaatccagctttggcggttgcaattaaaacatgtaaaaactgtacttcggacagcgtgagagagaaatttcttcaagaagccttaacaatgcgtcagtttgaccatcctcatattgtgaagctgattggagtcatcacagagaatcctgtctggataatcatggagctgtgcacacttggagagctgaggtcatttttgcaagtaaggaaatacagtttggatctagcatctttgatcctgtatgcctatcagcttagtacagctcttgcatatctagagagcaaaagatttgtacacagggacattgctgctcggaatgttctggtgtcctcaaatgattgtgtaaaattaggagactttggattatcccgatatatggaagatagtacttactacaaagcttccaaaggaaaattgcctattaaatggatggctccagagtcaatcaattttcgacgttttacctcagctagtgacgtatggatgtttggtgtgtgtatgtgggagatactgatgcatggtgtgaagccttttcaaggagtgaagaacaatgatgtaatcggtcgaattgaaaatggggaaagattaccaatgcctccaaattgtcctcctaccctctacagccttatgacgaaatgctgggcctatgaccccagcaggcggcccaggtttactgaacttaaagctcagctcagcacaatcctggaggaagagaaggctcagcaagaagagcgcatgaggatggagtccagaagacaggccacagtgtcctgggactccggagggtctgatgaagcaccgcccaagcccagcagaccgggttatcccagtccgaggtccagcgaaggattttatcccagcccacagcacatggtacaaaccaatcattaccaggtttctggctaccctggttcacatggaatcacagccatggctggcagcatctatccaggtcaggcatctcttttggaccaaacagattcatggaatcatagacctcaggagatagcaatgtggcagcccaatgtggaggactctacagtattggacctgcgagggattgggcaagtgttgccaacccatctgatggaagagcgtctaatccgacagcaacaggaaatggaagaagatcagcgctggctggaaaaagaggaaagatttctgaaacctgatgtgagactctctcgaggcagtattgacagggaggatggaagtcttcagggtccgattggaaaccaacatatatatcagcctgtgggtaaaccagatcctgcagctccaccaaagaaaccgcctcgccctggagctcccggtcatctgggaagccttgccagcctcagcagccctgctgacagctacaacgagggtgtcaagcttcagccccaggaaatcagcccccctcctactgccaacctggaccggtcgaatgataaggtgtacgagaatgtgacgggcctggtgaaagctgtcatcgagatgtccagtaaaatccagccagccccaccagagattgagatggcacagaagctattgaactctgacctgggtgagctcatcaacaagatgaaactggcccagcagtatgtcatgaccagcctccagcaagagtacaaaaagcaaatgctgactgctgctcacgccctggctgtggatgccaaaaacttactcgatgtcattgaccaagcaagactgaaaatgcttgggcagacgagaccacactgagcctcccctaggagcacgtcttgctaccctcttttgaagatgttctctagccttccaccagcagcgaggaattaaccctgtgtcctcagtcgccagcacttacagctccaacttttttgaatgaccatctggttgaaaaatctttctcatataagtttaaccacactttgatttgggttcattttttgttttgtttttttcaatcatgatattcagaaaaatccaggatccaaaatgtggcgtttttctaagaatgaaaattatatgtaagcttttaagcatcatgaagaacaatttatgttcacattaagatacgttctaaagggggatggccaaggggtgacatcttaattcctaaactaccttagctgcatagtggaagaggagagcatgaagcaaagaattccaggaaacccaagaggctgagaattcttttgtctaccatagaattattatccagactggaatttttgtttgttagaacacccttcagttgcaatatgctaatcccactttacaaagaatataaaagctatattttgaagacttgagttatttcagaaaaaactacagccctttttgtcttacctgccttttactttcgtgtggatatgtgaagcattgggtcgggaactagctgtagaacacaactaaaaactcatgtcttttttcacagaataatgtgccagttttttgtagcaatgttatttctcttggaagcagaaatgctttgtaccagagcacctccaaactgcattgaggagaagttccagaaccatcccctttttccatttttatataatttataaagaaagattaaagccatgttgactattttacagccactggagttaactaacccttccttgtatctgtcttcccaggagagaatgaagcaaaacaggaatttggttttcttttgatgtccagttacaccatccattctgttaattttgaaaaaatataccctccctttagtttgttgggggatataaattattctcaggaagaatataatgaactgtacagttactttgacctattaaaaaggtgttaccagtaaa

SEQ ID NO: 59081 - DNA, 4436 bp, Homo sapiens
agcacggcctcgagggcgcgacgcgccgccgccgccgccgccggtcccggaccactgtgagcccgcggcgtgaggcgtgggaggaagcgcggctgctgtcgcccagcgccgccccgtcgtcgtctgccttcgcttcacggcgccgagccgcggtccgaaatatgacagatacctagcatctagcaaaataatggcagctgcttaccttgaccccaacttgaatcacacaccaaattcgagtactaagactcacctgggtactggtatggaacgttctcctggtgcaatggagcgagtattaaaggtctttcattattttgaaagcaatagtgagccaaccacctgggccagtattatcaggcatggagatgctactgatgtcaggggcatcattcagaagatagtggacagtcacaaagtaaagcatgtggcctgctatggattccgcctcagtcacctgcggtcagaggaggttcactggcttcacgtggatatgggcgtctccagtgtgagggagaagtatgagcttgctcacccaccagaggagtggaaatatgaattgagaattcgttatttgccaaaaggatttctaaaccagtttactgaagataagccaactttgaatttcttctatcaacaggtgaagagcgattatatgttagagatagctgatcaagtggaccaggaaattgctttgaagttgggttgtctagaaatacggcgatcatactgggagatgcggggcaatgcactagaaaagaagtctaactatgaagtattagaaaaagatgttggtttaaagcgattttttcctaagagtttactggattctgtcaaggccaaaacactaagaaaactgatccaacaaacatttagacaatttgccaaccttaatagagaagaaagtattctgaaattctttgagatcctgtctccagtctacagatttgataaggaatgcttcaagtgtgctcttggttcaagctggattatttcagtggaactggcaatcggcccagaagaaggaatcagttacctaacggacaagggctgcaatcccacacatcttgctgacttcactcaagtgcaaaccattcagtattcaaacagtgaagacaaggacagaaaaggaatgctacaactaaaaatagcaggtgcacccgagcctctgacagtgacggcaccatccctaaccattgcggagaatatggctgacctaatagatgggtactgccggctggtgaatggaacctcgcagtcatttatcatcagacctcagaaagaaggtgaacgggctttgccatcaataccaaagttggccaacagcgaaaagcaaggcatgcggacacacgccgtctctgtgtcagaaacagatgattatgctgagattatagatgaagaagatacttacaccatgccctcaaccagggattatgagattcaaagagaaagaatagaacttggacgatgtattggagaaggccaatttggagatgtacatcaaggcatttatatgagtccagagaatccagctttggcggttgcaattaaaacatgtaaaaactgtacttcggacagcgtgagagagaaatttcttcaagaagccttaacaatgcgtcagtttgaccatcctcatattgtgaagctgattggagtcatcacagagaatcctgtctggataatcatggagctgtgcacacttggagagctgaggtcatttttgcaagtaaggaaatacagtttggatctagcatctttgatcctgtatgcctatcagcttagtacagctcttgcatatctagagagcaaaagatttgtacacagggacattgctgctcggaatgttctggtgtcctcaaatgattgtgtaaaattaggagactttggattatcccgatatatggaagatagtacttactacaaagcttccaaaggaaaattgcctattaaatggatggctccagagtcaatcaattttcgacgttttacctcagctagtgacgtatggatgtttggtgtgtgtatgtgggagatactgatgcatggtgtgaagccttttcaaggagtgaagaacaatgatgtaatcggtcgaattgaaaatggggaaagattaccaatgcctccaaattgtcctcctaccctctacagccttatgacgaaatgctgggcctatgaccccagcaggcggcccaggtttactgaacttaaagctcagctcagcacaatcctggaggaagagaaggctcagcaagaagagcgcatgaggatggagtccagaagacaggccacagtgtcctgggactccggagggtctgatgaagcaccgcccaagcccagcagaccgggttatcccagtccgaggtccagcgaaggattttatcccagcccacagcacatggtaatgattggttgtaccatgtgctgtgggctgggataaaccaagtttctggctaccctggttcacatggaatcacagccatggctggcagcatctatccaggtcaggcatctcttttggaccaaacagattcatggaatcatagacctcaggagatagcaatgtggcagcccaatgtggaggactctacagtattggacctgcgagggattgggcaagtgttgccaacccatctgatggaagagcgtctaatccgacagcaacaggaaatggaagaagatcagcgctggctggaaaaagaggaaagatttctgaaacctgatgtgagactctctcgaggcagtattgacagggaggatggaagtcttcagggtccgattggaaaccaacatatatatcagcctgtgggtaaaccagatcctgcagctccaccaaagaaaccgcctcgccctggagctcccggtcatctgggaagccttgccagcctcagcagccctgctgacagctacaacgagggtgtcaagcttcagccccaggaaatcagcccccctcctactgccaacctggaccggtcgaatgataaggtgtacgagaatgtgacgggcctggtgaaagctgtcatcgagatgtccagtaaaatccagccagccccaccagaggagtatgtccctatggtgaaggaagtcggcttggccctgaggacattattggccactgtggatgagaccattcccctcctaccagccagcacccaccgagagattgagatggcacagaagctattgaactctgacctgggtgagctcatcaacaagatgaaactggcccagcagtatgtcatgaccagcctccagcaagagtacaaaaagcaaatgctgactgctgctcacgccctggctgtggatgccaaaaacttactcgatgtcattgaccaagcaagactgaaaatgcttgggcagacgagaccacactgagcctcccctaggagcacgtcttgctaccctcttttgaagatgttctctagccttccaccagcagcgaggaattaaccctgtgtcctcagtcgccagcacttacagctccaacttttttgaatgaccatctggttgaaaaatctttctcatataagtttaaccacactttgatttgggttcattttttgttttgtttttttcaatcatgatattcagaaaaatccaggatccaaaatgtggcgtttttctaagaatgaaaattatatgtaagcttttaagcatcatgaagaacaatttatgttcacattaagatacgttctaaagggggatggccaaggggtgacatcttaattcctaaactaccttagctgcatagtggaagaggagagcatgaagcaaagaattccaggaaacccaagaggctgagaattcttttgtctaccatagaattattatccagactggaatttttgtttgttagaacacccttcagttgcaatatgctaatcccactttacaaagaatataaaagctatattttgaagacttgagttatttcagaaaaaactacagccctttttgtcttacctgccttttactttcgtgtggatatgtgaagcattgggtcgggaactagctgtagaacacaactaaaaactcatgtcttttttcacagaataatgtgccagttttttgtagcaatgttatttctcttggaagcagaaatgctttgtaccagagcacctccaaactgcattgaggagaagttccagaaccatcccctttttccatttttatataatttataaagaaagattaaagccatgttgactattttacagccactggagttaactaacccttccttgtatctgtcttcccaggagagaatgaagcaaaacaggaatttggttttcttttgatgtccagttacaccatccattctgttaattttgaaaaaatataccctccctttagtttgttgggggatataaattattctcaggaagaatataatgaactgtacagttactttgacctattaaaaaggtgttaccagtaaa

SEQ ID NO: 59082 - DNA, 2646 bp, Homo sapiens
attattagaactctagagttgtaggaatgtaggaagagctgtttgccacagttaggacgagggtttcaaactgtctgctgagccctggggcatctgcgtggaatgggaaactagcaaagtctcgctttggctgcattctgaggggtttatgtgatggcaaacagccaagatgaagaagctgcctagcagtcgctgcagcggctgcagcgttatgtgggacttcagatagcttctgagtagtcaagcagtgataaagcactggttaagctgaacgataggaagattgtattgagcaatttagggagattattggccagattgctaattgatcacgtaagtgctggcgtgatcacattaggtgtgaaaagaatctgtcctcagacatgtatatgcttgataaagtgctgcgtgggatttctcagaggaattctgttctgctcaagataaactttgcacaatcctggaggaagagaaggctcagcaagaagagcgcatgaggatggagtccagaagacaggccacagtgtcctgggactccggagggtctgatgaagcaccgcccaagcccagcagaccgggttatcccagtccgaggtccagcgaaggattttatcccagcccacagcacatggtacaaaccaatcattaccaggtttctggctaccctggttcacatggaatcacagccatggctggcagcatctatccaggtcaggcatctcttttggaccaaacagattcatggaatcatagacctcaggagatagcaatgtggcagcccaatgtggaggactctacagtattggacctgcgagggattgggcaagtgttgccaacccatctgatggaagagcgtctaatccgacagcaacaggaaatggaagaagatcagcgctggctggaaaaagaggaaagatttctgaaacctgatgtgagactctctcgaggcagtattgacagggaggatggaagtcttcagggtccgattggaaaccaacatatatatcagcctgtgggtaaaccagatcctgcagctccaccaaagaaaccgcctcgccctggagctcccggtcatctgggaagccttgccagcctcagcagccctgctgacagctacaacgagggtgtcaagcttcagccccaggaaatcagcccccctcctactgccaacctggaccggtcgaatgataaggtgtacgagaatgtgacgggcctggtgaaagctgtcatcgagatgtccagtaaaatccagccagccccaccagaggagtatgtccctatggtgaaggaagtcggcttggccctgaggacattattggccactgtggatgagaccattcccctcctaccagccagcacccaccgagagattgagatggcacagaagctattgaactctgacctgggtgagctcatcaacaagatgaaactggcccagcagtatgtcatgaccagcctccagcaagagtacaaaaagcaaatgctgactgctgctcacgccctggctgtggatgccaaaaacttactcgatgtcattgaccaagcaagactgaaaatgcttgggcagacgagaccacactgagcctcccctaggagcacgtcttgctaccctcttttgaagatgttctctagccttccaccagcagcgaggaattaaccctgtgtcctcagtcgccagcacttacagctccaacttttttgaatgaccatctggttgaaaaatctttctcatataagtttaaccacactttgatttgggttcattttttgttttgtttttttcaatcatgatattcagaaaaatccaggatccaaaatgtggcgtttttctaagaatgaaaattatatgtaagcttttaagcatcatgaagaacaatttatgttcacattaagatacgttctaaagggggatggccaaggggtgacatcttaattcctaaactaccttagctgcatagtggaagaggagagcatgaagcaaagaattccaggaaacccaagaggctgagaattcttttgtctaccatagaattattatccagactggaatttttgtttgttagaacacccttcagttgcaatatgctaatcccactttacaaagaatataaaagctatattttgaagacttgagttatttcagaaaaaactacagccctttttgtcttacctgccttttactttcgtgtggatatgtgaagcattgggtcgggaactagctgtagaacacaactaaaaactcatgtcttttttcacagaataatgtgccagttttttgtagcaatgttatttctcttggaagcagaaatgctttgtaccagagcacctccaaactgcattgaggagaagttccagaaccatcccctttttccatttttatataatttataaagaaagattaaagccatgttgactattttacagccactggagttaactaacccttccttgtatctgtcttcccaggagagaatgaagcaaaacaggaatttggttttcttttgatgtccagttacaccatccattctgttaattttgaaaaaatataccctccctttagtttgttgggggatataaattattctcaggaagaatataatgaactgtacagttactttgacctattaaaaaggtgttaccagtaaa

SEQ ID NO: 59083 - DNA, 4367 bp, Homo sapiens
agcacggcctcgagggcgcgacgcgccgccgccgccgccgccggtcccggaccactgtgagcccgcggcgtgaggcgtgggaggaagcgcggctgctgtcgcccagcgccgccccgtcgtcgtctgccttcgcttcacggcgccgagccgcggtccgaaatatgacagatacctagcatctagcaaaataatggcagctgcttaccttgaccccaacttgaatcacacaccaaattcgagtactaagactcacctgggtactggtatggaacgttctcctggtgcaatggagcgagtattaaaggtctttcattattttgaaagcaatagtgagccaaccacctgggccagtattatcaggcatggagatgctactgatgtcaggggcatcattcagaagatagtggacagtcacaaagtaaagcatgtggcctgctatggattccgcctcagtcacctgcggtcagaggaggttcactggcttcacgtggatatgggcgtctccagtgtgagggagaagtatgagcttgctcacccaccagaggagtggaaatatgaattgagaattcgttatttgccaaaaggatttctaaaccagtttactgaagataagccaactttgaatttcttctatcaacaggtgaagagcgattatatgttagagatagctgatcaagtggaccaggaaattgctttgaagttgggttgtctagaaatacggcgatcatactgggagatgcggggcaatgcactagaaaagaagtctaactatgaagtattagaaaaagatgttggtttaaagcgattttttcctaagagtttactggattctgtcaaggccaaaacactaagaaaactgatccaacaaacatttagacaatttgccaaccttaatagagaagaaagtattctgaaattctttgagatcctgtctccagtctacagatttgataaggaatgcttcaagtgtgctcttggttcaagctggattatttcagtggaactggcaatcggcccagaagaaggaatcagttacctaacggacaagggctgcaatcccacacatcttgctgacttcactcaagtgcaaaccattcagtattcaaacagtgaagacaaggacagaaaaggaatgctacaactaaaaatagcaggtgcacccgagcctctgacagtgacggcaccatccctaaccattgcggagaatatggctgacctaatagatgggtactgccggctggtgaatggaacctcgcagtcatttatcatcagacctcagaaagaaggtgaacgggctttgccatcaataccaaagttggccaacagcgaaaagcaaggcatgcggacacacgccgtctctgtgtcagaaacagatgattatgctgagattatagatgaagaagatacttacaccatgccctcaaccagggattatgagattcaaagagaaagaatagaacttggacgatgtattggagaaggccaatttggagatgtacatcaaggcatttatatgagtccagagaatccagctttggcggttgcaattaaaacatgtaaaaactgtacttcggacagcgtgagagagaaatttcttcaagaagccttaacaatgcgtcagtttgaccatcctcatattgtgaagctgattggagtcatcacagagaatcctgtctggataatcatggagctgtgcacacttggagagctgaggtcatttttgcaagtaaggaaatacagtttggatctagcatctttgatcctgtatgcctatcagcttagtacagctcttgcatatctagagagcaaaagatttgtacacagggacattgctgctcggaatgttctggtgtcctcaaatgattgtgtaaaattaggagactttggattatcccgatatatggaagatagtacttactacaaagcttccaaaggaaaattgcctattaaatggatggctccagagtcaatcaattttcgacgttttacctcagctagtgacgtatggatgtttggtgtgtgtatgtgggagatactgatgcatggtgtgaagccttttcaaggagtgaagaacaatgatgtaatcggtcgaattgaaaatggggaaagattaccaatgcctccaaattgtcctcctaccctctacagccttatgacgaaatgctgggcctatgaccccagcaggcggcccaggtttactgaacttaaagctcagctcagcacaatcctggaggaagagaaggctcagcaagaagagcgcatgaggatggagtccagaagacaggccacagtgtcctgggactccggagggtctgatgaagcaccgcccaagcccagcagaccgggttatcccagtccgaggtccagcgaaggattttatcccagcccacagcacatggtacaaaccaatcattaccaggtttctggctaccctggttcacatggaatcacagccatggctggcagcatctatccaggtcaggcatctcttttggaccaaacagattcatggaatcatagacctcaggagatagcaatgtggcagcccaatgtggaggactctacagtattggacctgcgagggattgggcaagtgttgccaacccatctgatggaagagcgtctaatccgacagcaacaggaaatggaagaagatcagcgctggctggaaaaagaggaaagatttctgaaacctgatgtgagactctctcgaggcagtattgacagggaggatggaagtcttcagggtccgattggaaaccaacatatatatcagcctgtgggtaaaccagatcctgcagctccaccaaagaaaccgcctcgccctggagctcccggtcatctgggaagccttgccagcctcagcagccctgctgacagctacaacgagggtgtcaagcttcagccccaggaaatcagcccccctcctactgccaacctggaccggtcgaatgataaggtgtacgagaatgtgacgggcctggtgaaagctgtcatcgagatgtccagtaaaatccagccagccccaccagaggagtatgtccctatggtgaaggaagtcggcttggccctgaggacattattggccactgtggatgagaccattcccctcctaccagccagcacccaccgagagattgagatggcacagaagctattgaactctgacctgggtgagctcatcaacaagatgaaactggcccagcagtatgtcatgaccagcctccagcaagagtacaaaaattactcgatgtcattgaccaagcaagactgaaaatgcttgggcagacgagaccacactgagcctcccctaggagcacgtcttgctaccctcttttgaagatgttctctagccttccaccagcagcgaggaattaaccctgtgtcctcagtcgccagcacttacagctccaacttttttgaatgaccatctggttgaaaaatctttctcatataagtttaaccacactttgatttgggttcattttttgttttgtttttttcaatcatgatattcagaaaaatccaggatccaaaatgtggcgtttttctaagaatgaaaattatatgtaagcttttaagcatcatgaagaacaatttatgttcacattaagatacgttctaaagggggatggccaaggggtgacatcttaattcctaaactaccttagctgcatagtggaagaggagagcatgaagcaaagaattccaggaaacccaagaggctgagaattcttttgtctaccatagaattattatccagactggaatttttgtttgttagaacacccttcagttgcaatatgctaatcccactttacaaagaatataaaagctatattttgaagacttgagttatttcagaaaaaactacagccctttttgtcttacctgccttttactttcgtgtggatatgtgaagcattgggtcgggaactagctgtagaacacaactaaaaactcatgtcttttttcacagaataatgtgccagttttttgtagcaatgttatttctcttggaagcagaaatgctttgtaccagagcacctccaaactgcattgaggagaagttccagaaccatcccctttttccatttttatataatttataaagaaagattaaagccatgttgactattttacagccactggagttaactaacccttccttgtatctgtcttcccaggagagaatgaagcaaaacaggaatttggttttcttttgatgtccagttacaccatccattctgttaattttgaaaaaatataccctccctttagtttgttgggggatataaattattctcaggaagaatataatgaactgtacagttactttgacctattaaaaaggtgttaccagtaaa

SEQ ID NO: 59084 - DNA, 2171 bp, Homo sapiens
catcgcagccagccccaccagaggagtatgtccctatggtgaaggaagtcggcttgtccctgaggacattatgggacactgtggatgagaccattcccctcctaccagccagcacccaccgagagattgagatggcacagaagctattgaactctgacctgggtgagctcatcaacaagatgaaactggcccagcagtatgtcatgaccagccatggctggcagcatctatccaggtcaggcatctcttttggaccaaacagattcatggaatcatagacctcaggagatagcaatgtggcagcccaatgtggaggactctacagtattggacctgcgagggattgggcaagtgttgccaacccatctgatggaagagcgtctaatccgacagcaacaggaaatggaagaagatcagcgctggctggaaaaagaggaaagatttctgaaacctgatgtgagactctctcgaggcagtattgacagggaggatggaagtcttcagggtccgattggaaaccaacatatatatcagcctgtgggtaaaccagatcctgcagctccaccaaagaaaccgcctcgccctggagctcccggtcatctgggaagccttgccagcctcagcagccctgctgacagctacaacgagggtgtcaagcttcagccccaggaaatcagcccccctcctactgccaacctggaccggtcgaatgataaggtgtacgagaatgtgacgggcctggtgaaagctgtcatcgagatgtccagtaaaatccagccagccccaccagaggagtatgtccctatggtgaaggaagtcggcttggccctgaggacattattggccactgtggatgagaccattcccctcctaccagccagcacccaccgagagattgagatggcacagaagctattgaactctgacctgggtgagctcatcaacaagatgaaactggcccagcagtatgtcatgaccagcctccagcaagagtacaaaaagcaaatgctgactgctgctcacgccctggctgtggatgccaaaaacttactcgatgtcattgaccaagcaagactgaaaatgcttgggcagacgagaccacactgagcctcccctaggagcacgtcttgctaccctcttttgaagatgttctctagccttccaccagcagcgaggaattaaccctgtgtcctcagtcgccagcacttacagctccaacttttttgaatgaccatctggttgaaaaatctttctcatataagtttaaccacactttgatttgggttcattttttgttttgtttttttcaatcatgatattcagaaaaatccaggatccaaaatgtggcgtttttctaagaatgaaaattatatgtaagcttttaagcatcatgaagaacaatttatgttcacattaagatacgttctaaagggggatggccaaggggtgacatcttaattcctaaactaccttagctgcatagtggaagaggagagcatgaagcaaagaattccaggaaacccaagaggctgagaattcttttgtctaccatagaattattatccagactggaatttttgtttgttagaacacccttcagttgcaatatgctaatcccactttacaaagaatataaaagctatattttgaagacttgagttatttcagaaaaaactacagccctttttgtcttacctgccttttactttcgtgtggatatgtgaagcattgggtcgggaactagctgtagaacacaactaaaaactcatgtcttttttcacagaataatgtgccagttttttgtagcaatgttatttctcttggaagcagaaatgctttgtaccagagcacctccaaactgcattgaggagaagttccagaaccatcccctttttccatttttatataatttataaagaaagattaaagccatgttgactattttacagccactggagttaactaacccttccttgtatctgtcttcccaggagagaatgaagcaaaacaggaatttggttttcttttgatgtccagttacaccatccattctgttaattttgaaaaaatataccctccctttagtttgttgggggatataaattattctcaggaagaatataatgaactgtacagttactttgacctattaaaaaggtgttaccagtaaa

SEQ ID NO: 59085 - DNA, 2261 bp, Homo sapiens
ataaaggcacgtagcctacttcgtttattctgatattggtgaaatttccgtactattatttacgtaaaatctagatttctctgtttggtttctatattctagatgcagtgtgggaaaacagtcttgtaattgaactcatttgctactttggcaagacagctaaatccgtataagccatattctgtcagaaagccgcaagtaatgcctgatatttttatcctggggttgcgggtatctcagtgaagaagaaagccatctgtgctacttggaatagaggtaaagtgcaggttctccagcactgggtgggccagtgcaggtaccagtctgtaaggtgtgcgtgtgtggagaggaatgcagttcttcccaaggcagccaaccttcatttatcatcactggaatttttttgaaacgggggaactttcaactcttcttattcagaggacaattgtgttaaaaaggaaggaatttaatacagaatctgtcaaaaattttcaaatcaaaaatgaaattgttttgattttgttttaatttcttcagaaacctgatgtgagactctctcgaggcagtattgacagggaggatggaagtcttcagggtccgattggaaaccaacatatatatcagcctgtgggtaaaccagatcctgcagctccaccaaagaaaccgcctcgccctggagctcccggtcatctgggaagccttgccagcctcagcagccctgctgacagctacaacgagggtgtcaagcttcagccccaggaaatcagcccccctcctactgccaacctggaccggtcgaatgataaggtgtacgagaatgtgacgggcctggtgaaagctgtcatcgagatgtccagtaaaatccagccagccccaccagaggagtatgtccctatggtgaaggaagtcggcttggccctgaggacattattggccactgtggatgagaccattcccctcctaccagccagcacccaccgagagattgagatggcacagaagctattgaactctgacctgggtgagctcatcaacaagatgaaactggcccagcagtatgtcatgaccagcctccagcaagagtacaaaaagcaaatgctgactgctgctcacgccctggctgtggatgccaaaaacttactcgatgtcattgaccaagcaagactgaaaatgcttgggcagacgagaccacactgagcctcccctaggagcacgtcttgctaccctcttttgaagatgttctctagccttccaccagcagcgaggaattaaccctgtgtcctcagtcgccagcacttacagctccaacttttttgaatgaccatctggttgaaaaatctttctcatataagtttaaccacactttgatttgggttcattttttgttttgtttttttcaatcatgatattcagaaaaatccaggatccaaaatgtggcgtttttctaagaatgaaaattatatgtaagcttttaagcatcatgaagaacaatttatgttcacattaagatacgttctaaagggggatggccaaggggtgacatcttaattcctaaactaccttagctgcatagtggaagaggagagcatgaagcaaagaattccaggaaacccaagaggctgagaattcttttgtctaccatagaattattatccagactggaatttttgtttgttagaacacccttcagttgcaatatgctaatcccactttacaaagaatataaaagctatattttgaagacttgagttatttcagaaaaaactacagccctttttgtcttacctgccttttactttcgtgtggatatgtgaagcattgggtcgggaactagctgtagaacacaactaaaaactcatgtcttttttcacagaataatgtgccagttttttgtagcaatgttatttctcttggaagcagaaatgctttgtaccagagcacctccaaactgcattgaggagaagttccagaaccatcccctttttccatttttatataatttataaagaaagattaaagccatgttgactattttacagccactggagttaactaacccttccttgtatctgtcttcccaggagagaatgaagcaaaacaggaatttggttttcttttgatgtccagttacaccatccattctgttaattttgaaaaaatataccctccctttagtttgttgggggatataaattattctcaggaagaatataatgaactgtacagttactttgacctattaaaaaggtgttaccagtaaa

SEQ ID NO: 59086 - DNA, 3237 bp, Homo sapiens
agcacggcctcgagggcgcgacgcgccgccgccgccgccgccggtcccggaccactgtgagcccgcggcgtgaggcgtgggaggaagcgcggctgctgtcgcccagcgccgccccgtcgtcgtctgccttcgcttcacggcgccgagccgcggtccgaaatatgacagatacctagcatctagcaaaataatggcagctgcttaccttgaccccaacttgaatcacacaccaaattcgagtactaagactcacctgggtactggtatggaacgttctcctggtgcaatggagcgagtattaaaggtctttcattattttgaaagcaatagtgagccaaccacctgggccagtattatcaggcatggagatgctactgatgtcaggggcatcattcagaagatagtggacagtcacaaagtaaagcatgtggcctgctatggattccgcctcagtcacctgcggtcagaggaggttcactggcttcacgtggatatgggcgtctccagtgtgagggagaagtatgagcttgctcacccaccagaggagtggaaatatgaattgagaattcgttatttgccaaaaggatttctaaaccagtttactgaagataagccaactttgaatttcttctatcaacaggtgaagagcgattatatgttagagatagctgatcaagtggaccaggaaattgctttgaagttgggttgtctagaaatacggcgatcatactgggagatgcggggcaatgcactagaaaagaagtctaactatgaagtattagaaaaagatgttggtttaaagcgattttttcctaagagtttactggattctgtcaaggccaaaacactaagaaaactgatccaacaaacatttagacaatttgccaaccttaatagagaagaaagtattctgaaattctttgagatcctgtctccagtctacagatttgataaggaatgcttcaagtgtgctcttggttcaagctggattatttcagtggaactggcaatcggcccagaagaaggaatcagttacctaacggacaagggctgcaatcccacacatcttgctgacttcactcaagtgcaaaccattcagtattcaaacagtgaagacaaggacagaaaaggaatgctacaactaaaaatagcaggtgcacccgagcctctgacagtgacggcaccatccctaaccattgcggagaatatggctgacctaatagatgggtactgccggctggtgaatggaacctcgcagtcatttatcatcagacctcagaaagaaggtgaacgggctttgccatcaataccaaagttggccaacagcgaaaagcaaggcatgcggacacacgccgtctctgtgtcagaaacagatgattatgctgagattatagatgaagaagatacttacaccatgccctcaaccagggattatgagattcaaagagaaagaatagaacttggacgatgtattggagaaggccaatttggagatgtacatcaaggcatttatatgagtccagagaatccagctttggcggttgcaattaaaacatgtaaaaactgtacttcggacagcgtgagagagaaatttcttcaagaagccttaacaatgcgtcagtttgaccatcctcatattgtgaagctgattggagtcatcacagagaatcctgtctggataatcatggagctgtgcacacttggagagctgaggtcatttttgcaagtaaggaaatacagtttggatctagcatctttgatcctgtatgcctatcagcttagtacagctcttgcatatctagagagcaaaagatttgtacacagggacattgctgctcggaatgttctggtgtcctcaaatgattgtgtaaaattaggagactttggattatcccgatatatggaagatagtacttactacaaagcttccaaaggaaaattgcctattaaatggatggctccagagtcaatcaattttcgacgttttacctcagctagtgacgtatggatgtttggtgtgtgtatgtgggagatactgatgcatggtgtgaagccttttcaaggagtgaagaacaatgatgtaatcggtcgaattgaaaatggggaaagattaccaatgcctccaaattgtcctcctaccctctacagccttatgacgaaatgctgggcctatgaccccagcaggcggcccaggtttactgaacttaaagctcagctcagcacaatcctggaggaagagaaggctcagcaagaagagcgcatgaggatggagtccagaagacaggccacagtgtcctgggactccggagggtctgatgaagcaccgcccaagcccagcagaccgggttatcccagtccgaggtccagcgaaggattttatcccagcccacagcacatggtacaaaccaatcattaccaggtttctggctaccctggttcacatggaatcacagccatggctggcagcatctatccaggtcaggcatctcttttggaccaaacagattcatggaatcatagacctcaggagatagcaatgtggcagcccaatgtggaggactctacagtattggacctgcgagggattgggcaagtgttgccaacccatctgatggaagagcgtctaatccgacagcaacaggaaatggaagaagatcagcgctggctggaaaaagaggaaagatttctgaaacctgatgtgagactctctcgaggcagtattgacagggaggatggaagtcttcagggtccgattggaaaccaacatatatatcagcctgtgggtaaaccagatcctgcagctccaccaaagaaaccgcctcgccctggagctcccggtcatctgggaagccttgccagcctcagcagccctgctgacagctacaacgagggtgtcaaggtgggcatctgagcctgtgcagcaccttctgcttgcaggatttgtggtgtcccctagttctcagttgatgtgttcatgtcatagagtggagttggtgctgaaaatagaacagtgcagagtggaactgcagtgagacccaggagtcaattggtctggttctgaacccctctgagagtcagggaaaagctttatgcaaacattttcttttccattttcctctcagtgtaatagattttaggaattcagtcagattctgattttctacatacatcttcctctgatcagacagaatgttttctttagaacaaagtgccaagattgtttctggttttaaaaat

SEQ ID NO: 59087 - DNA, 2533 bp, Homo sapiens
agcacggcctcgagggcgcgacgcgccgccgccgccgccgccggtcccggaccactgtgagcccgcggcgtgaggcgtgggaggaagcgcggctgctgtcgcccagcgccgccccgtcgtcgtctgccttcgcttcacggcgccgagccgcggtccgaaatatgacagatacctagcatctagcaaaataatggcagctgcttaccttgaccccaacttgaatcacacaccaaattcgagtactaagactcacctgggtactggtatggaacgttctcctggtgcaatggagcgagtattaaaggtctttcattattttgaaagcaatagtgagccaaccacctgggccagtattatcaggcatggagatgctactgatgtcaggggcatcattcagaagatagtggacagtcacaaagtaaagcatgtggcctgctatggattccgcctcagtcacctgcggtcagaggaggttcactggcttcacgtggatatgggcgtctccagtgtgagggagaagtatgagcttgctcacccaccagaggagtggaaatatgaattgagaattcgttatttgccaaaaggatttctaaaccagtttactgaagataagccaactttgaatttcttctatcaacaggtgaagagcgattatatgttagagatagctgatcaagtggaccaggaaattgctttgaagttgggttgtctagaaatacggcgatcatactgggagatgcggggcaatgcactagaaaagaagtctaactatgaagtattagaaaaagatgttggtttaaagcgattttttcctaagagtttactggattctgtcaaggccaaaacactaagaaaactgatccaacaaacatttagacaatttgccaaccttaatagagaagaaagtattctgaaattctttgagatcctgtctccagtctacagatttgataaggaatgcttcaagtgtgctcttggttcaagctggattatttcagtggaactggcaatcggcccagaagaaggaatcagttacctaacggacaagggctgcaatcccacacatcttgctgacttcactcaagtgcaaaccattcagtattcaaacagtgaagacaaggacagaaaaggaatgctacaactaaaaatagcaggtgcacccgagcctctgacagtgacggcaccatccctaaccattgcggagaatatggctgacctaatagatgggtactgccggctggtgaatggaacctcgcagtcatttatcatcagacctcagaaagaaggtgaacgggctttgccatcaataccaaagttggccaacagcgaaaagcaaggcatgcggacacacgccgtctctgtgtcagaaacagatgattatgctgagattatagatgaagaagatacttacaccatgccctcaaccagggattatgagattcaaagagaaagaatagaacttggacgatgtattggagaaggccaatttggagatgtacatcaaggcatttatatgagtccagagaatccagctttggcggttgcaattaaaacatgtaaaaactgtacttcggacagcgtgagagagaaatttcttcaagaagccttaacaatgcgtcagtttgaccatcctcatattgtgaagctgattggagtcatcacagagaatcctgtctggataatcatggagctgtgcacacttggagagctgaggtcatttttgcaagtaaggaaatacagtttggatctagcatctttgatcctgtatgcctatcagcttagtacagctcttgcatatctagagagcaaaagatttgtacacagggacattgctgctcggaatgttctggtgtcctcaaatgattgtgtaaaattaggagactttggattatcccgatatatggaagatagtacttactacaaagcttccaaaggaaaattgcctattaaatggatggctccagagtcaatcaattttcgacgttttacctcagctagtgacgtatggatgtttggtgtgtgtatgtgggagatactgatgcatggtgtgaagccttttcaaggagtgaagaacaatgatgtaatcggtcgaattgaaaatggggaaagattaccaatgcctccaaattgtcctcctaccctctacagccttatgacgaaatgctgggcctatgaccccagcaggcggcccaggtttactgaacttaaagctcagctcagcacaatcctggaggaagagaaggctcagcaagaagagcgcatgaggatggagtccagaagacaggccacagtgtcctgggactccggagggtctgatgaagcaccgcccaagcccagcagaccgggttatcccagtccgaggtccagcgaaggattttatcccagcccacagcacatggtacaaaccaatcattaccaggtatgccagtcattacagatataaactgtgttattttattatttagcgcttttggggtagagcggtacattgtgcatatttttatttatgtacttatgagtatgatttggccga

SEQ ID NO: 59088 - DNA, 497 bp, Homo sapiens
tgtatttttagtagagatgtgatttcactatgttgcccaggctggtcttgaactcctgatctcaagtgatccacctgcctcggcctcccaaagtgctgggattacagatgtgagccactgcagctgccctctagatttttttttttgaccattgcttatttggtttgactttcattttcttccccattgtggtagcccttttctgaatgtctgttagtttgtctgtctctctcctctgtagtccctagagtcagatgaactcctctgcaggtgcaatggtgtaacactctctagtgctgaattttgagcaggagaaagagagcaagagtgaccagcactcttggaaactctggcctcttgagaatttggtgtcttctctgcaaaggctgcaaacctgttaacccacaggccagagagagagagaagccagaagcatgatctgttaagcttgagtttcatatttgatgcacagagatcactgttttttgatgagaatt

SEQ ID NO: 59089 - DNA, 459 bp, Homo sapiens
cagaattaagatacattataactaagatataagtatttcaaaatttaaacatttaaaataatttttaataaagaataaagtagaaaacttacaaacccatgtctatttgaaggattagctattatgtgttttgtaagcgagtagataaaaggagtaactaacttgtagttttacttgtttttagtatgcatattatagaatgtttgcatgtaaaattaatacaatttgactttgacaaacatttcggataactggaaagatggaagcaaaagcttcatttgggatgaaatgtcagtttattaaaatttctaggccatgataatttaagagtttgggaaaaaaccaaaagaacaggtataaagatagttgtgcatttggttagaaataagcggtgacgtattttgacaaagagaagcatactaattgaatacagtgggcaggactcattagagactgtga

SEQ ID NO: 59090 - DNA, 1591 bp, Homo sapiens
ggcacagatcttggaacgagacgacctgccgtgtcagcacgatggaccccaaacagaccaccctcctgtgtcttgtgctctgtctgggccagaggattcaggcacaggaaggggactttcccatgcctttcatatctgccaaatcgagtcctgtgattcccttggatggatctgtgaaaatccagtgccaggccattcgtgaagcttacctgacccagctgatgatcataaaaaactccacgtaccgagagataggcagaagactgaagttttggaatgagactgatcctgagttcgtcattgaccacatggacgcaaacaaggcagggcgctatcagtgccaatataggatagggcactacagattccggtacagtgacaccctggagctggtagtgacaggcttgtatggcaaacccttcctctctgcagatcggggtctggtgttgatgccaggagagaatatttccctcacgtgcagctcagcacacatcccatttgatagattttcactggccaaggagggagaactttctctgccacagcaccaaagtggggaacacccggccaacttctctttgggtcctgtggacctcaatgtctcagggatctacaggtgctacggttggtacaacaggagcccctacctgtggtccttccccagtaatgccttggagcttgtggtcacagactccatccaccaagattacacgacgcagaacttgatccgcatggccgtggcaggactggtcctcgtggctctcttggccatactggttgaaaattggcacagccatacggcactgaacaaggaagcctcggcagatgtggctgaaccgagctggagccaacagatgtgtcagccaggattgacctttgcacgaacaccaagtgtctgcaagtaaacacctggaggtgaaggcagagaggagccaggactgtggagtccgacaaagctacttgaaggacacaagagagaaaagctcactaagaagcttgaatctacttttttttttttttgagacagagtctggctctgtcacccaggctgaagtgcagtggagcaatctcggctcattgaacctcttgggttcaagtgattcttgtgcctcagcctcccaagtagctggaattacaggcacataccactgcacccagctaatttttgtatttttagtagagatggggtttcactgtgttggccaggctggtctcgaactcctggacctcaggtgatccacccaccttggcctcccaaagtgctgagattataggcatgagccaccacgcctggccagatgcatgttcaaaccaatcaaatggtgttttcttatgcaggactgatcgatttgcacccacctttctgcacataagttatggttttccatcttatctgtcttctgattttttatatcctgtttaatttcttccttcattgttcttctctttttttatttattttatttatttttatttttatttttatttgagacagagtctcactctgttgcccaggaggcggaggttgcagtgaaccaagagatggcgccagtgcactccaccctgggtgacagagagactctttcttttt

SEQ ID NO: 59091 - DNA, 1490 bp, Homo sapiens
ggcacagatcttggaacgagacgacctgccgtgtcagcacgatggaccccaaacagaccaccctcctgtgtcttgtgctctgtctgggccagaggattcaggcacaggaaggggactttcccatgcctttcatatctgccaaatcgagtcctgtgattcccttggatggatctgtgaaaatccagtgccaggccattcgtgaagcttacctgacccagctgatgatcataaaaaactccacgtaccgagagataggcagaagactgaagttttggaatgagactgatcctgagttcgtcattgaccacatggacgcaaacaaggcagggcgctatcagtgccaatataggatagggcactacagattccggtacagtgacaccctggagctggtagtgacaggcttgtatggcaaacccttcctctctgcagatcggggtctggtgttgatgccaggagagaatatttccctcacgtgcagctcagcacacatcccatttgatagattttcactggccaaggagggagaactttctctgccacagcaccaaagtggggaacacccggccaacttctctttgggtcctgtggacctcaatgtctcagggatctacaggtgctacgactccatccaccaagattacacgacgcagaacttgatccgcatggccgtggcaggactggtcctcgtggctctcttggccatactggttgaaaattggcacagccatacggcactgaacaaggaagcctcggcagatgtggctgaaccgagctggagccaacagatgtgtcagccaggattgacctttgcacgaacaccaagtgtctgcaagtaaacacctggaggtgaaggcagagaggagccaggactgtggagtccgacaaagctacttgaaggacacaagagagaaaagctcactaagaagcttgaatctacttttttttttttttgagacagagtctggctctgtcacccaggctgaagtgcagtggagcaatctcggctcattgaacctcttgggttcaagtgattcttgtgcctcagcctcccaagtagctggaattacaggcacataccactgcacccagctaatttttgtatttttagtagagatggggtttcactgtgttggccaggctggtctcgaactcctggacctcaggtgatccacccaccttggcctcccaaagtgctgagattataggcatgagccaccacgcctggccagatgcatgttcaaaccaatcaaatggtgttttcttatgcaggactgatcgatttgcacccacctttctgcactccagcctgggccacagagcgagactccgtctcaaaagtaaacaaacaaataaataataaataaataaataaagggaaagtgccacaattttggatgaagggggttgagggactttacgtcaggtccaggacttggattacagagacacaatggggctagattcccagagatggataagattaaact

SEQ ID NO: 59092 - DNA, 1268 bp, Homo sapiens
ggcacagatcttggaacgagacgacctgccgtgtcagcacgatggaccccaaacagaccaccctcctgtgtcttgtgctctgtctgggccagaggattcaggcacaggaaggggactttcccatgcctttcatatctgccaaatcgagtcctgtgattcccttggatggatctgtgaaaatccagtgccaggccattcgtgaagcttacctgacccagctgatgatcataaaaaactccacgtaccgagagataggcagaagactgaagttttggaatgagactgatcctgagttcgtcattgaccacatggacgcaaacaaggcagggcgctatcagtgccaatataggatagggcactacagattccggtacagtgacaccctggagctggtagtgacagactccatccaccaagattacacgacgcagaacttgatccgcatggccgtggcaggactggtcctcgtggctctcttggccatactggttgaaaattggcacagccatacggcactgaacaaggaagcctcggcagatgtggctgaaccgagctggagccaacagatgtgtcagccaggattgacctttgcacgaacaccaagtgtctgcaagtaaacacctggaggtgaaggcagagaggagccaggactgtggagtccgacaaagctacttgaaggacacaagagagaaaagctcactaagaagcttgaatctacttttttttttttttgagacagagtctggctctgtcacccaggctgaagtgcagtggagcaatctcggctcattgaacctcttgggttcaagtgattcttgtgcctcagcctcccaagtagctggaattacaggcacataccactgcacccagctaatttttgtatttttagtagagatggggtttcactgtgttggccaggctggtctcgaactcctggacctcaggtgatccacccaccttggcctcccaaagtgctgagattataggcatgagccaccacgcctggccagatgcatgttcaaaccaatcaaatggtgttttcttatgcaggactgatcgatttgcacccacctttctgcactccagcctgggccacagagcgagactccgtctcaaaagtaaacaaacaaataaataataaataaataaataaagggaaagtgccacaattttggatgaagggggttgagggactttacgtcaggtccaggacttggattacagagacacaatggggctagattcccagagatggataagattaaact

SEQ ID NO: 59093 - DNA, 1454 bp, Homo sapiens
ggcacagatcttggaacgagacgacctgccgtgtcagcacgatggaccccaaacagaccaccctcctgtgtcttggggactttcccatgcctttcatatctgccaaatcgagtcctgtgattcccttggatggatctgtgaaaatccagtgccaggccattcgtgaagcttacctgacccagctgatgatcataaaaaactccacgtaccgagagataggcagaagactgaagttttggaatgagactgatcctgagttcgtcattgaccacatggacgcaaacaaggcagggcgctatcagtgccaatataggatagggcactacagattccggtacagtgacaccctggagctggtagtgacaggcttgtatggcaaacccttcctctctgcagatcggggtctggtgttgatgccaggagagaatatttccctcacgtgcagctcagcacacatcccatttgatagattttcactggccaaggagggagaactttctctgccacagcaccaaagtggggaacacccggccaacttctctttgggtcctgtggacctcaatgtctcagggatctacaggtgctacgactccatccaccaagattacacgacgcagaacttgatccgcatggccgtggcaggactggtcctcgtggctctcttggccatactggttgaaaattggcacagccatacggcactgaacaaggaagcctcggcagatgtggctgaaccgagctggagccaacagatgtgtcagccaggattgacctttgcacgaacaccaagtgtctgcaagtaaacacctggaggtgaaggcagagaggagccaggactgtggagtccgacaaagctacttgaaggacacaagagagaaaagctcactaagaagcttgaatctacttttttttttttttgagacagagtctggctctgtcacccaggctgaagtgcagtggagcaatctcggctcattgaacctcttgggttcaagtgattcttgtgcctcagcctcccaagtagctggaattacaggcacataccactgcacccagctaatttttgtatttttagtagagatggggtttcactgtgttggccaggctggtctcgaactcctggacctcaggtgatccacccaccttggcctcccaaagtgctgagattataggcatgagccaccacgcctggccagatgcatgttcaaaccaatcaaatggtgttttcttatgcaggactgatcgatttgcacccacctttctgcactccagcctgggccacagagcgagactccgtctcaaaagtaaacaaacaaataaataataaataaataaataaagggaaagtgccacaattttggatgaagggggttgagggactttacgtcaggtccaggacttggattacagagacacaatggggctagattcccagagatggataagattaaact

SEQ ID NO: 59094 - DNA, 1520 bp, Homo sapiens
ggcacagatcttggaacgagacgacctgccgtgtcagcacgatggaccccaaacagaccaccctcctgtgtcttggggactttcccatgcctttcatatctgccaaatcgagtcctgtgattcccttggatggatctgtgaaaatccagtgccaggccattcgtgaagcttacctgacccagctgatgatcataaaaaactccacgtaccgagagataggcagaagactgaagttttggaatgagactgatcctgagttcgtcattgaccacatggacgcaaacaaggcagggcgctatcagtgccaatataggatagggcactacagattccggtacagtgacaccctggagctggtagtgacaggcttgtatggcaaacccttcctctctgcagatcggggtctggtgttgatgccaggagagaatatttccctcacgtgcagctcagcacacatcccatttgatagattttcactggccaaggagggagaactttctctgccacagcaccaaagtggggaacacccggccaacttctctttgggtcctgtggacctcaatgtctcagggatctacaggtgctacggttggtacaacaggagcccctacctgtggtccttccccagtaatgccttggagcttgtggtcacagactccatccaccaagattacacgacgcagaacttgatccgcatggccgtggcaggactggtcctcgtggctctcttggccatactggttgaaaattggcacagccatacggcactgaacaaggaagcctcggcagatgtggctgaaccgagctggagccaacagatgtgtcagccaggattgacctttgcacgaacaccaagtgtctgcaagtaaacacctggaggtgaaggcagagaggagccaggactgtggagtccgacaaagctacttgaaggacacaagagagaaaagctcactaagaagcttgaatctacttttttttttttttgagacagagtctggctctgtcacccaggctgaagtgcagtggagcaatctcggctcattgaacctcttgggttcaagtgattcttgtgcctcagcctcccaagtagctggaattacaggcacataccactgcacccagctaatttttgtatttttagtagagatggggtttcactgtgttggccaggctggtctcgaactcctggacctcaggtgatccacccaccttggcctcccaaagtgctgagattataggcatgagccaccacgcctggccagatgcatgttcaaaccaatcaaatggtgttttcttatgcaggactgatcgatttgcacccacctttctgcactccagcctgggccacagagcgagactccgtctcaaaagtaaacaaacaaataaataataaataaataaataaagggaaagtgccacaattttggatgaagggggttgagggactttacgtcaggtccaggacttggattacagagacacaatggggctagattcccagagatggataagattaaact

SEQ ID NO: 59095 - DNA, 1455 bp, Homo sapiens
  misc_feature (1043)..(1044): n is a, c, g, or t
  misc_feature (1063)..(1063): n is a, c, g, or t
  misc_feature (1066)..(1066): n is a, c, g, or t
  misc_feature (1185)..(1185): n is a, c, g, or t
  misc_feature (1312)..(1312): n is a, c, g, or t
ggcacagatcttggaacgagacgacctgccgtgtcagcacgatggaccccaaacagaccaccctcctgtgtcttgtgctctgtctgggccagaggattcaggcacaggaaggggactttcccatgcctttcatatctgccaaatcgagtcctgtgattcccttggatggatctgtgaaaatccagtgccaggccattcgtgaagcttacctgacccagctgatgatcataaaaaactccacgtaccgagagataggcagaagactgaagttttggaatgagactgatcctgagttcgtcattgaccacatggacgcaaacaaggcagggcgctatcagtgccaatataggatagggcactacagattccggtacagtgacaccctggagctggtagtgacaggcttgtatggcaaacccttcctctctgcagatcggggtctggtgttgatgccaggagagaatatttccctcacgtgcagctcagcacacatcccatttgatagattttcactggccaaggagggagaactttctctgccacagcaccaaagtggggaacacccggccaacttctctttgggtcctgtggacctcaatgtctcagggatctacaggtgctacggttggtacaacaggagcccctacctgtggtccttccccagtaatgccttggagcttgtggtcacaggtaggtaccgcccagtccagccctgtgtctgggttggctgtccagggccttgccaccgggcaggaatatgaagacgtgcactgagagtgaagtgaagagaggcaaaggctctcactccaggacagtggagagagaaaggcttccccaccacactttccgctttcacttcctcgctagagtctccagacagggttcattgaaaacttagtctgtggagaaccagaagggctaactcagtttgtttcattttatttatttcattttattttccgggatagagtcttgctctttcgccaaggctggagtgcagtggcacgatctcgactcactgcaaccttcgcctcccaggttcnngcaattctcctgcctcagntcntgagtagctgggaccaccacagtttcaccatgttggccaggctggtctcgaactcccgacctcagtgatccacctgcctcggcctcccaaagtgctggattacaggcgtgagccaccgngcctggccaggctgcacacattcttattagattccaccttgttctggtgttgtagagatgtgattaggtatttagtgaattcaccaagtgaggagagaatgaaaagaaaacacaacctgcctggccnggcgtggtggcgtgagcctgtcgtcccagctactcaggaggctgaggcaggagaatcacttgaacccaggaggcagctgttgcagtgagccaagatcacgccattgcactccagcctgggttgacagaacgagactccacctc

SEQ ID NO: 59096 - DNA, 1229 bp, Homo sapiens
ggcacagatcttggaacgagacgacctgccgtgtcagcacgatggaccccaaacagaccaccctcctgtgtcttggcttgtatggcaaacccttcctctctgcagatcggggtctggtgttgatgccaggagagaatatttccctcacgtgcagctcagcacacatcccatttgatagattttcactggccaaggagggagaactttctctgccacagcaccaaagtggggaacacccggccaacttctctttgggtcctgtggacctcaatgtctcagggatctacaggtgctacggttggtacaacaggagcccctacctgtggtccttccccagtaatgccttggagcttgtggtcacagactccatccaccaagattacacgacgcagaacttgatccgcatggccgtggcaggactggtcctcgtggctctcttggccatactggttgaaaattggcacagccatacggcactgaacaaggaagcctcggcagatgtggctgaaccgagctggagccaacagatgtgtcagccaggattgacctttgcacgaacaccaagtgtctgcaagtaaacacctggaggtgaaggcagagaggagccaggactgtggagtccgacaaagctacttgaaggacacaagagagaaaagctcactaagaagcttgaatctacttttttttttttttgagacagagtctggctctgtcacccaggctgaagtgcagtggagcaatctcggctcattgaacctcttgggttcaagtgattcttgtgcctcagcctcccaagtagctggaattacaggcacataccactgcacccagctaatttttgtatttttagtagagatggggtttcactgtgttggccaggctggtctcgaactcctggacctcaggtgatccacccaccttggcctcccaaagtgctgagattataggcatgagccaccacgcctggccagatgcatgttcaaaccaatcaaatggtgttttcttatgcaggactgatcgatttgcacccacctttctgcactccagcctgggccacagagcgagactccgtctcaaaagtaaacaaacaaataaataataaataaataaataaagggaaagtgccacaattttggatgaagggggttgagggactttacgtcaggtccaggacttggattacagagacacaatggggctagattcccagagatggataagattaaact

SEQ ID NO: 59097 - DNA, 1095 bp, Homo sapiens
ggcacagatcttggaacgagacgacctgccgtgtcagcacgatggaccccaaacagaccaccctcctgtgtcttggggactttcccatgcctttcatatctgccaaatcgagtcctgtgattcccttggatggatctgtgaaaatccagtgccaggccattcgtgaagcttacctgacccagctgatgatcataaaaaactccacgtaccgagagataggcagaagactgaagttttggaatgagactgatcctgagttcgtcattgaccacatggacgcaaacaaggcagggcgctatcagtgccaatataggatagggcactacagattccggtacagtgacaccctggagctggtagtgacaggcttgtatggcaaacccttcctctctgcagatcggggtctggtgttgatgccaggagagaatatttccctcacgtgcagctcagcacacatcccatttgatagattttcactggccaaggagggagaactttctctgccacagcaccaaagtggggaacacccggccaacttctctttgggtcctgtggacctcaatgtctcagggatctacaggtgctacggttggtacaacaggagcccctacctgtggtccttccccagtaatgccttggagcttgtggtcacaggtaggtaccgcccagtccagccctgtgtctgggttggctgtccagggccttgccaccgggcaggaatatgaagacgtgcactgagagtgaagtgaagagaggcaaaggctctcactccaggacagtggagagagaaaggcttccccaccacactttccgctttcacttcctcgctagagtctccagacagggttcattgaaaacttagtctgtggagaaccagaagggctaactcagtttgtttcattttatttatttcattttattttccgggatagagtcttgctctttcgccaaggctggagtgcagtggcacgatctcgactcactgcaaccttcgcctcccaggagaatcacttgaacccaggaggcagctgttgcagtgagccaagatcacgccattgcactccagcctgggttgacagaacgagactccacctc

SEQ ID NO: 59098 - DNA, 1345 bp, Homo sapiens
ggcacagatcttggaacgagacgacctgccgtgtcagcacgatggaccccaaacagaccaccctcctgtgtcttgtgctctgtctgggccagaggattcaggcacaggaagggaggtatattagcgagcatttttggtgtagaagtttgggctgcaatccggtaaatgatgcttcagcacaacggccagggactttcccatgcctttcatatctgccaaatcgagtcctgtgattcccttggatggatctgtgaaaatccagtgccaggccattcgtgaagcttacctgacccagctgatgatcataaaaaactccacgtaccgagagataggcagaagactgaagttttggaatgagactgatcctgagttcgtcattgaccacatggacgcaaacaaggcagggcgctatcagtgccaatataggatagggcactacagattccggtacagtgacaccctggagctggtagtgacagactccatccaccaagattacacgacgcagaacttgatccgcatggccgtggcaggactggtcctcgtggctctcttggccatactggttgaaaattggcacagccatacggcactgaacaaggaagcctcggcagatgtggctgaaccgagctggagccaacagatgtgtcagccaggattgacctttgcacgaacaccaagtgtctgcaagtaaacacctggaggtgaaggcagagaggagccaggactgtggagtccgacaaagctacttgaaggacacaagagagaaaagctcactaagaagcttgaatctacttttttttttttttgagacagagtctggctctgtcacccaggctgaagtgcagtggagcaatctcggctcattgaacctcttgggttcaagtgattcttgtgcctcagcctcccaagtagctggaattacaggcacataccactgcacccagctaatttttgtatttttagtagagatggggtttcactgtgttggccaggctggtctcgaactcctggacctcaggtgatccacccaccttggcctcccaaagtgctgagattataggcatgagccaccacgcctggccagatgcatgttcaaaccaatcaaatggtgttttcttatgcaggactgatcgatttgcacccacctttctgcactccagcctgggccacagagcgagactccgtctcaaaagtaaacaaacaaataaataataaataaataaataaagggaaagtgccacaattttggatgaagggggttgagggactttacgtcaggtccaggacttggattacagagacacaatggggctagattcccagagatggataagattaaact

SEQ ID NO: 59099 - DNA, 1567 bp, Homo sapiens
ggcacagatcttggaacgagacgacctgccgtgtcagcacgatggaccccaaacagaccaccctcctgtgtcttgtgctctgtctgggccagaggattcaggcacaggaagggaggtatattagcgagcatttttggtgtagaagtttgggctgcaatccggtaaatgatgcttcagcacaacggccagggactttcccatgcctttcatatctgccaaatcgagtcctgtgattcccttggatggatctgtgaaaatccagtgccaggccattcgtgaagcttacctgacccagctgatgatcataaaaaactccacgtaccgagagataggcagaagactgaagttttggaatgagactgatcctgagttcgtcattgaccacatggacgcaaacaaggcagggcgctatcagtgccaatataggatagggcactacagattccggtacagtgacaccctggagctggtagtgacaggcttgtatggcaaacccttcctctctgcagatcggggtctggtgttgatgccaggagagaatatttccctcacgtgcagctcagcacacatcccatttgatagattttcactggccaaggagggagaactttctctgccacagcaccaaagtggggaacacccggccaacttctctttgggtcctgtggacctcaatgtctcagggatctacaggtgctacgactccatccaccaagattacacgacgcagaacttgatccgcatggccgtggcaggactggtcctcgtggctctcttggccatactggttgaaaattggcacagccatacggcactgaacaaggaagcctcggcagatgtggctgaaccgagctggagccaacagatgtgtcagccaggattgacctttgcacgaacaccaagtgtctgcaagtaaacacctggaggtgaaggcagagaggagccaggactgtggagtccgacaaagctacttgaaggacacaagagagaaaagctcactaagaagcttgaatctacttttttttttttttgagacagagtctggctctgtcacccaggctgaagtgcagtggagcaatctcggctcattgaacctcttgggttcaagtgattcttgtgcctcagcctcccaagtagctggaattacaggcacataccactgcacccagctaatttttgtatttttagtagagatggggtttcactgtgttggccaggctggtctcgaactcctggacctcaggtgatccacccaccttggcctcccaaagtgctgagattataggcatgagccaccacgcctggccagatgcatgttcaaaccaatcaaatggtgttttcttatgcaggactgatcgatttgcacccacctttctgcactccagcctgggccacagagcgagactccgtctcaaaagtaaacaaacaaataaataataaataaataaataaagggaaagtgccacaattttggatgaagggggttgagggactttacgtcaggtccaggacttggattacagagacacaatggggctagattcccagagatggataagattaaact

SEQ ID NO: 59100 - DNA, 1309 bp, Homo sapiens
ggcacagatcttggaacgagacgacctgccgtgtcagcacgatggaccccaaacagaccaccctcctgtgtcttgggaggtatattagcgagcatttttggtgtagaagtttgggctgcaatccggtaaatgatgcttcagcacaacggccagggactttcccatgcctttcatatctgccaaatcgagtcctgtgattcccttggatggatctgtgaaaatccagtgccaggccattcgtgaagcttacctgacccagctgatgatcataaaaaactccacgtaccgagagataggcagaagactgaagttttggaatgagactgatcctgagttcgtcattgaccacatggacgcaaacaaggcagggcgctatcagtgccaatataggatagggcactacagattccggtacagtgacaccctggagctggtagtgacagactccatccaccaagattacacgacgcagaacttgatccgcatggccgtggcaggactggtcctcgtggctctcttggccatactggttgaaaattggcacagccatacggcactgaacaaggaagcctcggcagatgtggctgaaccgagctggagccaacagatgtgtcagccaggattgacctttgcacgaacaccaagtgtctgcaagtaaacacctggaggtgaaggcagagaggagccaggactgtggagtccgacaaagctacttgaaggacacaagagagaaaagctcactaagaagcttgaatctacttttttttttttttgagacagagtctggctctgtcacccaggctgaagtgcagtggagcaatctcggctcattgaacctcttgggttcaagtgattcttgtgcctcagcctcccaagtagctggaattacaggcacataccactgcacccagctaatttttgtatttttagtagagatggggtttcactgtgttggccaggctggtctcgaactcctggacctcaggtgatccacccaccttggcctcccaaagtgctgagattataggcatgagccaccacgcctggccagatgcatgttcaaaccaatcaaatggtgttttcttatgcaggactgatcgatttgcacccacctttctgcactccagcctgggccacagagcgagactccgtctcaaaagtaaacaaacaaataaataataaataaataaataaagggaaagtgccacaattttggatgaagggggttgagggactttacgtcaggtccaggacttggattacagagacacaatggggctagattcccagagatggataagattaaact

SEQ ID NO: 59101 - DNA, 1232 bp, Homo sapiens
ggcacagatcttggaacgagacgacctgccgtgtcagcacgatggaccccaaacagaccaccctcctgtgtcttggggactttcccatgcctttcatatctgccaaatcgagtcctgtgattcccttggatggatctgtgaaaatccagtgccaggccattcgtgaagcttacctgacccagctgatgatcataaaaaactccacgtaccgagagataggcagaagactgaagttttggaatgagactgatcctgagttcgtcattgaccacatggacgcaaacaaggcagggcgctatcagtgccaatataggatagggcactacagattccggtacagtgacaccctggagctggtagtgacagactccatccaccaagattacacgacgcagaacttgatccgcatggccgtggcaggactggtcctcgtggctctcttggccatactggttgaaaattggcacagccatacggcactgaacaaggaagcctcggcagatgtggctgaaccgagctggagccaacagatgtgtcagccaggattgacctttgcacgaacaccaagtgtctgcaagtaaacacctggaggtgaaggcagagaggagccaggactgtggagtccgacaaagctacttgaaggacacaagagagaaaagctcactaagaagcttgaatctacttttttttttttttgagacagagtctggctctgtcacccaggctgaagtgcagtggagcaatctcggctcattgaacctcttgggttcaagtgattcttgtgcctcagcctcccaagtagctggaattacaggcacataccactgcacccagctaatttttgtatttttagtagagatggggtttcactgtgttggccaggctggtctcgaactcctggacctcaggtgatccacccaccttggcctcccaaagtgctgagattataggcatgagccaccacgcctggccagatgcatgttcaaaccaatcaaatggtgttttcttatgcaggactgatcgatttgcacccacctttctgcactccagcctgggccacagagcgagactccgtctcaaaagtaaacaaacaaataaataataaataaataaataaagggaaagtgccacaattttggatgaagggggttgagggactttacgtcaggtccaggacttggattacagagacacaatggggctagattcccagagatggataagattaaact

SEQ ID NO: 59102 - DNA, 661 bp, Homo sapiens
ggcacagatcttggaacgagacgacctgccgtgtcagcacgatggaccccaaacagaccaccctcctgtgtcttgtgctctgtctgggccagaggattcaggcacaggaaggggactttcccatgcctttcatatctgccaaatcgagtcctgtgattcccttggatggatctgtgaaaatccagtgccaggccattcgtgaagcttacctgacccagctgatgatcataaaaaactccacgtaccgagagataggcagaagactgaagttttggaatgagactgatcctgagttcgtcattgaccacatggacgcaaacaaggcagggcgctatcagtgccaatataggatagggcactacagattccggtacagtgacaccctggagctggtagtgacaggcttgtatggcaaacccttcctctctgcagatcggggtctggtgttgatgccaggagagaatatttccctcacgtgcagctcagcacacatcccatttgatagattttcactggccaaagatccatccaagggaatcacaggactcgatttggcagatatgaaaggcatgggaaagtccccttcctgtgcctgaatctctctggcccacacagagcacaagacacaggtgggctgtctgtttggggtccatctgtgtgt

SEQ ID NO: 59103 - DNA, 571 bp, Homo sapiens
ggcacagatcttggaacgagacgacctgccgtgtcagcacgatggaccccaaacagaccaccctcctgtgtcttgtgctctgtctgggccagaggattcaggcacaggaaggggactttcccatgcctttcatatctgccaaatcgagtcctgtgattcccttggatggatctgtgaaaatccagtgccaggccattcgtgaagcttacctgacccagctgatgatcataaaaaactccacgtaccgagagataggcagaagactgaagttttggaatgagactgatcctgagttcgtcattgaccacatggacgcaaacaaggcagggcgctatcagtgccaatataggatagggcactacagattccggtacagtgacaccctggagctggtagtgacaggcttgtatggcaaacccttcctctctgcagatcggggtctggtgttgatgccaggagagaatatttccctcacgtgcagctcagcacacatcccatttgatagattttcactggccaagctctgtcttgctctagcgccaaagttgtgaccagccgtgcgctcgttccg

SEQ ID NO: 59104 - DNA, 402 bp, Homo sapiens
aagcttgatttttcataaatctctctcttccagtgctctgtctgggccagaggattcaggcacaggaaggtaagtgtcctgtaaatctctcccagcccctttagaccctcttgggagctctaggataaagaaattgaagaatagcctgaagcaccattcttattttaatccccattctagttgtttctgctgtgcttctcttgcataatttctatctcactttgttatctccaaacccttcagactcattaatgctcaggcctggatttatagttagtccttgcctgtgttagactgtccatgaaggatctgtaatttactgaatgctcaaactgcaagaatgaggaagtcaggagtcatctgcccaatatccttccttatgctgattctattttgttttag

SEQ ID NO: 59105 - DNA, 506 bp, Homo sapiens
aggcgctcaagtccatcaggagggaaccagcccatccacgtggaggtgttgaagagtcaggagcccgcgcacaggaggctgcctgggtttgaatcctggcaagttttaaactcactaagcctcagttattccatctgcaacagaacctgcctccctgggattgctgggaagattcagggagaaaacttgggtcaagccattggctcccaaataagcaaatcctccacaggggaagtccccaggctcgggctggagcccagggaggtgcggaccccaggggaggtcagaggcaaccctcacacaggactgttccacgttctgtttctgtaacgcgggggccttcgcgcccgtctgcctgtgcacctgcgaactaattctgagcaactgtgcgctccctggcactttctgaagtcaaaatctgaacatttccaagtttaaatagttgcaaagagtatgatttccaaaatcatgtcaatattgccatcctaaaataaaagtgtgacatc

SEQ ID NO: 59106 - DNA, 904 bp, Homo sapiens
gtggaaaaatgcaataatatgttaatatagtatggtagtttgagagaatcaggtaggtgctactagacacattgaaactagaataggtttataaactgttcatatctttcaatgcataatctttagaaagactccacaaagcaaaattcatcctgttagtacaaaatggaaaggttcttattacagaagtaagttgtacaaactgcatcatcaattactatgtaaagcctaatttcaggatgcacttacaaaattgctactcttcatcgatgccgtatttacatccctcttcatttcatctatattctacttggctccaacaactaaattgttgcctaaataactcaatcattatttatagcactgtaaaattagaaatccaaaattggttgcatttcatgatttttgactcttttaacccttcagagtaatataaaatctcattagaactcttataaaaccagttagctaaaacaactagattattatactagttataaatgctggtatattataatttgtgggatctaattaaatgtttgcctattaaatatagtttgatttaaatgagacaccatgttctgaactggagaaaacaatatcaatgaagtcatattttcatacctttaaaaattatttaattttcaaccaaacaaaaaataaattgtaaaaattatgctcatttctattccaacaagtcagaaaataatgacataatatttctaaatgagaatgatgtcaatttcattgtctggaacatgcacacttgtgtgcacatagagtcaatttctgtctcttctaagtgagcacagtaggtagggaactcaatggaagcagtgtgcacacacacacacccttagtagaatatggagcattattctttaccaaaagtagctattctctg

SEQ ID NO: 59107 - DNA, 184 bp, Homo sapiens
atgatatctagactaccagtattttttgaatgaggctttcttaggagtatgttgatgcactctcatcctttcctccctggactcctaccacaaccctctgactgtggaatagcatggttgtgtgtaaggctggagcacaggcacagtgagatgaggatgagggattgagggatgctataagcca

SEQ ID NO: 59108 - DNA, 645 bp, Homo sapiens
ttttcaggaaatgggcctcacctcttttcttcctgtcaccctggtagttttgagtcaatgctgagcatacatgcagttttatcttgcgccccacattactttgcatatggcctcaaatgtcccttattttacactggtctttgatatatttatggtgtacatacatatcagaaactttttttttaatcacaattccttatggacttaattatcacattatgacatgaaattaccaattttaggtctcttttttccctaggcgtgttgaggatcactagagtaacatcttggaaggtgccaagtagtagagttttatggactgagtttattcttaccagggtgttgcaaagaccttactcctggattgcaactatcttaccatttcccagcattccctcttgactttcttttttgcagatcctgtacctcattcctcttctccttactttcgttaacattctgttaccataagtgcatttttaaaataccaacctttcaccatccatccacagccaattttagtcagtagtcatagagggataatgagtctctaatgtcatgacagttacacatttctaaatgtagcatgaaatagttggaaagtagtatcttattaggcaaacagaagtgatagtttttggatgt

SEQ ID NO: 59109 - DNA, 544 bp, Homo sapiens
gtggagcagtcagaacacacacaacatttattaagtctgaagtcttatatgggcatggcttgtggcaccccaaaaataataacaatagtaacaaagatcacgggacacagatcagttaacagagagagtaatgaaaaaaattcaaaataatgtgagaattaccaaaatgtgacacagagacatgaagcaagcacaagccgacggaaaaatggtgccaatagtctcgctcgaagcagggttgccacaaaccttccatgtgttgaagatgaagatgcagtaaaatgaggcatgcctgtgcccacacacctggcctgtgaagtctcctgactcagtcacttcagagacaaacatgggggcctgttacaatcctcattttcttataaacaaaacaatcatgatttgcctggagaagagaaaggaaactaaccttactgattgccaagagctacatactaggcttttttcttcatgttgtctactttaatcctaatttagcattatctttttatttttagaaagtaagaaaatatgattgactgctttg

SEQ ID NO: 59110 - DNA, 496 bp, Homo sapiens
tcgattaccaacttgtgctgattttatcttcaaatactctccagaattgtcgctgtcatggactgaatatttgtgttcccccaaattcatatgtcctaatccctgatgtgactgtatttagagacgtgacctctaaggagtaattaaggttcagtgaggtcaaaggtggagccctgatctgataggatcagtgtccttataagaagagactagagctgggcacaggggctcacacctgtaatcccagtattttgggaggctgaggtgggaagatcactcaaggagaggagtctgagaccagcctgggcaacagagtgagactccatctctacaagaaaataaaatagtcagacacagtggtacacacctgtggtcccagctcctcaggaggctgaggcaggaggatggcttgagcccaggaatttgaggctgcagcaagctatgatcacacctctgcactccagcctgggtgacagcatgagacccagtctcttta

SEQ ID NO: 59111 - DNA, 324 bp, Homo sapiens
ttgaaggaagcttagaatgtatttgaactgaattaaggcaaaagcaactcgcttttcaagatttttttttttcctaagtagcaaagtaaacaaagctgcactgaggccagatgtgctttctggttgtgaatatttgtactctagaacctcattctggtatgaatcagcagagtggaatctagtatggacacaggctgtctcaaattccatccactggatatgagtggccaagaaagcagtcggacccatactgctggtgctgtagcaaggttcgggtggttcctctgcagcctcaggtctctcccactgcggcctccatgtgtt

SEQ ID NO: 59112 - DNA, 438 bp, Homo sapiens
tcaaaccctggttgaccgtgggtaactgaaactgcagaaatggaaaccgtggataaggggggactattgtaatagcaaatggttgctgacagaggaagaggtgtaatgtaaaagaagtttctttttctcctctcttcttaatccatagcaatggagagtgaaaggagaatcacttctatttccatttcaattgtatcaattctccctggtgagaatttgcataatggttggggatttcattaaagatatctccctaggaaactagatagctatggattttgatgacttctattaccaaagagagattctgttctcaggcccaatttcaggggcagaggatgatgaggggctgaacacaggcttttaagaaatcaattcaggagtctttatagattgatcagaatcccaatagtttattgatttttactctgaaataat

SEQ ID NO: 59113 - DNA, 530 bp, Homo sapiens
cccatctcagggaaaaaacaagaaatgctgtaactttatatttcatcgtattgcactctaattttcaaaagcttgacaatgcattcatttataggcgtctactattttaactagaatttcagaacatttaaagtaggcatgagctgtgcgttaaatgtttctgaggtgtgaatttacaaaagtagcttatattagtggagctgtagaatattgttttttctccaggaagccaccaggaaccatatattgtgtgctggagcttgtggctctttccgagctcacagtgttgacagctgatgcatttcagtgcgtgtaacatcccgtgtttctcagctggctcaatcgcatgtcagtttcttctgatttgtgtaatggattagtgagaataacctcatgaagcatctgcatgttgaatcttaatgcacaaaggcccatgtagcaggcagtatgttcctcaacagctgactgagggctccaaggaagctttactgacaccatgactaggtttgtcgtggctcgtaccctttgaa

SEQ ID NO: 59114 - DNA, 445 bp, Homo sapiens
tgaggcaggcttggggcccaacctaagccctgggccggtcagggctccctctgtggctctgccgaggtcccaaccactgcatttagtggatctcgccatgtggctctgctcatcttcttaagttttgggggttacatttgggattcttagaaatgctttttctggctgggcacagtggctcacacctgtaatcccagcactttgtgaggccaacacgtgtggatcgcctgagggcaggagtttgagaccatcctggccaacatggtaaaaccccatctctactaaaaatacaaaaattagccaggtgtggtgtcgagcgtctgtaatctcagctactcaggaggctgaggcaggagaatcgcttgatcccaggaggtggaggttgcagtgagctgagattgcgccactgcactcagcctgggcaacaagagtgagactccatctc

SEQ ID NO: 59115 - DNA, 274 bp, Homo sapiens
caacctctgcctcccgagttcaagcgattctcctgcctcccgagtaggtgggattacaggcatgatccatcacgcccaactaattttgtatttttagtagagatggggtttctccgtgttggtcaggctggtctcgagctctcgacctcaggtgattcacccacctcggcctcccaaagtgttgggattacaggtgtgagccaccgcgccaggctactggtctcaattcttttggatacccagaagcagaaatgctggatcacatggtagtctc

SEQ ID NO: 59116 - DNA, 524 bp, Homo sapiens
ttcaaggctgggcatcagggaacagaggaatacctatttgccaaatggaagtagttgaaatcaggatggaaggaaaataattttatttttatggtcttaagagggctttataaacaatgaaggttttaattaaaacaaaaaaccattcaataaacgtgtctggggatatccgcctaagagttatgtgacccaggggacgtggtctgtgggttagatatgagtttaactaggtatgttttagagtcattgatagactctgattatcaagaaaggaaacatcctgccaagcccgtcctttccttacttccctatctccattgtccctaaggaggggggccggagagccagggatgaagtaggcaggtactggaaaattactatttttgttgccaagtatattatatacaaaaataggttaaccttttctgggagggcatggccctgacacatttccttctggtattctagaaatgtgtctttcctcttcttctggcagccttcagcaacttaagttttgaggattt

SEQ ID NO: 59117 - DNA, 410 bp, Homo sapiens
agatattctcattgttaatgagaaggacctacacttgcagtttgcagatgctgccaccaatgtttaggagccatgactacaaagcagagagctaaaatttaatcatgcttccagttaccttccccagggctcagaagaagcaagaagcagagtcacaaatgggaatccaggagatcatataaaggcacactggggtaaggcatgctgaagcatgagagaaataaatttccttgaggttataaaaagactggactacagtggtagctttgagttttggcagttctcttctgcaccttacaaaacaggaatggaagaaatttgctagctggttacccttgctctgcccagatgtaaataagtcagtgaaggtagtaacgatactgtggttacaaaccaggaatcagacagcc

SEQ ID NO: 59118 - DNA, 496 bp, Homo sapiens
ctaatcctcaagacaactatgagactgatactactattatacccattttaaagattagaaacctaggcacagagaagctcattaaattgttgagcattacagacatgacaggaggggccctgaacacaaacccagggtaccagaaagagatcctgaaactggtgatggcttctgagacctactagatgagttggaaacccggaggctggatattacaagggcactcagggcagggagaagagagggaagagagagcagggaggagcagacacagctgacatggctgggggagaaccccaccccattgaagctcaggtacacggggcctactgaagtctgtgagcaaacttacttgcccacagggtgggcaggattgccgagggccagcccaattccaggccatcaggtgtgcagaccccgctgaaggactgcagaaaacatggaaaggaactctgctggactccgggcctccaaatgagtaccagacagcaaatgt

SEQ ID NO: 59119 - DNA, 4679 bp, Homo sapiens
  misc_feature (143)..(144): n is a, c, g, or t
agcggggggggggatggagaggggaggggggagcggagccgagcggagacagccgcggcgctgcagagcggctggggcggcggcgcggctcccggtgctccccccggcgcgcgccccgagtcggtgagggcccggctctgcgnnccccggagccatgggctgcatcggctcccggactgtggggaatgaggtgattgcagtggattggaagggcctgaaggatgtcgatcaaatcaacatggacagcaccagctcactgcacgggagcagcctccatcggccatcgactgagcaaactcgaactgatttctcctgggacggcatcaacgcactgtgagcactcacgttctcaacctgtgccccagttttccagagcactggggatatatccctccttgggactcttggctctccatggaggacaccacttccattcttccgaagcttaagcgaaactctaacgcctatggcattggggccctggccaagtcatcattctcagggatctcacggagcatgaaggaccatgtgacaaagcccacagccatggggcaaggccgggtggcccacatgattgagtggcagggctgggggaagacaccagctgttcagccacaacacagccatgagtccgtgcgcagggatacggatgcctactccgacctcagcgatggcgagaaggaggcacgttttctagcaggcgtcatggagcagtttgctatctctgaggccacactcatggcctggtcttccatggatggtgaggacatgagtgtgaactccacccaggagccattgggctgcaactacagtgacaactaccaggaactgatggacagtcaggatgccctggctcaagcacccatggatggatggcctcactcttacgtgtcccagggtatgtactgtctggggtcgtcagatgcctgggaagccagcgatcagtccctcattgcctctccggccacaggatcctatcttgggcctgcatttgatgactcacaacccagcttgcatgaaatgggaccttcccaaccagcttcaggatactctgctctggagcctccacctttgctggggggagacactgactgggctccgggggtaggcgcagtggacctggcaaggggccctgctgaggaggagaagaggccattggcacctgaggaggaagaggatgcgggatgccgggacctggagtcactttccccacgagaagaccctgagatgtctaccgctctcagccggaaggtgtctgacgtcacatcctcaggtgtgcagtcctttgatgaggaggaaggcgaggccaacaactagtttcctcccccaatgccctgccttccactcccacctgagggccatggctgtgacccataccctccctccccccagcagtacagctgaaactgggcagacaacattggggaacccaggagcttccagtcctctcctggaaatggaggaccaggatgggattttatccaggcttacactctagaaacccacaggcctgggaactgagacctgggcaactagatggccgtgagcttggtgtggctgtggagaaggacctgggctgtgggcttctgggtctgtgccgacaaagcctccagtgtgtgcaccctgaggacgggggcagcgcagctgtgctcaagactggatctcagttcttcacgccccgatttcgtcttccaggagccgtaactctgctgtctgaatgcctcctttctccatttcactcttgcttttcccaactctgttttctctggctgtggccccagctcatccctactgagagaacagacctcaggggctgttggacatggctggacaggcgcaggggaggctgcctgaagggcacgtccatggggagggtggagaggctgcctcagcaggtcatttggcttctgagatcaggagtcgaggaggaggtggatgtggcagctgagatctacagggggcacggatgtggttctttctatcaaggcctgcccggagacaagagagtcactgaggagactaagaacaaacacagccccttgctctgggatctttaatatcccatggctaaaaggaagatcctaaggatctgggaaaagacccagccagggctggctgctccagctcttgcttccctttcagctttcttccatccctgctccgggagcctgaggagggtgtggggacacccatcttggatacaccaacgcaggatgcaggtgtcgccaacagcagggggagcatgagggctgtctccccttattcacccctgtcctctgaagctgtttacacttttctctttgccttttctacatttttataacttcttgggcactcagggttgagtggagtggagggaggagtccggtgctgtcactccctcagccaggcagggttgcagctgagggccagggtgggcactcggcactttctgccccttcttcagctcctcccaggactcccaaacagcctcacagctgtcctccctgcctccccaggcctcctaccagaggaagagaggaaaatcagcggattcttccttccaggatggtgtatggtgaggcacaagcttgccctcccacacttggcatccatgctggtggggactgagcagcatatgcgccccagcactaccgtgagagcacaggcagaggatgggcggagcaaagcagcggtgctgtggggttggagagcacttggccctgccactgcccaggtagcccctccccagcccttggcacaggcagagttcgggtaggagagagaggcctaagaggctcactgccctatctccttctttcctcacgcccttccaaggctccggctcccaggcctgtgtcctacccacactctgtcaggagtcctaccacttgcatcctctgctggaagggagcactgttgtcctctcctggccctgggcacaaactttgccctcacccccaggccccagaacttattattttggagtgagaaggttgagagttggggtgtttctgtccatctatggtcctgtcccgccatcaagttcatactctcttactcacacttctgggatgcaagcagggcagggggttctgtgtcttccatggaagggggacaatggttatcctgaggttggtttttggaggaaacatgggcgtaggcaaggtgaaccaaggcaggtgcagtcacctaaccgaatgctgcctgtacaggggaagagtcctcttgtgcttgctaacgtgtgctgactccatgtcccaggacctcatttccaggagctctgagaggtggtctagcatgcccgccctggcagctattccccacccgtctcctgctgcaggctctggggttttgcatgttcatgtgaccttccttccatggggtccctggttcctcaccttctccaatgtgtgctattcccacatcacctcttcctgtcgtctcatcctctcagtgcccatatcatacccccagaccacggtggacagctcacctagtgagtgcgttcattcattacagttcgtttttgctcaggcccgggggagttaggaaaggtagaccacagcagctttcgttcctccttccctttcccaaggaagccaaatggtccctgacaaaagatgactaaagatctgaaggactctagcagggttcatacatgaacctgctttccccagggtgctggcatattgctgcagatggaagtcaggtgggggtctgtcttctgcaaggagctcctactcgctctgaagagggagactgaggagctggcctgggaccatcttaggactcttctggtgctgggggcagggtgcatgggggttgcttatcgtctatttcagggggtggggaggggcatgtgcaggaagaggctgtttcggggtgggaaagggttgcttttcctttggggttaaggctgtgcagcacgttttacagcagtcctggaacagggctgtttttatattcttgtgaatgaaactgctcttgctaaatgattttctttttttggagggggggtgcactttcattttcaattgactttattaaatgaaaatccaaatcttccactcctccccctccattgtcccctcccccaccacacaccttccttcttgtccttgtgttgaagagggtatcttggggaatgagtttattatcttctccacgacctcacctatacatcccacacaccatcctccaggtctgggaaatatccatttttctggccagtcttagcatgttttcttaatgtcacattcccacgccaggcccaagagagattctatgacatatattatagagagaattctatatcaatatatataaatattagagattatgtacacaagggcatgggctcaaatgcccactgccagtcccccacccaggcttcagcatctctcttggcctggggaagtgggagggatgtgatgctggagaaggctacaggctgtgttcaatgacactaaacagaatgtggtggcaaaaaaaaaaaattctcctaaacttacccaactactatcctttctaaccctacctctctaatctctctaatttctccttattatatatctccctcccctaaaaaattcaatggccggcttttaaccccgttctgacttggcccttgggtgtccccaaccttaacgcccttgtgagcacaatcccctttttccccgcgttggttcaccggggcg

SEQ ID NO: 59120 - DNA, 4599 bp, Homo sapiens
  misc_feature (143)..(144): n is a, c, g, or t
agcggggggggggatggagaggggaggggggagcggagccgagcggagacagccgcggcgctgcagagcggctggggcggcggcgcggctcccggtgctccccccggcgcgcgccccgagtcggtgagggcccggctctgcgnnccccggagccatgggctgcatcggctcccggactgtggggaatgaggtgattgcagtggattggaagggcctgaaggatgtcgatcaaatcaacatggacagcaccagctcactgcacgggagcagcctccatcggccatcgactgagcaaactcgaactgatttctcctgggacggcatcaacctctccatggaggacaccacttccattcttccgaagcttaagcgaaactctaacgcctatggcattggggccctggccaagtcatcattctcagggatctcacggagcatgaaggaccatgtgacaaagcccacagccatggggcaaggccgggtggcccacatgattgagtggcagggctgggggaagacaccagctgttcagccacaacacagccatgagtccgtgcgcagggatacggatgcctactccgacctcagcgatggcgagaaggaggcacgttttctagcaggcgtcatggagcagtttgctatctctgaggccacactcatggcctggtcttccatggatggtgaggacatgagtgtgaactccacccaggagccattgggctgcaactacagtgacaactaccaggaactgatggacagtcaggatgccctggctcaagcacccatggatggatggcctcactcttacgtgtcccagggtatgtactgtctggggtcgtcagatgcctgggaagccagcgatcagtccctcattgcctctccggccacaggatcctatcttgggcctgcatttgatgactcacaacccagcttgcatgaaatgggaccttcccaaccagcttcaggatactctgctctggagcctccacctttgctggggggagacactgactgggctccgggggtaggcgcagtggacctggcaaggggccctgctgaggaggagaagaggccattggcacctgaggaggaagaggatgcgggatgccgggacctggagtcactttccccacgagaagaccctgagatgtctaccgctctcagccggaaggtgtctgacgtcacatcctcaggtgtgcagtcctttgatgaggaggaaggcgaggccaacaactagtttcctcccccaatgccctgccttccactcccacctgagggccatggctgtgacccataccctccctccccccagcagtacagctgaaactgggcagacaacattggggaacccaggagcttccagtcctctcctggaaatggaggaccaggatgggattttatccaggcttacactctagaaacccacaggcctgggaactgagacctgggcaactagatggccgtgagcttggtgtggctgtggagaaggacctgggctgtgggcttctgggtctgtgccgacaaagcctccagtgtgtgcaccctgaggacgggggcagcgcagctgtgctcaagactggatctcagttcttcacgccccgatttcgtcttccaggagccgtaactctgctgtctgaatgcctcctttctccatttcactcttgcttttcccaactctgttttctctggctgtggccccagctcatccctactgagagaacagacctcaggggctgttggacatggctggacaggcgcaggggaggctgcctgaagggcacgtccatggggagggtggagaggctgcctcagcaggtcatttggcttctgagatcaggagtcgaggaggaggtggatgtggcagctgagatctacagggggcacggatgtggttctttctatcaaggcctgcccggagacaagagagtcactgaggagactaagaacaaacacagccccttgctctgggatctttaatatcccatggctaaaaggaagatcctaaggatctgggaaaagacccagccagggctggctgctccagctcttgcttccctttcagctttcttccatccctgctccgggagcctgaggagggtgtggggacacccatcttggatacaccaacgcaggatgcaggtgtcgccaacagcagggggagcatgagggctgtctccccttattcacccctgtcctctgaagctgtttacacttttctctttgccttttctacatttttataacttcttgggcactcagggttgagtggagtggagggaggagtccggtgctgtcactccctcagccaggcagggttgcagctgagggccagggtgggcactcggcactttctgccccttcttcagctcctcccaggactcccaaacagcctcacagctgtcctccctgcctccccaggcctcctaccagaggaagagaggaaaatcagcggattcttccttccaggatggtgtatggtgaggcacaagcttgccctcccacacttggcatccatgctggtggggactgagcagcatatgcgccccagcactaccgtgagagcacaggcagaggatgggcggagcaaagcagcggtgctgtggggttggagagcacttggccctgccactgcccaggtagcccctccccagcccttggcacaggcagagttcgggtaggagagagaggcctaagaggctcactgccctatctccttctttcctcacgcccttccaaggctccggctcccaggcctgtgtcctacccacactctgtcaggagtcctaccacttgcatcctctgctggaagggagcactgttgtcctctcctggccctgggcacaaactttgccctcacccccaggccccagaacttattattttggagtgagaaggttgagagttggggtgtttctgtccatctatggtcctgtcccgccatcaagttcatactctcttactcacacttctgggatgcaagcagggcagggggttctgtgtcttccatggaagggggacaatggttatcctgaggttggtttttggaggaaacatgggcgtaggcaaggtgaaccaaggcaggtgcagtcacctaaccgaatgctgcctgtacaggggaagagtcctcttgtgcttgctaacgtgtgctgactccatgtcccaggacctcatttccaggagctctgagaggtggtctagcatgcccgccctggcagctattccccacccgtctcctgctgcaggctctggggttttgcatgttcatgtgaccttccttccatggggtccctggttcctcaccttctccaatgtgtgctattcccacatcacctcttcctgtcgtctcatcctctcagtgcccatatcatacccccagaccacggtggacagctcacctagtgagtgcgttcattcattacagttcgtttttgctcaggcccgggggagttaggaaaggtagaccacagcagctttcgttcctccttccctttcccaaggaagccaaatggtccctgacaaaagatgactaaagatctgaaggactctagcagggttcatacatgaacctgctttccccagggtgctggcatattgctgcagatggaagtcaggtgggggtctgtcttctgcaaggagctcctactcgctctgaagagggagactgaggagctggcctgggaccatcttaggactcttctggtgctgggggcagggtgcatgggggttgcttatcgtctatttcagggggtggggaggggcatgtgcaggaagaggctgtttcggggtgggaaagggttgcttttcctttggggttaaggctgtgcagcacgttttacagcagtcctggaacagggctgtttttatattcttgtgaatgaaactgctcttgctaaatgattttctttttttggagggggggtgcactttcattttcaattgactttattaaatgaaaatccaaatcttccactcctccccctccattgtcccctcccccaccacacaccttccttcttgtccttgtgttgaagagggtatcttggggaatgagtttattatcttctccacgacctcacctatacatcccacacaccatcctccaggtctgggaaatatccatttttctggccagtcttagcatgttttcttaatgtcacattcccacgccaggcccaagagagattctatgacatatattatagagagaattctatatcaatatatataaatattagagattatgtacacaagggcatgggctcaaatgcccactgccagtcccccacccaggcttcagcatctctcttggcctggggaagtgggagggatgtgatgctggagaaggctacaggctgtgttcaatgacactaaacagaatgtggtggcaaaaaaaaaaaattctcctaaacttacccaactactatcctttctaaccctacctctctaatctctctaatttctccttattatatatctccctcccctaaaaaattcaatggccggcttttaaccccgttctgacttggcccttgggtgtccccaaccttaacgcccttgtgagcacaatcccctttttccccgcgttggttcaccggggcg

SEQ ID NO: 59121 - DNA, 4297 bp, Homo sapiens
gtggttgatctagcaggatcttatgtcatccccttcgtgtgtcagtccccgtttcgcggaagcttaagcgaaactctaacgcctatggcattggggccctggccaagtcatcattctcagggatctcacggagcatgaaggaccatgtgacaaagcccacagccatggggcaaggccgggtggcccacatgattgagtggcagggctgggggaagacaccagctgttcagccacaacacagccatgagtccgtgcgcagggatacggatgcctactccgacctcagcgatggcgagaaggaggcacgttttctagcaggcgtcatggagcagtttgctatctctgaggccacactcatggcctggtcttccatggatggtgaggacatgagtgtgaactccacccaggagccattgggctgcaactacagtgacaactaccaggaactgatggacagtcaggatgccctggctcaagcacccatggatggatggcctcactcttacgtgtcccagggtatgtactgtctggggtcgtcagatgcctgggaagccagcgatcagtccctcattgcctctccggccacaggatcctatcttgggcctgcatttgatgactcacaacccagcttgcatgaaatgggaccttcccaaccagcttcaggatactctgctctggagcctccacctttgctggggggagacactgactgggctccgggggtaggcgcagtggacctggcaaggggccctgctgaggaggagaagaggccattggcacctgaggaggaagaggatgcgggatgccgggacctggagtcactttccccacgagaagaccctgagatgtctaccgctctcagccggaaggtgtctgacgtcacatcctcaggtgtgcagtcctttgatgaggaggaaggcgaggccaacaactagtttcctcccccaatgccctgccttccactcccacctgagggccatggctgtgacccataccctccctccccccagcagtacagctgaaactgggcagacaacattggggaacccaggagcttccagtcctctcctggaaatggaggaccaggatgggattttatccaggcttacactctagaaacccacaggcctgggaactgagacctgggcaactagatggccgtgagcttggtgtggctgtggagaaggacctgggctgtgggcttctgggtctgtgccgacaaagcctccagtgtgtgcaccctgaggacgggggcagcgcagctgtgctcaagactggatctcagttcttcacgccccgatttcgtcttccaggagccgtaactctgctgtctgaatgcctcctttctccatttcactcttgcttttcccaactctgttttctctggctgtggccccagctcatccctactgagagaacagacctcaggggctgttggacatggctggacaggcgcaggggaggctgcctgaagggcacgtccatggggagggtggagaggctgcctcagcaggtcatttggcttctgagatcaggagtcgaggaggaggtggatgtggcagctgagatctacagggggcacggatgtggttctttctatcaaggcctgcccggagacaagagagtcactgaggagactaagaacaaacacagccccttgctctgggatctttaatatcccatggctaaaaggaagatcctaaggatctgggaaaagacccagccagggctggctgctccagctcttgcttccctttcagctttcttccatccctgctccgggagcctgaggagggtgtggggacacccatcttggatacaccaacgcaggatgcaggtgtcgccaacagcagggggagcatgagggctgtctccccttattcacccctgtcctctgaagctgtttacacttttctctttgccttttctacatttttataacttcttgggcactcagggttgagtggagtggagggaggagtccggtgctgtcactccctcagccaggcagggttgcagctgagggccagggtgggcactcggcactttctgccccttcttcagctcctcccaggactcccaaacagcctcacagctgtcctccctgcctccccaggcctcctaccagaggaagagaggaaaatcagcggattcttccttccaggatggtgtatggtgaggcacaagcttgccctcccacacttggcatccatgctggtggggactgagcagcatatgcgccccagcactaccgtgagagcacaggcagaggatgggcggagcaaagcagcggtgctgtggggttggagagcacttggccctgccactgcccaggtagcccctccccagcccttggcacaggcagagttcgggtaggagagagaggcctaagaggctcactgccctatctccttctttcctcacgcccttccaaggctccggctcccaggcctgtgtcctacccacactctgtcaggagtcctaccacttgcatcctctgctggaagggagcactgttgtcctctcctggccctgggcacaaactttgccctcacccccaggccccagaacttattattttggagtgagaaggttgagagttggggtgtttctgtccatctatggtcctgtcccgccatcaagttcatactctcttactcacacttctgggatgcaagcagggcagggggttctgtgtcttccatggaagggggacaatggttatcctgaggttggtttttggaggaaacatgggcgtaggcaaggtgaaccaaggcaggtgcagtcacctaaccgaatgctgcctgtacaggggaagagtcctcttgtgcttgctaacgtgtgctgactccatgtcccaggacctcatttccaggagctctgagaggtggtctagcatgcccgccctggcagctattccccacccgtctcctgctgcaggctctggggttttgcatgttcatgtgaccttccttccatggggtccctggttcctcaccttctccaatgtgtgctattcccacatcacctcttcctgtcgtctcatcctctcagtgcccatatcatacccccagaccacggtggacagctcacctagtgagtgcgttcattcattacagttcgtttttgctcaggcccgggggagttaggaaaggtagaccacagcagctttcgttcctccttccctttcccaaggaagccaaatggtccctgacaaaagatgactaaagatctgaaggactctagcagggttcatacatgaacctgctttccccagggtgctggcatattgctgcagatggaagtcaggtgggggtctgtcttctgcaaggagctcctactcgctctgaagagggagactgaggagctggcctgggaccatcttaggactcttctggtgctgggggcagggtgcatgggggttgcttatcgtctatttcagggggtggggaggggcatgtgcaggaagaggctgtttcggggtgggaaagggttgcttttcctttggggttaaggctgtgcagcacgttttacagcagtcctggaacagggctgtttttatattcttgtgaatgaaactgctcttgctaaatgattttctttttttggagggggggtgcactttcattttcaattgactttattaaatgaaaatccaaatcttccactcctccccctccattgtcccctcccccaccacacaccttccttcttgtccttgtgttgaagagggtatcttggggaatgagtttattatcttctccacgacctcacctatacatcccacacaccatcctccaggtctgggaaatatccatttttctggccagtcttagcatgttttcttaatgtcacattcccacgccaggcccaagagagattctatgacatatattatagagagaattctatatcaatatatataaatattagagattatgtacacaagggcatgggctcaaatgcccactgccagtcccccacccaggcttcagcatctctcttggcctggggaagtgggagggatgtgatgctggagaaggctacaggctgtgttcaatgacactaaacagaatgtggtggcaaaaaaaaaaaattctcctaaacttacccaactactatcctttctaaccctacctctctaatctctctaatttctccttattatatatctccctcccctaaaaaattcaatggccggcttttaaccccgttctgacttggcccttgggtgtccccaaccttaacgcccttgtgagcacaatcccctttttccccgcgttggttcaccggggcg

SEQ ID NO: 59122 - DNA, 1902 bp, Homo sapiens
tgcaggctggtaccgtctgggagtatgggatccttccaaggctccggctcccaggcctgtgtcctacccacactctgtcaggagtcctaccacttgcatcctctgctggaagggagcactgttgtcctctcctggccctgggcacaaactttgccctcacccccaggccccagaacttattattttggagtgagaaggttgagagttggggtgtttctgtccatctatggtcctgtcccgccatcaagttcatactctcttactcacacttctgggatgcaagcagggcagggggttctgtgtcttccatggaagggggacaatggttatcctgaggttggtttttggaggaaacatgggcgtaggcaaggtgaaccaaggcaggtgcagtcacctaaccgaatgctgcctgtacaggggaagagtcctcttgtgcttgctaacgtgtgctgactccatgtcccaggacctcatttccaggagctctgagaggtggtctagcatgcccgccctggcagctattccccacccgtctcctgctgcaggctctggggttttgcatgttcatgtgaccttccttccatggggtccctggttcctcaccttctccaatgtgtgctattcccacatcacctcttcctgtcgtctcatcctctcagtgcccatatcatacccccagaccacggtggacagctcacctagtgagtgcgttcattcattacagttcgtttttgctcaggcccgggggagttaggaaaggtagaccacagcagctttcgttcctccttccctttcccaaggaagccaaatggtccctgacaaaagatgactaaagatctgaaggactctagcagggttcatacatgaacctgctttccccagggtgctggcatattgctgcagatggaagtcaggtgggggtctgtcttctgcaaggagctcctactcgctctgaagagggagactgaggagctggcctgggaccatcttaggactcttctggtgctgggggcagggtgcatgggggttgcttatcgtctatttcagggggtggggaggggcatgtgcaggaagaggctgtttcggggtgggaaagggttgcttttcctttggggttaaggctgtgcagcacgttttacagcagtcctggaacagggctgtttttatattcttgtgaatgaaactgctcttgctaaatgattttctttttttggagggggggtgcactttcattttcaattgactttattaaatgaaaatccaaatcttccactcctccccctccattgtcccctcccccaccacacaccttccttcttgtccttgtgttgaagagggtatcttggggaatgagtttattatcttctccacgacctcacctatacatcccacacaccatcctccaggtctgggaaatatccatttttctggccagtcttagcatgttttcttaatgtcacattcccacgccaggcccaagagagattctatgacatatattatagagagaattctatatcaatatatataaatattagagattatgtacacaagggcatgggctcaaatgcccactgccagtcccccacccaggcttcagcatctctcttggcctggggaagtgggagggatgtgatgctggagaaggctacaggctgtgttcaatgacactaaacagaatgtggtggcaaaaaaaaaaaattctcctaaacttacccaactactatcctttctaaccctacctctctaatctctctaatttctccttattatatatctccctcccctaaaaaattcaatggccggcttttaaccccgttctgacttggcccttgggtgtccccaaccttaacgcccttgtgagcacaatcccctttttccccgcgttggttcaccggggcg

SEQ ID NO: 59123 - DNA, 4168 bp, Homo sapiens
  misc_feature (143)..(144): n is a, c, g, or t
  misc_feature (4048)..(4048): n is a, c, g, or t
agcggggggggggatggagaggggaggggggagcggagccgagcggagacagccgcggcgctgcagagcggctggggcggcggcgcggctcccggtgctccccccggcgcgcgccccgagtcggtgagggcccggctctgcgnnccccggagccatgggctgcatcggctcccggactgtggggaatgaggtgattgcagtggattggaagggcctgaaggatgtcgatcaaatcaacatggacagcaccagctcactgcacgggagcagcctccatcggccatcgactgagcaaactcgaactgatttctcctgggacggcatcaacctctccatggaggacaccacttccattcttccgaagcttaagcgaaactctaacgcctatggcattggggccctggccaagtcatcattctcagggatctcacggagcatgaaggaccatgtgacaaagcccacagccatggggcaaggccgggtggcccacatgattgagtggcagggctgggggaagacaccagctgttcagccacaacacagccatgagtccgtgcgcagggatacggatgcctactccgacctcagcgatggcgagaaggaggcacgttttctagcaggcgtcatggagcagtttgctatctctgaggccacactcatggcctggtcttccatggatggtgaggacatgagtgtgaactccacccaggagccattgggctgcaactacagtgacaactaccaggaactgatggacagtcaggatgccctggctcaagcacccatggatggatggcctcactcttacgtgtcccagggtatgtactgtctggggtcgtcagatgcctgggaagccagcgatcagtccctcattgcctctccggccacaggatcctatcttgggcctgcatttgatgactcacaacccagcttgcatgaaatgggaccttcccaaccagcttcaggatactctgctctggagcctccacctttgctggggggagacactgactgggctccgggggtaggcgcagtggacctggcaaggggccctgctgaggaggagaagaggccattggcacctgaggaggaagaggatgcgggatgccgggacctggagtcactttccccacgagaagaccctgagatgtctaccgctctcagccggaaggtgtctgacgtcacatcctcaggtgtgcagtcctttgatgaggaggaaggcgaggccaacaactagtttcctcccccaatgccctgccttccactcccacctgagggccatggctgtgacccataccctccctccccccagcagtacagctgaaactgggcagacaacattggggaacccaggagcttccagtcctctcctggaaatggaggaccaggatgggattttatccaggcttacactctagaaacccacaggcctgggaactgagacctgggcaactagatggccgtgagcttggtgtggctgtggagaaggacctgggctgtgggcttctgggtctgtgccgacaaagcctccagtgtgtgcaccctgaggacgggggcagcgcagctgtgctcaagactggatctcagttcttcacgccccgatttcgtcttccaggagccgtaactctgctgtctgaatgcctcctttctccatttcactcttgcttttcccaactctgttttctctggctgtggccccagctcatccctactgagagaacagacctcaggggctgttggacatggctggacaggcgcaggggaggctgcctgaagggcacgtccatggggagggtggagaggctgcctcagcaggtcatttggcttctgagatcaggagtcgaggaggaggtggatgtggcagctgagatctacagggggcacggatgtggttctttctatcaaggcctgcccggagacaagagagtcactgaggagactaagaacaaacacagccccttgctctgggatctttaatatcccatggctaaaaggaagatcctaaggatctgggaaaagacccagccagggctggctgctccagctcttgcttccctttcagctttcttccatccctgctccgggagcctgaggagggtgtggggacacccatcttggatacaccaacgcaggatgcaggtgtcgccaacagcagggggagcatgagggctgtctccccttattcacccctgtcctctgaagctgtttacacttttctctttgccttttctacatttttataacttcttgggcactcagggttgagtggagtggagggaggagtccggtgctgtcactccctcagccaggcagggttgcagctgagggccagggtgggcactcggcactttctgccccttcttcagctcctcccaggactcccaaacagcctcacagctgtcctccctgcctccccaggcctcctaccagaggaagagaggaaaatcagcggattcttccttccaggatggtgtatggtgaggcacaagcttgccctcccacacttggcatccatgctggtggggactgagcagcatatgcgccccagcactaccgtgagagcacaggcagaggatgggcggagcaaagcagcggtgctgtggggttggagagcacttggccctgccactgcccaggtagcccctccccagcccttggcacaggcagagttcgggtaggagagagaggcctaagaggctcactgccctatctccttctttcctcacgcccttccaaggctccggctcccaggcctgtgtcctacccacactctgtcaggagtcctaccacttgcatcctctgctggaagggagcactgttgtcctctcctggccctgggcacaaactttgccctcacccccaggccccagaacttattattttggagtgagaaggttgagagttggggtgtttctgtccatctatggtcctgtcccgccatcaagttcatactctcttactcacacttctgggatgcaagcagggcagggggttctgtgtcttccatggaagggggacaatggttatcctgaggttggtttttggaggaaacatgggcgtaggcaaggtgaaccaaggcaggtgcagtcacctaaccgaatgctgcctgtacaggggaagagtcctcttgtgcttgctaacgtgtgctgactccatgtcccaggacctcatttccaggagctctgagaggtggtctagcatgcccgccctggcagctattccccacccgtctcctgctgcaggctctggggttttgcatgttcatgtgaccttccttccatggggtccctggttcctcaccttctccaatgtgtgctattcccacatcacctcttcctgtcgtctcatcctctcagtgcccatatcatacccccagaccacggtggacagctcacctagtgagtgcgttcattcattacagttcgtttttgctcaggcccgggggagttaggaaaggtagaccacagcagctttcgttcctccttccctttcccaaggaagccaaatggtccctgacaaaagatgactaaagatctgaaggactctagcagggttcatacatgaacctgctttccccagggtgctggcatattgctgcagatggaagtcaggtgggggtctgtcttctgcaaggagctcctactcgctctgaagagggagactgaggagctggcctgggaccatcttaggactcttctggtgctgggggcagggtgcatgggggttgcttatcgtctatttcagggggtggggaggggcatgtgcaggaagaggctgtttcggggtgggaaagggttgcttttcctttggggttaaggctgtgcagcacgttttacagcagtcctggaacagggctgtttttatattcttgtgaatgaaactgctcttgctaaatgattttctttttttggagggggggtgcactttcattttcaattgactttattaaatgaatccaatctcaaaaaaaaaagttaaaaaaaaaaaaaaggggggggaaagaaccgggggggcacttgggccgtttgtgaagggcgaaagagataanaagagggcgggtaaaacggggaaaggtgggttgggacccttggggaggacccaagaagcggataatgttggacgttggtgtattgagatacaaagacgggaggatcaggtagctccaaga

SEQ ID NO: 59124 - DNA, 2571 bp, Homo sapiens
aataaggggagacagccctcatgctccccctgctgttggcgacacctgcatcctgcgtggtgtatccaagatgggtgtccccacaccctcctcaggctcccggagcagggatggaagaaagctgaaaggggagcatgagggctgtctccccttattcacccctgtcctctgaagctgtttacacttttctctttgccttttctacatttttataacttcttgggcactcagggttgagtggagtggagggaggagtccggtgctgtcactccctcagccaggcagggttgcagctgagggccagggtgggcactcggcactttctgccccttcttcagctcctcccaggactcccaaacagcctcacagctgtcctccctgcctccccaggcctcctaccagaggaagagaggaaaatcagcggattcttccttccaggatggtgtatggtgaggcacaagcttgccctcccacacttggcatccatgctggtggggactgagcagcatatgcgccccagcactaccgtgagagcacaggcagaggatgggcggagcaaagcagcggtgctgtggggttggagagcacttggccctgccactgcccaggtagcccctccccagcccttggcacaggcagagttcgggtaggagagagaggcctaagaggctcactgccctatctccttctttcctcacgcccttccaaggctccggctcccaggcctgtgtcctacccacactctgtcaggagtcctaccacttgcatcctctgctggaagggagcactgttgtcctctcctggccctgggcacaaactttgccctcacccccaggccccagaacttattattttggagtgagaaggttgagagttggggtgtttctgtccatctatggtcctgtcccgccatcaagttcatactctcttactcacacttctgggatgcaagcagggcagggggttctgtgtcttccatggaagggggacaatggttatcctgaggttggtttttggaggaaacatgggcgtaggcaaggtgaaccaaggcaggtgcagtcacctaaccgaatgctgcctgtacaggggaagagtcctcttgtgcttgctaacgtgtgctgactccatgtcccaggacctcatttccaggagctctgagaggtggtctagcatgcccgccctggcagctattccccacccgtctcctgctgcaggctctggggttttgcatgttcatgtgaccttccttccatggggtccctggttcctcaccttctccaatgtgtgctattcccacatcacctcttcctgtcgtctcatcctctcagtgcccatatcatacccccagaccacggtggacagctcacctagtgagtgcgttcattcattacagttcgtttttgctcaggcccgggggagttaggaaaggtagaccacagcagctttcgttcctccttccctttcccaaggaagccaaatggtccctgacaaaagatgactaaagatctgaaggactctagcagggttcatacatgaacctgctttccccagggtgctggcatattgctgcagatggaagtcaggtgggggtctgtcttctgcaaggagctcctactcgctctgaagagggagactgaggagctggcctgggaccatcttaggactcttctggtgctgggggcagggtgcatgggggttgcttatcgtctatttcagggggtggggaggggcatgtgcaggaagaggctgtttcggggtgggaaagggttgcttttcctttggggttaaggctgtgcagcacgttttacagcagtcctggaacagggctgtttttatattcttgtgaatgaaactgctcttgctaaatgattttctttttttggagggggggtgcactttcattttcaattgactttattaaatgaaaatccaaatcttccactcctccccctccattgtcccctcccccaccacacaccttccttcttgtccttgtgttgaagagggtatcttggggaatgagtttattatcttctccacgacctcacctatacatcccacacaccatcctccaggtctgggaaatatccatttttctggccagtcttagcatgttttcttaatgtcacattcccacgccaggcccaagagagattctatgacatatattatagagagaattctatatcaatatatataaatattagagattatgtacacaagggcatgggctcaaatgcccactgccagtcccccacccaggcttcagcatctctcttggcctggggaagtgggagggatgtgatgctggagaaggctacaggctgtgttcaatgacactaaacagaatgtggtggcaaaaaaaaaaaattctcctaaacttacccaactactatcctttctaaccctacctctctaatctctctaatttctccttattatatatctccctcccctaaaaaattcaatggccggcttttaaccccgttctgacttggcccttgggtgtccccaaccttaacgcccttgtgagcacaatcccctttttccccgcgttggttcaccggggcg

SEQ ID NO: 59125 - DNA, 722 bp, Homo sapiens
cacacccagcggcagccgttgactccctccacccttgcttccctctcaaccatctcacctccatctgtccagtggagccagatgtcccaccttcttgggagaaattaattgaggctcatttccaggacagaggggcaagctgggtctgaggagccaagcagaaaaacttcccaaaatcactgggtggggaggggtcagagacttactgctgccccagctgttctgactctgcccccagcttttggccccacccttttaaagcaccttcagaggttcccaatggtgacagtaaacaagtctccactgtcctggccatctctgctgtgttcaccctactcctgatctttctggctgctcagggactgacagccaagatgtgaggctgtgatgagcaggaacagggaggcctggagcccccaggtgagtggagtggcttggctttagggaagagcagcctaggtaagtggatatggatggaagaggctctgaaatttgggatctgaacttggggatcaaggcagcagttctttctttataggaacttcctattaaaaaacatttttttaatttttttaataaaaacaggaaagagccttataggaaagggctcagtactgtagcccaggctctcaaaaattatcagtataacttaaggtttctatgcccagttacttttcctattttagtataataaaataaaatatctgactcactagaggaaa

SEQ ID NO: 59126 - DNA, 604 bp, Homo sapiens
cacacccagcggcagccgttgactccctccacccttgcttccctctcaaccatctcacctccatctgtccagtggagccagatgtcccaccttcttgggagaaattaattgaggctcatttccaggacagaggggcaagctgggtctgaggagccaagcagaaaaacttcccaaaatcactgggtggggaggggtcagagacttactgctgccccagctgttctgactctgcccccagcttttggccccacccttttaaagcaccttcagaggttcccaatggtgacagtaaacaagtctccactgtcctggccatctctgctgtgttcaccctactcctgatctttctggctgctcagggactgacagccaagatgtgaggctgtgatgagcaggaacagggaggcctggagcccccagccattgtcatcacttccctgatctgcctaaattctgcccagcagtccgtgaaaatggtttgctgatgacatatgtaaggactttaactcccctcaagcaatctgctcatctcaaagggtaaaacattggctcactcctaatgcaataaatgacacataaggtcacaattcaatggtactctcct

SEQ ID NO: 59127 - DNA, 302 bp, Homo sapiens
gtaaatcgcttggaaactttttatatccatagcgggtaccactatagttcataagttatttttcacagtataaatgccaataatattgcataacagcaggaccatttgcctctttcactaggattaaaactgggtatgttaaaagtgcatgagagtattctagctaataaatgaagaagtcagagaaatggaatatcattttgtaacccccatgatttaatgggtatagtcaatggccattaacaggctgttaacttcacaaaaagagtcaaccagacattaggggacttctaatggaagta

SEQ ID NO: 59128 - DNA, 651 bp, Homo sapiens
tagggaaaaaacatgggttaaaaatgctggagagaagtttctccgcaagaagatcaaaaaggaatcggaagtgccctgttaagtttgatgacaccagcgatgatgaacaggaaagtggtgatgggtcagacaatttgaatcaagaaaattttgataaggaaaagtcagatagaaatgattctgaggaccctggaagtgaatataatgctgaagaagatgagctagaggaggagatgtcagatgagtactctgacattgaagaacaaagtgaaaaggatcataatgatgcagaagaagaacctgaggctggtgattctgtaggaaatgttcatgaggggttaactccagtggtcattcagaacagcaacaaaaaaatattgcagtgtcctaaatgtgataaaacatttgaccgaataggaaaatatgagagccacacccgtgttcacacaggtgagaagccctttgagtgtgatatttgtcaccagcgctattcaacaaagtctaacctaactgttcacagaaagaagcacagtaatgaaacagaatttcataagaaggagcacaagtgcccttattgtaataaacttcatgcaagcaagaagactttagccaagcatgttaagaggcaagtattatcttgcttccataata

SEQ ID NO: 59129 - DNA, 386 bp, Homo sapiens
gagaacaaagagaatggaggccacatacaatggagtaacagaagctttgcctgtagctcaagaaccaagccgagaatccacacctcctgattcacagttcagtattttcggccactttactcaaatatttttataaattatttttaaatcggcaaaatatttaaatttcatccattaaatttaaatttctagatgccctagtggcatccagaacacatattttggggaaaatattctaatttttttaaacagaaaaagctaggaacagatgatgcattaaaaagtagaacacagagctcttaatttagaatgatcaaaataggttgattcaactattaccttctcctaggattatgaatcaacccctagcagcagacaaagtcaca

SEQ ID NO: 59130 - DNA, 2176 bp, Homo sapiens
aatggactttggaacacaacgtgctacctcaaggctccacctggccacacagcaggcactgaggctgggagacagcccccagacagatgagtgtccgcgcctctctgagaggtgaatgagcccggacggtccctacctaccaagtcctgaggagcagcggcaccaacgacgcaggcccgccccagcccgccagtgagccgcccatgccctctgctagcccggcccgcccgggcccccgccatgctgatcaccgtgtactgcgtgcggagggacctctccgaggtcaccttctctctccaggtcagccccgactttgagctccgaaacttcaaggtcctctgcgaagcggagtccagagtccccgtcgaagagatccagatcatccacatggagcgactcctcatcgaggaccactgttccctgggctcctacggcctcaaagatggcgatatcgtggttttactgcagaaggacaatgtgggacctcgggctccagggcgtgccccgaaccagcctcgtgtagacttcagtggcattgcggtgcctgggacgtccagctcccgtccacagcaccctggacagcagcagcagcgcacacccgctgcccagcggtcacagggcttggcgtcaggagagaaggtggccggcctgcaaggtctgggcagccccgccctgatccgcagcatgctgctctccaaaccccacgatctgtccctgctcaaggaacgcaaacctcccttggcggaagccctgctcagcggaagccttgagaccttttctcaggtgctgatggagcagcaaagggaaaaggccttgagagagcaagagaggcttcgtctctacacagccgacccactggatcgggaagctcaggccaaaatagaagaggaaatccggcagcaaaacattgaagaaaacatgaatatagcgatagaagaggcccccgagagttttggacaagtgacgatgctctacattaactgcaaagtgaatgggcatcctttgaaggcttttgttgactcgggcgcccagatgaccattatgagccaggcttgtgccgagcgatgtaacatcatgaggctggtggaccgacggtgggctggggttgctaaaggagtgggcacacagagaattattggccgtgttcatctagctcagattcaaattgaaggtgatttcttacagtgctctttctccatacttgaggatcaacccatggatatgcttctaggcctagatatgctccggagacatcaatgttccatcgatttgaagaaaaatgtgctggtcatcggcaccactggcacgcagacttattttcttcctgagggagagttgcccttatgctctaggatggtaagtgggcaagatgagtcttcggacaaggaaattacacattcagtcatggattcaggacgaaaagagcattaaagcacgttataaatatgttaccaccttgagggagcctcaggtccccggcaattataagttaagagcttactggcaatgtaatcattaaaaaacatcagtaacaactaaacctggccttgggactacgttctcagatgggtaactaacgtcaatcctgattccttggtcttggtccctcttccatttcccttgtccagagatcactgaaaggcatcctgggaaggctctggaggctccagctgatttccagataatccatgaaaaagaaaaccagcttcttcctttagagacactatcctatcagattacaggtggcttatccaaatcattgctattttgcagaattccctggaaaaatgctatggctgcagaccttacaaggcatccacataaaactatttcacatcagcactaataattctttctactgagagaaatatgcccattttcacaggttttgttttctttgggaagggtattagaaatggtaggtcagttacactatgatgttaactaatacttatacatgtctgtttggggcagcataaagaccaatttcctcatatttacaccttcccttcccctggatcccctgcagtcaccctgcaatccacagctaaagactatttttgccatatttgagaaagtggatttatctccaaggatgctacattaattttctatttctcctgcattcaaagaaactctggctataaaacaaaggcaataaattagattttttaaa

SEQ ID NO: 59131 - DNA, 455 bp, Homo sapiens
aaactgcagtggggcattctctgatcctggctctctgctagcagcatggtactgtccttagacactagagggcactgtgtatacattcctgccaggaaagagcctttctaggaagaaggaagtagtactgctggaaatggtactgtgtagttgcatggacagaattcagagccctgtattctcgtggcagacccagagctctttcttctgcgccaagctgtgaaccaagcacaaagcacatatgggagatgaagcaagaggttgaagttgaagatatcatgaggacccttctaacttggtctctttaacatgctggtgtcctgtgcagctaatatggagttttggaaggggtggcagctgtgaattagtgaggaggatgaggtgggacattttaagagggcaccttgggggcaggggcaggcccactctatgaggagctcagctcaaaatctttt

SEQ ID NO: 59132 - DNA, 340 bp, Homo sapiens
  misc_feature (339)..(339): n is a, c, g, or t
catctgcaagcccctgcactacacaaccattatgcaacaagggatctgccaccttctggtggtgatagcctggattggaggcatcctgcatgccactgtgcagattcttttcatgaccgacttgcccttctgtggtcccaatgtcattgaccactttatgtgtgatctcttcccattgttgaaacttgcctgcagagacacctacagacttgggatgctggtggcagccaacagtggagccatgtgcttgctcatcttttccctgctcgtcatctcctacatagtcatcctgagctccctgaaatcctatagctctgaaggacagcacaaagccctctnc

SEQ ID NO: 59133 - DNA, 2968 bp, Homo sapiens
  misc_feature (955)..(955): n is a, c, g, or t
  misc_feature (1346)..(1346): n is a, c, g, or t
  misc_feature (1561)..(1561): n is a, c, g, or t
  misc_feature (1641)..(1641): n is a, c, g, or t
  misc_feature (1706)..(1706): n is a, c, g, or t
  misc_feature (1715)..(1715): n is a, c, g, or t
  misc_feature (1719)..(1719): n is a, c, g, or t
  misc_feature (1761)..(1762): n is a, c, g, or t
  misc_feature (1768)..(1768): n is a, c, g, or t
  misc_feature (2705)..(2705): n is a, c, g, or t
  misc_feature (2963)..(2963): n is a, c, g, or t
  misc_feature (2965)..(2968): n is a, c, g, or t
gaggaagacaggcagccggcgcacccgctcggcctcacgaagatgctccctggagcctggctgctctggacctccctcctgctcctggccaggcctgcccagccctgtcccatgggttgtgactgcttcgtccaggaggtgttctgctcagatgaggagcttgccaccgtcccgctggacatcccgccatatacgaaaaacatcatctttgtggagacctcgttcaccacattggaaaccagagcttttggcagtaaccccaacttgaccaaggtggtcttcctcaacactcagctctgccagtttaggccggatgcctttggggggctgcccaggctggaggacctggaggtcacaggcagtagcttcttgaacctcagcaccaacatcttctccaacctgacctcgctgggcaagctcaccctcaacttcaacatgctggaggctctgcccgagggtcttttccagcacctggctgccctggagtccctccacctgcaggggaaccagctccaggccctgcccaggaggctcttccagcctctgacccatctgaagacactcaacctggcccagaacctcctggcccagctcccggaggagctgttccacccactcaccagcctgcagaccctgaagctgagcaacaacgcgctctctggtctcccccagggtgtgtttggcaaactgggcagcctgcaggagctcttcctggacagcaacaacatctcggagctgccccctcaggtgttctcccagctcttctgcctagagaggctgtggctgcaacgcaacgccatcacgcacctgccgctctccatctttgcctccctgggtaatctgacctttctgagcttgcagtggaacatgcttcgggtcctgcctgccggcctctttgcccacaccccatgcctggttggcctgtctctgacccataaccagctggagactgtcnctgagggcacctttgcccacctgtccaacctgcgttccctcatgctctcatacaatgccattacccacctcccagctggcatcttcagagacctggaggagttggtcaaactctacctgggcagcaacaaccttacggcgctgcacccagccctcttccagaacctgtccaagctggagctgctcagcctctccaagaaccagctgaccacacttccggaggcatcttcgacaccaactacaacctgttcaacctggccctgcacggtaacccctggcagtgcgactgcacctggcctacctcttcaactggctgcagcagtacaccgatcggctcctgaacatccagacctactgcgctgccctgcctacctcaaaggccaggtggtgcncgccttgaatgagaagcagctggtgtccgtcacccgggaccacttgggcttccaggtcacgtggccggacgaaagcaaggcagggggcagctgggatctggctgtgcaggaaagggcagcccggagccagtgcacctacagcaaccccgagggcaccgtggtgctcgcctgtgaccaggcccagtgtcgctggctgaacgtccagctctctcctnggcagggctccctgggactgcagtacaatgctagtcaggagtgggacctgaggcgagctgcggttctctgcggctcaccntgtctatcgaggctcgggcagcagggccctagtagcagccatacaggagctggggaagggggctntggggctgnccangcgacaggtaggggcgaggggagctgagtctccgaagcttgnntttacntgcaagggacagggttacatccccaaggtgagggggtggagtctggtctgctccactaaccagggtctcctcctcctcttccttcatcgcttctcctggagtgtgcggcctaacaaggccatccttatgccttgcaaagcaccctcaaaagctgcaccacagcctggagaataaaatatcctcagccctgatgcctccccattatgtaacacccaaccgctctcacctacaccctgaggtctattcactgcatcccagtgatacaaagtggaggccactgccttctgacatctggctcaaaagcccagtgtctgtttccatttatttccctggaatttcatttaaaattggtatagagaaaaaaaggatgtgacagaagcagagatgaccagaaagcacaggggcagggttctgactggcgtgtgggagaccctgtggccggcacccacctccacacgaggactaagctctgatttttttatcttgcccaaattcctacctaaggggtctagggagtcgcgccttacaaatcataaattctcatcagatgggttttatttgaccctgtatatcatgacttatttttaatctgactatggcataacattacaagacgaggcaaaaatatttaacccccaaatatatttccttggccctaccttgaacttggccctgcagagtctcttgtgaggagaatccacatcctataaaggaagcccctttcccctttgttttccttcctttctttccagtccaggagatcatcaactaagagccaggcaccccttttaagtcgataagaaacagtttacaacctgctctctctctctctgaagtctgctgagagcttcccctgcacaataaaacttggcctccacaatcctttatcttaacctgaacattcctttccattgatcccaggtcttcagctaagctnaaccaattgtcaaccagaaaatgtttaaatttacctacagcctggaagcacccacccccgctgcttcgagttgtcctgcctttctgaactcaaccaatgtatttcttaaatgtatttgattgatgcctcattcctccctaaaatgtataaaaccaagctgtacctcgaccaccttgggcacatgttcccaggccctcctgaggtctgtgtcacgggccatggccactcatatttggctcagaataaatctcttcaaanannnn

SEQ ID NO: 59134 - DNA, 688 bp, Homo sapiens
  misc_feature (683)..(683): n is a, c, g, or t
  misc_feature (685)..(688): n is a, c, g, or t
gaggaagacaggcagccggcgcacccgctcggcctcacgaagatgctccctggagcctggctgctctggacctccctcctgctcctggccaggcctgcccagccctgtcccatgggttgtgactgcttcgtccaggaggtgttctgctcagatgaggagcttgccaccgtcccgctggacatcccgccatatacgaaaaacatcatctttgtggagacctcgttcaccacattggaaaccagagcttttggcagtaaccccaacttgaccaaggtggtcttcctcaacactcagctctgccagtttaggccggatgcctttggggggctgcccaggctggaggacctggaggtcacaggcagtagcttcttgaacctcagcaccaacatcttctccaacctgacctcgctgggcaagctcaccctcaacaattgtcaaccagaaaatgtttaaatttacctacagcctggaagcacccacccccgctgcttcgagttgtcctgcctttctgaactcaaccaatgtatttcttaaatgtatttgattgatgcctcattcctccctaaaatgtataaaaccaagctgtacctcgaccaccttgggcacatgttcccaggccctcctgaggtctgtgtcacgggccatggccactcatatttggctcagaataaatctcttcaaanannnn

SEQ ID NO: 59135 - DNA, 2914 bp, Homo sapiens
  misc_feature (955)..(955): n is a, c, g, or t
  misc_feature (1346)..(1346): n is a, c, g, or t
  misc_feature (1561)..(1561): n is a, c, g, or t
  misc_feature (1641)..(1641): n is a, c, g, or t
  misc_feature (1706)..(1706): n is a, c, g, or t
  misc_feature (1715)..(1715): n is a, c, g, or t
  misc_feature (1719)..(1719): n is a, c, g, or t
  misc_feature (1761)..(1762): n is a, c, g, or t
  misc_feature (1768)..(1768): n is a, c, g, or t
  misc_feature (2651)..(2651): n is a, c, g, or t
  misc_feature (2909)..(2909): n is a, c, g, or t
  misc_feature (2911)..(2914): n is a, c, g, or t
gaggaagacaggcagccggcgcacccgctcggcctcacgaagatgctccctggagcctggctgctctggacctccctcctgctcctggccaggcctgcccagccctgtcccatgggttgtgactgcttcgtccaggaggtgttctgctcagatgaggagcttgccaccgtcccgctggacatcccgccatatacgaaaaacatcatctttgtggagacctcgttcaccacattggaaaccagagcttttggcagtaaccccaacttgaccaaggtggtcttcctcaacactcagctctgccagtttaggccggatgcctttggggggctgcccaggctggaggacctggaggtcacaggcagtagcttcttgaacctcagcaccaacatcttctccaacctgacctcgctgggcaagctcaccctcaacttcaacatgctggaggctctgcccgagggtcttttccagcacctggctgccctggagtccctccacctgcaggggaaccagctccaggccctgcccaggaggctcttccagcctctgacccatctgaagacactcaacctggcccagaacctcctggcccagctcccggaggagctgttccacccactcaccagcctgcagaccctgaagctgagcaacaacgcgctctctggtctcccccagggtgtgtttggcaaactgggcagcctgcaggagctcttcctggacagcaacaacatctcggagctgccccctcaggtgttctcccagctcttctgcctagagaggctgtggctgcaacgcaacgccatcacgcacctgccgctctccatctttgcctccctgggtaatctgacctttctgagcttgcagtggaacatgcttcgggtcctgcctgccggcctctttgcccacaccccatgcctggttggcctgtctctgacccataaccagctggagactgtcnctgagggcacctttgcccacctgtccaacctgcgttccctcatgctctcatacaatgccattacccacctcccagctggcatcttcagagacctggaggagttggtcaaactctacctgggcagcaacaaccttacggcgctgcacccagccctcttccagaacctgtccaagctggagctgctcagcctctccaagaaccagctgaccacacttccggaggcatcttcgacaccaactacaacctgttcaacctggccctgcacggtaacccctggcagtgcgactgcacctggcctacctcttcaactggctgcagcagtacaccgatcggctcctgaacatccagacctactgcgctgccctgcctacctcaaaggccaggtggtgcncgccttgaatgagaagcagctggtgtccgtcacccgggaccacttgggcttccaggtcacgtggccggacgaaagcaaggcagggggcagctgggatctggctgtgcaggaaagggcagcccggagccagtgcacctacagcaaccccgagggcaccgtggtgctcgcctgtgaccaggcccagtgtcgctggctgaacgtccagctctctcctnggcagggctccctgggactgcagtacaatgctagtcaggagtgggacctgaggcgagctgcggttctctgcggctcaccntgtctatcgaggctcgggcagcagggccctagtagcagccatacaggagctggggaagggggctntggggctgnccangcgacaggtaggggcgaggggagctgagtctccgaagcttgnntttacntgcaagggacagggttacatccccaaggtgagggggtggagtctggtctgctccactaaccagggtctcctcctcctcttccttcatcgcttctcctggagtgtgcggcctaacaaggccatccttatgccttgcaaagcaccctcaaaagctgcaccacagcctggagaataaaatatcctcagccctgatgcctccccattatgtaacacccaaccgctctcacctacaccctgaggtctattcactgcatcccagtgatacaaagtggaggccactgccttctgacatctggctcaaaagcccagtgtctgtttccatttatttccctggaatttcatttaaaattggtatagagaaaatggcgtgtgggagaccctgtggccggcacccacctccacacgaggactaagctctgatttttttatcttgcccaaattcctacctaaggggtctagggagtcgcgccttacaaatcataaattctcatcagatgggttttatttgaccctgtatatcatgacttatttttaatctgactatggcataacattacaagacgaggcaaaaatatttaacccccaaatatatttccttggccctaccttgaacttggccctgcagagtctcttgtgaggagaatccacatcctataaaggaagcccctttcccctttgttttccttcctttctttccagtccaggagatcatcaactaagagccaggcaccccttttaagtcgataagaaacagtttacaacctgctctctctctctctgaagtctgctgagagcttcccctgcacaataaaacttggcctccacaatcctttatcttaacctgaacattcctttccattgatcccaggtcttcagctaagctnaaccaattgtcaaccagaaaatgtttaaatttacctacagcctggaagcacccacccccgctgcttcgagttgtcctgcctttctgaactcaaccaatgtatttcttaaatgtatttgattgatgcctcattcctccctaaaatgtataaaaccaagctgtacctcgaccaccttgggcacatgttcccaggccctcctgaggtctgtgtcacgggccatggccactcatatttggctcagaataaatctcttcaaanannnn

SEQ ID NO: 59136 - DNA, 225 bp, Homo sapiens
gcatggcccctggactgaaggtgctcaggttagtaagggagtgtcatgcaggtcaacacatgtcgcacatggaccacaaatgcctgccaccagcaggatgcacggggacttctgggaggggagtggacaggatacttatctgtgactggaatgtaggtgagaggtggagaagagagtgaaggataacttatagagggggcagcatttgttttgggtcttgaaaga

SEQ ID NO: 59137 - DNA, 349 bp, Homo sapiens
ccattagtgggattgctggatcaaatggtagttctacttttagttcttcaagaactctccacactgttttccatagtggttgtactagtttacattcccaccagcagtgtagaagtgttccctgctcaccgcattcacgccaatatctattattttttgcatttttggtaatggccattcttgcaggagtaagatggtatcgcaaatgcaacaaaaacaaataggtgggacttaattaaactaatcagcttttgcccagcaaaaggaacagtcagcagagtaaacagacaacccgcagagtgggagaaaatctatacaaatctatacgtctatacaaggactaatatcc

SEQ ID NO: 59138 - DNA, 605 bp, Homo sapiens
cgcccccgggaactcgctggaaacgcgagttctcggccttcgcccagaccctccgaatcgaaactcctgcggcgcgcgctgccagcccgagggccccgccgtccaggggtcccctgacatctcacacttgcggactgaagctgcgaggagcggagaacccggccagggtcacggacgggagcgtccggactcgggttctctgggccccagcccccactccgcccccagcgaatccaaggtcccctgtagggaagggccgtccacactccccatcccttactggctgcatccactgaagcccagacctgctgcctgcaggacctcacccaggcaccaggtcgtgcctggcgcctccttgatgccaggccctggggagacctgtggccacagaacccatgttctccctggagatggacaggaggcccctctcctacgcagaagctgtcgttttttcttcttaaacaccgtttgcccctccctccacccaccgagccatctctgcccctctctacagcaaagcttccgccaagccggccctgctccctgtctacctctcctgccaccacccactcacacgttttaaatacaagccgtcggttctcaga

SEQ ID NO: 59139 - DNA, 340 bp, Homo sapiens
cgcccccgggaactcgctggaaacgcgagttctcggccttcgcccagaccctccgaatcgaaactcctgcggcgcgcgctgccagcccgagggccccgccgtccaggggtcccctgacatctcacacttgcggactgaagctgcgaggagcggagaacccggccagggtcacggacgggagcgtccggactcgggttctctgggccccagcccccactccgcccccagcgaatccaaggtcccctgtagggaagggccgtccacactcgtgagtgcaaccgctcacttcgcccaggtcaaggacgcggcattggcccgagtcgcccatgaccttcatttc

SEQ ID NO: 59140 - DNA, 2679 bp, Homo sapiens
agcgtggtagaatgttgttggtactgcagtgagaggcatgcttccttagaccaggcaacatttcatttgttgcatttccagtttccaataccaactcacctacaaagattttaccaaaaaccttaggaccaataaatgtgaatgttggaccccaaatgattataagcacaccacagagactaaccagttcaggaagtgttctgattgggagtccatatacccctgcaccagcaatggttactcagacacacatagcagaagctactggctgggtccctggtgatagaaaacgggctagaaaatttatagactctgatttttcagaaagtaaacgaagcaaaaaaggagataaaaatgggaaaggcttgagacacttttcaatgaaagtgtgtgagaaagttcaacgaaaaggtacaacatcgtacaatgaagtcgctgatgagctggtgtcagagttcaccaattcaaataaccatttggctgctgattcggcttatgatcagaagaacattaggcgaagagtttatgatgctttaaatgtgctaatggcaatgaacataatttcaaaggaaaaaaaagaaatcaagtggattggcctgcctaccaattctgctcaggaatgtcagaatctggagatagagaagcagaggcggatagaacggataaagcagaagcgggcccagctgcaagaacttctcctacagcaaatcgctttcaaaaacctggtacagagaaatcgacaaaatgagcagcaaaaccagggcccgccggctctgaactctaccattcagctgccattcataatcatcaatacaagcagaaaaacagtcatagattgcagcatctccagtgacaagtttgagtatcttttcaattttgacaacacctttgagatccatgatgacatagaagtactaaagcggatgggaatgtcgtttggcctggagtcaggcaaatgctctctggaggatctgaaacttgcgaaatccctggtgccaaaggctttagaaggttatatcacagatatctccacaggaccttcttggttaaatcagggactacttctgaactctacccaatcagtttcaaatttagacctgaccactggtgccaccttaccccagtcaagtgtaaaccaagggttatgcttggatgcagaagtggccttagcaactgggcagttcctggccccaaacagtcaccagtccagcagtgcggcctctcactgctccgagtcccgaggcgagaccccctgttcgttcaatgatgaagatgaggaagatgatgaggaggattcctcctccccagaataaagacaagagaaagcctacgtttcaatatgtgatgctcatgtgtgtttgtagtgtgagctcttgtttttgaaatgattgcttcagtctttgcctttgtttgcactgtgtgttcagtgaaaactagagaaacacaataagcaaatcacatgaaggctgagatgattgagatgaaagttaacatagtgtgaatgaaagtctggccaacagagcagtagatgatataacaaagaaagcatgctttctgaggagatagtggggataatccctgaagagttggcagtgtgagtgcaactcatttatcttctgtgaggtgggatttttgtgttcctcacacccatgtaattattcttagaattgagattgctacacggagcagtccttgacgatcgtgtttctgacgtttctcttccttgcctggactgcctttgacaaggcagaaatgaacatgaaaagtccccaggagaggggagctgtgtagtgagggatactgagggcagtcctgtggctgaggggcacagattgaactgctgaactagttggaggtctagatgaggtgctttacgcatcagctgccttagacagcttctagaaaggagcgagcgctacttcttaagtacttaagtgacatttagataatttatagtaaaactgaaattattattagccaatgcattggtgcatagaatttactagggctacttctggaagccaaaatagaatagcatttccatgtgcattaaatactttgccagcactgcctttgccagcatcctaaatctggagttttacaaagaaggaaactgtatctttaggttaatcaaagctatgcatttcatatagctttttcatttaaaacaagacaaagaaacaaattcctatgaccaaattgcttgcctacagttccctgcagtaattgtatgatctcacccagtgtgcaatttgtgaaaatgaaccaaatgtcattacttttgtcttaaagaaaagtctatttcaagaatatgaacagcagtgtttccttgtacatgtcaccttttttcacattttcattaatcagaatgaccttattgagcctactcctggggtcaattgcatttcaaactaatccaatatttagtgtttcacagaaacactagaaaacgttgaacactcctactgcctggatatatggtagtgcagttatgttgtttatggctcaagatgtcattagaaatactgcagtggtgtattcacagctgctccttctctgaatgaaagagtgtagggacacctgccaccatggccagaccctgactgaatttcacattaaggctttggaaaggagcaaataataatgggagaattaactccaaaactttgacctgaatca

SEQ ID NO: 59141 - DNA, 1836 bp, Homo sapiens
agctcgcgcgggggaagcggggctgtagctgggcagggagagggcggacgaaatcggtagcgatctcggctgcggcgctgccgcagctgcccggcccgcggggcgcgccctgacccttcatctttgggcaggctcgagggcgcgcgcacggttggcgttctggggcctcaaactcctgggccttgaccgggcaggccgcgtctccccgggtgtgagtccaccgggacccggccgccgcctaagcgcgggcgccacagaagcggcggcgcccgaagacgcgctcctggctcggcccgacagcctcgcttggccgccagttcttctgcagccgaaggcggttgttcttttaaagaattattgaagacgaaggtttttttctttttatttttttaatggctttacagaatcttaaatagaatacagtttgacatgacggcaaaaaatgttggtttgacttccacaaatgcagaagtaagaggatttatagatcagaatctcagtccaacaaaaggtaaatacctagaagtggaattgctgggtcatatggcaacatttcatttgttgcatttccagtttccaataccaactcacctacaaagattttaccaaaaaccttaggaccaataaatgtgaatgttggaccccaaatgattataagcacaccacagagactaaccagttcaggaagtgttctgattgggagtccatatacccctgcaccagcaatggttactcagacacacatagcagaagctactggctgggtccctggtgatagaaaacgggctagaaaatttatagactctgatttttcagaaagtaaacgaagcaaaaaaggagataaaaatgggaaaggcttgagacacttttcaatgaaagtgtgtgagaaagttcaacgaaaaggtacaacatcgtacaatgaagtcgctgatgagctggtgtcagagttcaccaattcaaataaccatttggctgctgattcggcttatgatcagaagaacattaggcgaagagtttatgatgctttaaatgtgctaatggcaatgaacataatttcaaaggaaaaaaaagaaatcaagtggattggcctgcctaccaattctgctcaggaatgtcagaatctggagatagagaagcagaggcggatagaacggataaagcagaagcgggcccagctgcaagaacttctcctacagcaaatcgctttcaaaaacctggtacagagaaatcgacaaaatgagcagcaaaaccagggcccgccggctctgaactctaccattcagctgccattcataatcatcaatacaagcagaaaaacagtcatagattgcagcatctccagtgacaagtttgagtatcttttcaattttgacaacacctttgagatccatgatgacatagaagtactaaagcggatgggaatgtcgtttggcctggagtcaggcaaatgctctctggaggatctgaaacttgcgaaatccctggtgccaaaggctttagaaggttatatcacagatatctccacaggaccttcttggttaaatcagggactacttctgaactctacccaatcagtttcaaatttagacctgaccactggtgccaccttaccccagtcaagtgtaaaccaagggttatgcttggatgcagaagtggccttagcaactgggcagttcctggccccaaacagtcaccagtccagcagtgcggcctctcactgctccgagtcccgaggcgagaccccctgttcgttcaatgatgaagatgaggaagatgatgaggaggattcctcctccccagaataaagacaagagaaagcctacgtttcaatatgtg

SEQ ID NO: 59142 - DNA, 570 bp, Homo sapiens
agcgtggtagaatgttgttggtactgcagtgagaggcatgcttccttagaccaggcaacatttcatttgttgcatttccagtttccaataccaactcacctacaaagattttaccaaaaaccttaggaccaataaatgtgaatgttggaccccaaatgattataagcacaccacagagactaaccagttcaggaagtgttctgattgggagtccatatacccctgcaccagcaatggttactcagacacacatagcagaagctactggctgggtccctggtgatagaaaacgggctagaaaatttatagactctgatttttcagaaagtaaacgaagcaaaaaaggagataaaaatgggaaaggcttgagacacttttcaatgaaagtgtgtgagaaagttcaacgaaaaggtacaacatcgtacaatgaagtcgctgatgagctggtgtcagagttcaccaattcaaataaccatttggctgctgattcggcttatgatcagaagaacattaggcgaagagtttatgatgctttaaatgtgctaatggcaatgaacataatttcaaagg

SEQ ID NO: 59143 - DNA, 909 bp, Homo sapiens
cctctgggaaagagacagttttactgagtcagatggtggaaagacagatgtctctatactttcttaacaagccactctgtcccataacatgcacttggaatctctcctaagttccagaggccccactgttccagtttcaagccttcattttggagtctgtttgggaacttttaagacttcaaagcaaagttagctaccagcaatttctgtaaaccaagagaagattgtcacaaagattcactactttccaactgaatctatgcagtagaaaaatcattagaaaatacaaaaattagccgggcgtggtggcacatgcctgtagtcccagctactcgggaggctgaggcaggagaatcacttgaacccaggaggcggaggttgcagtgagccaagatcccgccactgcactccagcccaggtgacagagcaggactctgtctcaaaaaaagaaaaaagaaagaaagaaaaatgattagaaattgagaactattttacgtgtttctaagttgttggctacatcaaagagatcatctgtattctgcatatgggctggctttggtgaagctgatgactggacttctaagaaccgttttcccaaatgggttcccatattcatgcacccaaagcaatggtccccaagcactgatgaaaactaatatgcatttcccaaagacccacactatgtatcaggagcctgcaccatgccatttgaatgaccctcagcaatgtgcctccctgccctcaaattcccagttgataacagtgtttgattaaatttccactcaagccaaacatggttactaagaagagaaaaacctgatgtttgcataatattttttttcccctcgagatggagtcttgctctgttgcccaggctggagtgcagtggcatgatctcagccactgcaa

SEQ ID NO: 59144 - DNA, 326 bp, Homo sapiens
aggtttgtggcagatctcaccaatggcacctccttcctgtttttattcctatgttttacaaaactgtttataccacattaatgagcctgtgtgtttttaattgtttgctagtgtaaaccaagggttatgcttggatgcagaagtggccttagcaactgggcagttcctggccccaaacagtcaccagtccagcagtgcggcctctcactgctccgagtcccgaggcgagaccccctgttcgttcaatgatgaagatgaggaagatgatgaggaggattcctcctccccagaataaagacaagagaaagcctacgtttcaatatgtg

SEQ ID NO: 59145 - DNA, 1614 bp, Homo sapiens
cctctgggaaagagacagttttactgagtcagatggtggaaagacagatgtctctatactttcttaacaagccactctgtcccataacatgcacttggaatctctcctaagttccagaggccccactgttccagtttcaagccttcattttggagtctgtttgggaacttttaagacttcaaagcaaagttagctaccagcaatttctgtaaaccaagagaagattgtcacaaagattcactactttccaactgaatctatgcagtagaaaaatcattagaaaatacaaaaattagccgggcgtggtggcacatgcctgtagtcccagctactcgggaggctgaggcaggagaatcacttgaacccaggaggcggaggttgcagtgagccaagatcccgccactgcactccagcccaggtgacagagcaggactctgtctcaaaaaaagaaaaaagaaagaaagaaaaatgattagaaattgagaactattttacgtgtttctaagttgttggctacatcaaagagatcatctgtattctgcatatgggctggctttggtgaagctgatgactggacttctaagaaccgttttcccaaatgggttcccatattcatgcacccaaagcaatggtccccaagcactgatgaaaactaatatgcatttcccaaagacccacactatgtatcaggagcctgcaccatgccatttgaatgaccctcagcaatgtgcctccctgccctcaaattcccagttgataacagtgtttgattaaatttccactcaagccaaacatggttactaagaagagaaaaacctgatgtttgcataatattttttttcccctcgagcctgggcaacaagagcgaaattccatctcaaaaaaaaaaggtgggtaaagggccatgagcccaaaccactaggttgttcaccttttcatctgaaaatgctttactctgactatgtgctattgggttttatttccagaaaatatagttctccttttttctgcatgaaggatacatcgtggtgccacatgctttaagcaatttaaacaagagagataagaggaaaatgcaaccaccacatctgacttgcccaatgtagactttcctctattagattgaagtacacaacctaatatgatatattattttgtagtatctcagactttgtaaataaataccattatttttatatggaaattttatagaagagctatttctgtatacgtaattactcctgattttctgaaattgcttctggtagataacagacaagtcctaagcagtgttccactaagggtggttccaggcctgcctgccgtggagttgactgggggaattttacagttttgcgatcctaggatgcgtcccagacgctcagtcagaagtgctggaggtggggcctgggaagctgtatttgtaatgaactctggtgttttttgtccattaaagtgtatctttgtccatcctataagattaaaggaaagaaaaagcatctcaaatgagtgtaagttgttcttgagaaaaaaatgtatcagacttttatgatttgaatgaaatgtattatagaaaaaaataaacactttaaaataatgttagtctcattacta

SEQ ID NO: 59146 - DNA, 877 bp, Homo sapiens
tgtggtggcgcatgcctgtaatcccagctactcgggaggctgaggcaggagaatctcttgaacccaggaggcaaaagttgcaatgagctgagatcgtgccatttgcactccagcctgggcaacaagagcgaaattccatctcaaaaaaaaaaggtgggtaaagggccatgagcccaaaccactaggttgttcaccttttcatctgaaaatgctttactctgactatgtgctattgggttttatttccagaaaatatagttctccttttttctgcatgaaggatacatcgtggtgccacatgctttaagcaatttaaacaagagagataagaggaaaatgcaaccaccacatctgacttgcccaatgtagactttcctctattagattgaagtacacaacctaatatgatatattattttgtagtatctcagactttgtaaataaataccattatttttatatggaaattttatagaagagctatttctgtatacgtaattactcctgattttctgaaattgcttctggtagataacagacaagtcctaagcagtgttccactaagggtggttccaggcctgcctgccgtggagttgactgggggaattttacagttttgcgatcctaggatgcgtcccagacgctcagtcagaagtgctggaggtggggcctgggaagctgtatttgtaatgaactctggtgttttttgtccattaaagtgtatctttgtccatcctataagattaaaggaaagaaaaagcatctcaaatgagtgtaagttgttcttgagaaaaaaatgtatcagacttttatgatttgaatgaaatgtattatagaaaaaaataaacactttaaaataatgttagtctcattacta

SEQ ID NO: 59147 - DNA, 3069 bp, Homo sapiens
agctcgcgcgggggaagcggggctgtagctgggcagggagagggcggacgaaatcggtagcgatctcggctgcggcgctgccgcagctgcccggcccgcggggcgcgccctgacccttcatctttgggcaggctcgagggcgcgcgcacggttggcgttctggggcctcaaactcctgggccttgaccgggcaggccgcgtctccccgggtgtgagtccaccgggacccggccgccgcctaagcgcgggcgccacagaagcggcggcgcccgaagacgcgctcctggctcggcccgacagcctcgcttggccgccagttcttctgcagccgaaggcggttgttcttttaaagaattattgaagacgaaggtttttttctttttatttttttaatggctttacagaatcttaaatagaatacagtttgacatgacggcaaaaaatgcaacatttcatttgttgcatttccagtttccaataccaactcacctacaaagattttaccaaaaaccttaggaccaataaatgtgaatgttggaccccaaatgattataagcacaccacagagactaaccagttcaggaagtgttctgattgggagtccatatacccctgcaccagcaatggttactcagacacacatagcagaagctactggctgggtccctggtgatagaaaacgggctagaaaatttatagactctgatttttcagaaagtaaacgaagcaaaaaaggagataaaaatgggaaaggcttgagacacttttcaatgaaagtgtgtgagaaagttcaacgaaaaggtacaacatcgtacaatgaagtcgctgatgagctggtgtcagagttcaccaattcaaataaccatttggctgctgattcggcttatgatcagaagaacattaggcgaagagtttatgatgctttaaatgtgctaatggcaatgaacataatttcaaaggaaaaaaaagaaatcaagtggattggcctgcctaccaattctgctcaggaatgtcagaatctggagatagagaagcagaggcggatagaacggataaagcagaagcgggcccagctgcaagaacttctcctacagcaaatcgctttcaaaaacctggtacagagaaatcgacaaaatgagcagcaaaaccagggcccgccggctctgaactctaccattcagctgccattcataatcatcaatacaagcagaaaaacagtcatagattgcagcatctccagtgacaagtttgagtatcttttcaattttgacaacacctttgagatccatgatgacatagaagtactaaagcggatgggaatgtcgtttggcctggagtcaggcaaatgctctctggaggatctgaaacttgcgaaatccctggtgccaaaggctttagaaggttatatcacagatatctccacaggaccttcttggttaaatcagggactacttctgaactctacccaatcagtttcaaatttagacctgaccactggtgccaccttaccccagtcaagtgtaaaccaagggttatgcttggatgcagaagtggccttagcaactgggcagttcctggccccaaacagtcaccagtccagcagtgcggcctctcactgctccgagtcccgaggcgagaccccctgttcgttcaatgatgaagatgaggaagatgatgaggaggattcctcctccccagaataaagacaagagaaagcctacgtttcaatatgtgatgctcatgtgtgtttgtagtgtgagctcttgtttttgaaatgattgcttcagtctttgcctttgtttgcactgtgtgttcagtgaaaactagagaaacacaataagcaaatcacatgaaggctgagatgattgagatgaaagttaacatagtgtgaatgaaagtctggccaacagagcagtagatgatataacaaagaaagcatgctttctgaggagatagtggggataatccctgaagagttggcagtgtgagtgcaactcatttatcttctgtgaggtgggatttttgtgttcctcacacccatgtaattattcttagaattgagattgctacacggagcagtccttgacgatcgtgtttctgacgtttctcttccttgcctggactgcctttgacaaggcagaaatgaacatgaaaagtccccaggagaggggagctgtgtagtgagggatactgagggcagtcctgtggctgaggggcacagattgaactgctgaactagttggaggtctagatgaggtgctttacgcatcagctgccttagacagcttctagaaaggagcgagcgctacttcttaagtacttaagtgacatttagataatttatagtaaaactgaaattattattagccaatgcattggtgcatagaatttactagggctacttctggaagccaaaatagaatagcatttccatgtgcattaaatactttgccagcactgcctttgccagcatcctaaatctggagttttacaaagaaggaaactgtatctttaggttaatcaaagctatgcatttcatatagctttttcatttaaaacaagacaaagaaacaaattcctatgaccaaattgcttgcctacagttccctgcagtaattgtatgatctcacccagtgtgcaatttgtgaaaatgaaccaaatgtcattacttttgtcttaaagaaaagtctatttcaagaatatgaacagcagtgtttccttgtacatgtcaccttttttcacattttcattaatcagaatgaccttattgagcctactcctggggtcaattgcatttcaaactaatccaatatttagtgtttcacagaaacactagaaaacgttgaacactcctactgcctggatatatggtagtgcagttatgttgtttatggctcaagatgtcattagaaatactgcagtggtgtattcacagctgctccttctctgaatgaaagagtgtagggacacctgccaccatggccagaccctgactgaatttcacattaaggctttggaaaggagcaaataataatgggagaattaactccaaaactttgacctgaatca

SEQ ID NO: 59148 - DNA, 2663 bp, Homo sapiens
cctggtggcgaattcggcacgaggcttccttagaccaggcaacatttcatttgttgcatttccagtttccaataccaactcacctacaaagattttaccaaaaaccttaggaccaataaatgtgaatgttggaccccaaatgattataagcacaccacagagactaaccagttcaggaagtgttctgattgggagtccatatacccctgcaccagcaatggttactcagacacacatagcagaagctactggctgggtccctggtgatagaaaacgggctagaaaatttatagactctgatttttcagaaagtaaacgaagcaaaaaaggagataaaaatgggaaaggcttgagacacttttcaatgaaagtgtgtgagaaagttcaacgaaaaggtacaacatcgtacaatgaagtcgctgatgagctggtgtcagagttcaccaattcaaataaccatttggctgctgattcggcttatgatcagaagaacattaggcgaagagtttatgatgctttaaatgtgctaatggcaatgaacataatttcaaaggaaaaaaaagaaatcaagtggattggcctgcctaccaattctgctcaggaatgtcagaatctggagatagagaagcagaggcggatagaacggataaagcagaagcgggcccagctgcaagaacttctcctacagcaaatcgctttcaaaaacctggtacagagaaatcgacaaaatgagcagcaaaaccagggcccgccggctctgaactctaccattcagctgccattcataatcatcaatacaagcagaaaaacagtcatagattgcagcatctccagtgacaagtttgagtatcttttcaattttgacaacacctttgagatccatgatgacatagaagtactaaagcggatgggaatgtcgtttggcctggagtcaggcaaatgctctctggaggatctgaaacttgcgaaatccctggtgccaaaggctttagaaggttatatcacagatatctccacaggaccttcttggttaaatcagggactacttctgaactctacccaatcagtttcaaatttagacctgaccactggtgccaccttaccccagtcaagtgtaaaccaagggttatgcttggatgcagaagtggccttagcaactgggcagttcctggccccaaacagtcaccagtccagcagtgcggcctctcactgctccgagtcccgaggcgagaccccctgttcgttcaatgatgaagatgaggaagatgatgaggaggattcctcctccccagaataaagacaagagaaagcctacgtttcaatatgtgatgctcatgtgtgtttgtagtgtgagctcttgtttttgaaatgattgcttcagtctttgcctttgtttgcactgtgtgttcagtgaaaactagagaaacacaataagcaaatcacatgaaggctgagatgattgagatgaaagttaacatagtgtgaatgaaagtctggccaacagagcagtagatgatataacaaagaaagcatgctttctgaggagatagtggggataatccctgaagagttggcagtgtgagtgcaactcatttatcttctgtgaggtgggatttttgtgttcctcacacccatgtaattattcttagaattgagattgctacacggagcagtccttgacgatcgtgtttctgacgtttctcttccttgcctggactgcctttgacaaggcagaaatgaacatgaaaagtccccaggagaggggagctgtgtagtgagggatactgagggcagtcctgtggctgaggggcacagattgaactgctgaactagttggaggtctagatgaggtgctttacgcatcagctgccttagacagcttctagaaaggagcgagcgctacttcttaagtacttaagtgacatttagataatttatagtaaaactgaaattattattagccaatgcattggtgcatagaatttactagggctacttctggaagccaaaatagaatagcatttccatgtgcattaaatactttgccagcactgcctttgccagcatcctaaatctggagttttacaaagaaggaaactgtatctttaggttaatcaaagctatgcatttcatatagctttttcatttaaaacaagacaaagaaacaaattcctatgaccaaattgcttgcctacagttccctgcagtaattgtatgatctcacccagtgtgcaatttgtgaaaatgaaccaaatgtcattacttttgtcttaaagaaaagtctatttcaagaatatgaacagcagtgtttccttgtacatgtcaccttttttcacattttcattaatcagaatgaccttattgagcctactcctggggtcaattgcatttcaaactaatccaatatttagtgtttcacagaaacactagaaaacgttgaacactcctactgcctggatatatggtagtgcagttatgttgtttatggctcaagatgtcattagaaatactgcagtggtgtattcacagctgctccttctctgaatgaaagagtgtagggacacctgccaccatggccagaccctgactgaatttcacattaaggctttggaaaggagcaaataataatgggagaattaactccaaaactttgacctgaatca

SEQ ID NO: 59149 - DNA, 2657 bp, Homo sapiens
gaagggagcaccctggaccctttctgctattaggatgcaaccagaaggcatcatctttgaagcagagaataaaccctcaccaggcactgaatctgccggcactttcattttggacctctcagcaacctccagaacaattataagcacaccacagagactaaccagttcaggaagtgttctgattgggagtccatatacccctgcaccagcaatggttactcagacacacatagcagaagctactggctgggtccctggtgatagaaaacgggctagaaaatttatagactctgatttttcagaaagtaaacgaagcaaaaaaggagataaaaatgggaaaggcttgagacacttttcaatgaaagtgtgtgagaaagttcaacgaaaaggtacaacatcgtacaatgaagtcgctgatgagctggtgtcagagttcaccaattcaaataaccatttggctgctgattcggcttatgatcagaagaacattaggcgaagagtttatgatgctttaaatgtgctaatggcaatgaacataatttcaaaggaaaaaaaagaaatcaagtggattggcctgcctaccaattctgctcaggaatgtcagaatctggagatagagaagcagaggcggatagaacggataaagcagaagcgggcccagctgcaagaacttctcctacagcaaatcgctttcaaaaacctggtacagagaaatcgacaaaatgagcagcaaaaccagggcccgccggctctgaactctaccattcagctgccattcataatcatcaatacaagcagaaaaacagtcatagattgcagcatctccagtgacaagtttgagtatcttttcaattttgacaacacctttgagatccatgatgacatagaagtactaaagcggatgggaatgtcgtttggcctggagtcaggcaaatgctctctggaggatctgaaacttgcgaaatccctggtgccaaaggctttagaaggttatatcacagatatctccacaggaccttcttggttaaatcagggactacttctgaactctacccaatcagtttcaaatttagacctgaccactggtgccaccttaccccagtcaagtgtaaaccaagggttatgcttggatgcagaagtggccttagcaactgggcagttcctggccccaaacagtcaccagtccagcagtgcggcctctcactgctccgagtcccgaggcgagaccccctgttcgttcaatgatgaagatgaggaagatgatgaggaggattcctcctccccagaataaagacaagagaaagcctacgtttcaatatgtgatgctcatgtgtgtttgtagtgtgagctcttgtttttgaaatgattgcttcagtctttgcctttgtttgcactgtgtgttcagtgaaaactagagaaacacaataagcaaatcacatgaaggctgagatgattgagatgaaagttaacatagtgtgaatgaaagtctggccaacagagcagtagatgatataacaaagaaagcatgctttctgaggagatagtggggataatccctgaagagttggcagtgtgagtgcaactcatttatcttctgtgaggtgggatttttgtgttcctcacacccatgtaattattcttagaattgagattgctacacggagcagtccttgacgatcgtgtttctgacgtttctcttccttgcctggactgcctttgacaaggcagaaatgaacatgaaaagtccccaggagaggggagctgtgtagtgagggatactgagggcagtcctgtggctgaggggcacagattgaactgctgaactagttggaggtctagatgaggtgctttacgcatcagctgccttagacagcttctagaaaggagcgagcgctacttcttaagtacttaagtgacatttagataatttatagtaaaactgaaattattattagccaatgcattggtgcatagaatttactagggctacttctggaagccaaaatagaatagcatttccatgtgcattaaatactttgccagcactgcctttgccagcatcctaaatctggagttttacaaagaaggaaactgtatctttaggttaatcaaagctatgcatttcatatagctttttcatttaaaacaagacaaagaaacaaattcctatgaccaaattgcttgcctacagttccctgcagtaattgtatgatctcacccagtgtgcaatttgtgaaaatgaaccaaatgtcattacttttgtcttaaagaaaagtctatttcaagaatatgaacagcagtgtttccttgtacatgtcaccttttttcacattttcattaatcagaatgaccttattgagcctactcctggggtcaattgcatttcaaactaatccaatatttagtgtttcacagaaacactagaaaacgttgaacactcctactgcctggatatatggtagtgcagttatgttgtttatggctcaagatgtcattagaaatactgcagtggtgtattcacagctgctccttctctgaatgaaagagtgtagggacacctgccaccatggccagaccctgactgaatttcacattaaggctttggaaaggagcaaataataatgggagaattaactccaaaactttgacctgaatca

SEQ ID NO: 59150 - DNA, 3018 bp, Homo sapiens
agctcgcgcgggggaagcggggctgtagctgggcagggagagggcggacgaaatcggtagcgatctcggctgcggcgctgccgcagctgcccggcccgcggggcgcgccctgacccttcatctttgggcaggctcgagggcgcgcgcacggttggcgttctggggcctcaaactcctgggccttgaccgggcaggccgcgtctccccgggtgtgagtccaccgggacccggccgccgcctaagcgcgggcgccacagaagcggcggcgcccgaagacgcgctcctggctcggcccgacagcctcgcttggccgccagttcttctgcagccgaaggcggttgttcttttaaagaattattgaagacgaaggtttttttctttttatttttttaatggctttacagaatcttaaatagaatacagtttgacatgacggcaaaaaatgttggtttgacttccacaaatgcagaagtaagaggatttatagatcagaatctcagtccaacaaaaggtaagcaacatttcatttgttgcatttccagtttccaataccaactcacctacaaagattttaccaaaaaccttaggaccaataaatgtgaatgttggaccccaaatgtgatagaaaacgggctagaaaatttatagactctgatttttcagaaagtaaacgaagcaaaaaaggagataaaaatgggaaaggcttgagacacttttcaatgaaagtgtgtgagaaagttcaacgaaaaggtacaacatcgtacaatgaagtcgctgatgagctggtgtcagagttcaccaattcaaataaccatttggctgctgattcggcttatgatcagaagaacattaggcgaagagtttatgatgctttaaatgtgctaatggcaatgaacataatttcaaaggaaaaaaaagaaatcaagtggattggcctgcctaccaattctgctcaggaatgtcagaatctggagatagagaagcagaggcggatagaacggataaagcagaagcgggcccagctgcaagaacttctcctacagcaaatcgctttcaaaaacctggtacagagaaatcgacaaaatgagcagcaaaaccagggcccgccggctctgaactctaccattcagctgccattcataatcatcaatacaagcagaaaaacagtcatagattgcagcatctccagtgacaagtttgagtatcttttcaattttgacaacacctttgagatccatgatgacatagaagtactaaagcggatgggaatgtcgtttggcctggagtcaggcaaatgctctctggaggatctgaaacttgcgaaatccctggtgccaaaggctttagaaggttatatcacagatatctccacaggaccttcttggttaaatcagggactacttctgaactctacccaatcagtttcaaatttagacctgaccactggtgccaccttaccccagtcaagtgtaaaccaagggttatgcttggatgcagaagtggccttagcaactgggcagttcctggccccaaacagtcaccagtccagcagtgcggcctctcactgctccgagtcccgaggcgagaccccctgttcgttcaatgatgaagatgaggaagatgatgaggaggattcctcctccccagaataaagacaagagaaagcctacgtttcaatatgtgatgctcatgtgtgtttgtagtgtgagctcttgtttttgaaatgattgcttcagtctttgcctttgtttgcactgtgtgttcagtgaaaactagagaaacacaataagcaaatcacatgaaggctgagatgattgagatgaaagttaacatagtgtgaatgaaagtctggccaacagagcagtagatgatataacaaagaaagcatgctttctgaggagatagtggggataatccctgaagagttggcagtgtgagtgcaactcatttatcttctgtgaggtgggatttttgtgttcctcacacccatgtaattattcttagaattgagattgctacacggagcagtccttgacgatcgtgtttctgacgtttctcttccttgcctggactgcctttgacaaggcagaaatgaacatgaaaagtccccaggagaggggagctgtgtagtgagggatactgagggcagtcctgtggctgaggggcacagattgaactgctgaactagttggaggtctagatgaggtgctttacgcatcagctgccttagacagcttctagaaaggagcgagcgctacttcttaagtacttaagtgacatttagataatttatagtaaaactgaaattattattagccaatgcattggtgcatagaatttactagggctacttctggaagccaaaatagaatagcatttccatgtgcattaaatactttgccagcactgcctttgccagcatcctaaatctggagttttacaaagaaggaaactgtatctttaggttaatcaaagctatgcatttcatatagctttttcatttaaaacaagacaaagaaacaaattcctatgaccaaattgcttgcctacagttccctgcagtaattgtatgatctcacccagtgtgcaatttgtgaaaatgaaccaaatgtcattacttttgtcttaaagaaaagtctatttcaagaatatgaacagcagtgtttccttgtacatgtcaccttttttcacattttcattaatcagaatgaccttattgagcctactcctggggtcaattgcatttcaaactaatccaatatttagtgtttcacagaaacactagaaaacgttgaacactcctactgcctggatatatggtagtgcagttatgttgtttatggctcaagatgtcattagaaatactgcagtggtgtattcacagctgctccttctctgaatgaaagagtgtagggacacctgccaccatggccagaccctgactgaatttcacattaaggctttggaaaggagcaaataataatgggagaattaactccaaaactttgacctgaatca

SEQ ID NO: 59151 - DNA, 1908 bp, Homo sapiens
agctcgcgcgggggaagcggggctgtagctgggcagggagagggcggacgaaatcggtagcgatctcggctgcggcgctgccgcagctgcccggcccgcggggcgcgccctgacccttcatctttgggcaggctcgagggcgcgcgcacggttggcgttctggggcctcaaactcctgggccttgaccgggcaggccgcgtctccccgggtgtgagtccaccgggacccggccgccgcctaagcgcgggcgccacagaagcggcggcgcccgaagacgcgctcctggctcggcccgacagcctcgcttggccgccagttcttctgcagccgaaggcggttgttcttttaaagaattattgaagacgaaggtttttttctttttatttttttaatggctttacagaatcttaaatagaatacagtttgacatgacggcaaaaaatgttggtttgacttccacaaatgcagaagtaagaggatttatagatcagaatctcagtccaacaaaaggtaagcaacatttcatttgttgcatttccagtttccaataccaactcacctacaaagattttaccaaaaaccttaggaccaataaatgtgaatgttggaccccaaatggatgcaaccagaaggcatcatctttgaagcagagaataaaccctcaccaggcactgaatctgccggcactttcattttggacctctcagcaacctccagaacaattataagcacaccacagagactaaccagttcaggaagtgttctgattgggagtccatatacccctgcaccagcaatggttactcagacacacatagcagaagctactggctgggtccctggtgatagaaaacgggctagaaaatttatagactctgatttttcagaaagtaaacgaagcaaaaaaggagataaaaatgggaaaggcttgagacacttttcaatgaaagtgtgtgagaaagttcaacgaaaaggtacaacatcgtacaatgaagtcgctgatgagctggtgtcagagttcaccaattcaaataaccatttggctgctgattcggcttatgatcagaagaacattaggcgaagagtttatgatgctttaaatgtgctaatggcaatgaacataatttcaaaggaaaaaaaagaaatcaagtggattggcctgcctaccaattctgctcaggaatgtcagaatctggagatagagaagcagaggcggatagaacggataaagcagaagcgggcccagctgcaagaacttctcctacagcaaatcgctttcaaaaacctggtacagagaaatcgacaaaatgagcagcaaaaccagggcccgccggctctgaactctaccattcagctgccattcataatcatcaatacaagcagaaaaacagtcatagattgcagcatctccagtgacaagtttgagtatcttttcaattttgacaacacctttgagatccatgatgacatagaagtactaaagcggatgggaatgtcgtttggcctggagtcaggcaaatgctctctggaggatctgaaacttgcgaaatccctggtgccaaaggctttagaaggttatatcacagatatctccacaggaccttcttggttaaatcagggactacttctgaactctacccaatcagtttcaaatttagacctgaccactggtgccaccttaccccagtcaagtgtaaaccaagggttatgcttggatgcagaagtggccttagcaactgggcagttcctggccccaaacagtcaccagtccagcagtgcggcctctcactgctccgagtcccgaggcgagaccccctgttcgttcaatgatgaagatgaggaagatgatgaggaggattcctcctccccagaataaagacaagagaaagcctacgtttcaatatgtg

SEQ ID NO: 59152 - DNA, 1130 bp, Homo sapiens
agcgtggtagaatgttgttggtactgcagtgagaggcatgcttccttagaccaggcaacatttcatttgttgcatttccagtttccaataccaactcacctacaaagattttaccaaaaaccttaggaccaataaatgtgaatgttggaccccaaatgattataagcacaccacagagactaaccagttcaggaagtgttctgattgggagtccatatacccctgcaccagcaatggttactcagacacacatagcagaagctactggctgggtccctggtgatagaaaacgggctagaaaatttatagactctgatttttcagaaagtaaacgaagcaaaaaaggagataaaaatgggaaaggcttgagacacttttcaatgaaagtgtgtgagaaagttcaacgaaaaggtacaacatcgtacaatgaagtcgctgatgagctggtgtcagagttcaccaattcaaataaccatttggctgctgattcggcttatgatcagaagaacattaggcgaagagtttatgatgctttaaatgtgctaatggcaatgaacataatttcaaaggaaaaaaaagaaatcaagtggattggcctgcctaccaattctgctcaggaatgtcagaatctggagatagagaagcagaggcggatagaacggataaagcagaagcgggcccagctgcaagaacttctcctacagcaaatcgctttcaaaaacctggtacagagaaatcgacaaaatgagcagcaaaaccagggcccgccggctctgaactctaccattcagctgccattcataatcatcaatacaagcagaaaaacagtcatagattgcagcatctccagtgacaagtttgagtatcttttcaattttgacaacacctttgagatccatgatgacatagaagtactaaagcggatgggaatctgtatttgtaatgaactctggtgttttttgtccattaaagtgtatctttgtccatcctataagattaaaggaaagaaaaagcatctcaaatgagtgtaagttgttcttgagaaaaaaatgtatcagacttttatgatttgaatgaaatgtattatagaaaaaaataaacactttaaaataatgttagtctcattacta

SEQ ID NO: 59153 - DNA, 1062 bp, Homo sapiens
agctcgcgcgggggaagcggggctgtagctgggcagggagagggcggacgaaatcggtagcgatctcggctgcggcgctgccgcagctgcccggcccgcggggcgcgccctgacccttcatctttgggcaggctcgagggcgcgcgcacggttggcgttctggggcctcaaactcctgggccttgaccgggcaggccgcgtctccccgggtgtgagtccaccgggacccggccgccgcctaagcgcgggcgccacagaagcggcggcgcccgaagacgcgctcctggctcggcccgacagcctcgcttggccgccagttcttctgcagccgaaggcggttgttcttttaaagaattattgaagacgaaggtttttttctttttatttttttaatggctttacagaatcttaaatagaatacagtttgacatgacggcaaaaaatgttggtttgacttccacaaatgcagaagtaagaggatttatagatcagaatctcagtccaacaaaaggtaaatacctagaagtggaattgctgggtcatatggcaacatttcatttgttgcatttccagtttccaataccaactcacctacaaagattttaccaaaaaccttaggaccaataaatgtgaatgttggaccccaaatgattataagcacaccacagagactaaccagttcaggaagtgttctgattgggagtccatatacccctgcaccagcaatggttactcagacacacatagcagaagctactggctgggtccctggtgatagaaaacgggctagaaaatttatagactctgatttttcagaaagtaaacgaagcaaaaaaggagataaaaatgggaaaggcttgagacacttttcaatgaaagtgtgtgagaaagttcaacgaaaaggtacaacatcgtacaatgaagtcgctgatgagctggtgtcagagttcaccaattcaaataaccatttggctgctgattcggcttatgatcagaagaacattaggcgaagagtttatgatgctttaaatgtgctaatggcaatgaacataatttcaaagg

SEQ ID NO: 59154 - DNA, 328 bp, Homo sapiens
gtatgttaactgatgctttcatgtgttgtccctgattaaatgttgaatccaaacttgttaaaacctttcttatagaaaattgcaaaattttagaacatctgtgcttgtgtcgacaaactgaaacctttaacactttaggaccattttttcaaaaattagattaaatagtttgtttcataacattatgaacttacatctatacaccacacattatatactattacatctaaattggctcactcagcactgaatttggctcttcagagagatcttgtaattcccagtacctagcttagagcctagttagagtaagctagtaaaagctcaa

SEQ ID NO: 59155 - DNA, 295 bp, Homo sapiens
attgggaaagtgttttatttgagatgtcattcccctgacagagcagaatgactcatggctctctaaatggtagcaatttctagcactatagctggatttaggcccccattctgttacttaaactatagaatacaaaactattcagacctctccagcaccaccaaaaaccctttactttgtttcctgatgcaggtttgagtatcttttcaattttgacaacacctttgagatccatgatgacatagaagtactaaagcggatgggaatgtcgtttggcctggagtcaggcaaatgc

SEQ ID NO: 59156 - DNA, 3140 bp, Homo sapiens
agctcgcgcgggggaagcggggctgtagctgggcagggagagggcggacgaaatcggtagcgatctcggctgcggcgctgccgcagctgcccggcccgcggggcgcgccctgacccttcatctttgggcaggctcgagggcgcgcgcacggttggcgttctggggcctcaaactcctgggccttgaccgggcaggccgcgtctccccgggtgtgagtccaccgggacccggccgccgcctaagcgcgggcgccacagaagcggcggcgcccgaagacgcgctcctggctcggcccgacagcctcgcttggccgccagttcttctgcagccgaaggcggttgttcttttaaagaattattgaagacgaaggtttttttctttttatttttttaatggctttacagaatcttaaatagaatacagtttgacatgacggcaaaaaatgttggtttgacttccacaaatgcagaagtaagaggatttatagatcagaatctcagtccaacaaaaggtaagcaacatttcatttgttgcatttccagtttccaataccaactcacctacaaagattttaccaaaaaccttaggaccaataaatgtgaatgttggaccccaaatgattataagcacaccacagagactaaccagttcaggaagtgttctgattgggagtccatatacccctgcaccagcaatggttactcagacacacatagcagaagctactggctgggtccctggtgatagaaaacgggctagaaaatttatagactctgatttttcagaaagtaaacgaagcaaaaaaggagataaaaatgggaaaggcttgagacacttttcaatgaaagtgtgtgagaaagttcaacgaaaaggtacaacatcgtacaatgaagtcgctgatgagctggtgtcagagttcaccaattcaaataaccatttggctgctgattcggcttatgatcagaagaacattaggcgaagagtttatgatgctttaaatgtgctaatggcaatgaacataatttcaaaggaaaaaaaagaaatcaagtggattggcctgcctaccaattctgctcaggaatgtcagaatctggagatagagaagcagaggcggatagaacggataaagcagaagcgggcccagctgcaagaacttctcctacagcaaatcgctttcaaaaacctggtacagagaaatcgacaaaatgagcagcaaaaccagggcccgccggctctgaactctaccattcagctgccattcataatcatcaatacaagcagaaaaacagtcatagattgcagcatctccagtgacaagtttgagtatcttttcaattttgacaacacctttgagatccatgatgacatagaagtactaaagcggatgggaatgtcgtttggcctggagtcaggcaaatgctctctggaggatctgaaacttgcgaaatccctggtgccaaaggctttagaaggttatatcacagatatctccacaggaccttcttggttaaatcagggactacttctgaactctacccaatcagtttcaaatttagacctgaccactggtgccaccttaccccagtcaagtgtaaaccaagggttatgcttggatgcagaagtggccttagcaactgggcagttcctggccccaaacagtcaccagtccagcagtgcggcctctcactgctccgagtcccgaggcgagaccccctgttcgttcaatgatgaagatgaggaagatgatgaggaggattcctcctccccagaataaagacaagagaaagcctacgtttcaatatgtgatgctcatgtgtgtttgtagtgtgagctcttgtttttgaaatgattgcttcagtctttgcctttgtttgcactgtgtgttcagtgaaaactagagaaacacaataagcaaatcacatgaaggctgagatgattgagatgaaagttaacatagtgtgaatgaaagtctggccaacagagcagtagatgatataacaaagaaagcatgctttctgaggagatagtggggataatccctgaagagttggcagtgtgagtgcaactcatttatcttctgtgaggtgggatttttgtgttcctcacacccatgtaattattcttagaattgagattgctacacggagcagtccttgacgatcgtgtttctgacgtttctcttccttgcctggactgcctttgacaaggcagaaatgaacatgaaaagtccccaggagaggggagctgtgtagtgagggatactgagggcagtcctgtggctgaggggcacagattgaactgctgaactagttggaggtctagatgaggtgctttacgcatcagctgccttagacagcttctagaaaggagcgagcgctacttcttaagtacttaagtgacatttagataatttatagtaaaactgaaattattattagccaatgcattggtgcatagaatttactagggctacttctggaagccaaaatagaatagcatttccatgtgcattaaatactttgccagcactgcctttgccagcatcctaaatctggagttttacaaagaaggaaactgtatctttaggttaatcaaagctatgcatttcatatagctttttcatttaaaacaagacaaagaaacaaattcctatgaccaaattgcttgcctacagttccctgcagtaattgtatgatctcacccagtgtgcaatttgtgaaaatgaaccaaatgtcattacttttgtcttaaagaaaagtctatttcaagaatatgaacagcagtgtttccttgtacatgtcaccttttttcacattttcattaatcagaatgaccttattgagcctactcctggggtcaattgcatttcaaactaatccaatatttagtgtttcacagaaacactagaaaacgttgaacactcctactgcctggatatatggtagtgcagttatgttgtttatggctcaagatgtcattagaaatactgcagtggtgtattcacagctgctccttctctgaatgaaagagtgtagggacacctgccaccatggccagaccctgactgaatttcacattaaggctttggaaaggagcaaataataatgggagaattaactccaaaactttgacctgaatca

SEQ ID NO: 59157 - DNA, 2684 bp, Homo sapiens
ctgctttggagccagcagatactctgatatgtataattcaaattatgcaggtttcacgagcaacatttcatttgttgcatttccagtttccaataccaactcacctacaaagattttaccaaaaaccttaggaccaataaatgtgaatgttggaccccaaatgattataagcacaccacagagactaaccagttcaggaagtgttctgattgggagtccatatacccctgcaccagcaatggttactcagacacacatagcagaagctactggctgggtccctggtgatagaaaacgggctagaaaatttatagactctgatttttcagaaagtaaacgaagcaaaaaaggagataaaaatgggaaaggcttgagacacttttcaatgaaagtgtgtgagaaagttcaacgaaaaggtacaacatcgtacaatgaagtcgctgatgagctggtgtcagagttcaccaattcaaataaccatttggctgctgattcggcttatgatcagaagaacattaggcgaagagtttatgatgctttaaatgtgctaatggcaatgaacataatttcaaaggaaaaaaaagaaatcaagtggattggcctgcctaccaattctgctcaggaatgtcagaatctggagatagagaagcagaggcggatagaacggataaagcagaagcgggcccagctgcaagaacttctcctacagcaaatcgctttcaaaaacctggtacagagaaatcgacaaaatgagcagcaaaaccagggcccgccggctctgaactctaccattcagctgccattcataatcatcaatacaagcagaaaaacagtcatagattgcagcatctccagtgacaagtttgagtatcttttcaattttgacaacacctttgagatccatgatgacatagaagtactaaagcggatgggaatgtcgtttggcctggagtcaggcaaatgctctctggaggatctgaaacttgcgaaatccctggtgccaaaggctttagaaggttatatcacagatatctccacaggaccttcttggttaaatcagggactacttctgaactctacccaatcagtttcaaatttagacctgaccactggtgccaccttaccccagtcaagtgtaaaccaagggttatgcttggatgcagaagtggccttagcaactgggcagttcctggccccaaacagtcaccagtccagcagtgcggcctctcactgctccgagtcccgaggcgagaccccctgttcgttcaatgatgaagatgaggaagatgatgaggaggattcctcctccccagaataaagacaagagaaagcctacgtttcaatatgtgatgctcatgtgtgtttgtagtgtgagctcttgtttttgaaatgattgcttcagtctttgcctttgtttgcactgtgtgttcagtgaaaactagagaaacacaataagcaaatcacatgaaggctgagatgattgagatgaaagttaacatagtgtgaatgaaagtctggccaacagagcagtagatgatataacaaagaaagcatgctttctgaggagatagtggggataatccctgaagagttggcagtgtgagtgcaactcatttatcttctgtgaggtgggatttttgtgttcctcacacccatgtaattattcttagaattgagattgctacacggagcagtccttgacgatcgtgtttctgacgtttctcttccttgcctggactgcctttgacaaggcagaaatgaacatgaaaagtccccaggagaggggagctgtgtagtgagggatactgagggcagtcctgtggctgaggggcacagattgaactgctgaactagttggaggtctagatgaggtgctttacgcatcagctgccttagacagcttctagaaaggagcgagcgctacttcttaagtacttaagtgacatttagataatttatagtaaaactgaaattattattagccaatgcattggtgcatagaatttactagggctacttctggaagccaaaatagaatagcatttccatgtgcattaaatactttgccagcactgcctttgccagcatcctaaatctggagttttacaaagaaggaaactgtatctttaggttaatcaaagctatgcatttcatatagctttttcatttaaaacaagacaaagaaacaaattcctatgaccaaattgcttgcctacagttccctgcagtaattgtatgatctcacccagtgtgcaatttgtgaaaatgaaccaaatgtcattacttttgtcttaaagaaaagtctatttcaagaatatgaacagcagtgtttccttgtacatgtcaccttttttcacattttcattaatcagaatgaccttattgagcctactcctggggtcaattgcatttcaaactaatccaatatttagtgtttcacagaaacactagaaaacgttgaacactcctactgcctggatatatggtagtgcagttatgttgtttatggctcaagatgtcattagaaatactgcagtggtgtattcacagctgctccttctctgaatgaaagagtgtagggacacctgccaccatggccagaccctgactgaatttcacattaaggctttggaaaggagcaaataataatgggagaattaactccaaaactttgacctgaatca

SEQ ID NO: 59158 - DNA, 2672 bp, Homo sapiens
ctgtaatcccagcactttggggggccaaggtgggcggatcacctgaggcaacatttcatttgttgcatttccagtttccaataccaactcacctacaaagattttaccaaaaaccttaggaccaataaatgtgaatgttggaccccaaatgattataagcacaccacagagactaaccagttcaggaagtgttctgattgggagtccatatacccctgcaccagcaatggttactcagacacacatagcagaagctactggctgggtccctggtgatagaaaacgggctagaaaatttatagactctgatttttcagaaagtaaacgaagcaaaaaaggagataaaaatgggaaaggcttgagacacttttcaatgaaagtgtgtgagaaagttcaacgaaaaggtacaacatcgtacaatgaagtcgctgatgagctggtgtcagagttcaccaattcaaataaccatttggctgctgattcggcttatgatcagaagaacattaggcgaagagtttatgatgctttaaatgtgctaatggcaatgaacataatttcaaaggaaaaaaaagaaatcaagtggattggcctgcctaccaattctgctcaggaatgtcagaatctggagatagagaagcagaggcggatagaacggataaagcagaagcgggcccagctgcaagaacttctcctacagcaaatcgctttcaaaaacctggtacagagaaatcgacaaaatgagcagcaaaaccagggcccgccggctctgaactctaccattcagctgccattcataatcatcaatacaagcagaaaaacagtcatagattgcagcatctccagtgacaagtttgagtatcttttcaattttgacaacacctttgagatccatgatgacatagaagtactaaagcggatgggaatgtcgtttggcctggagtcaggcaaatgctctctggaggatctgaaacttgcgaaatccctggtgccaaaggctttagaaggttatatcacagatatctccacaggaccttcttggttaaatcagggactacttctgaactctacccaatcagtttcaaatttagacctgaccactggtgccaccttaccccagtcaagtgtaaaccaagggttatgcttggatgcagaagtggccttagcaactgggcagttcctggccccaaacagtcaccagtccagcagtgcggcctctcactgctccgagtcccgaggcgagaccccctgttcgttcaatgatgaagatgaggaagatgatgaggaggattcctcctccccagaataaagacaagagaaagcctacgtttcaatatgtgatgctcatgtgtgtttgtagtgtgagctcttgtttttgaaatgattgcttcagtctttgcctttgtttgcactgtgtgttcagtgaaaactagagaaacacaataagcaaatcacatgaaggctgagatgattgagatgaaagttaacatagtgtgaatgaaagtctggccaacagagcagtagatgatataacaaagaaagcatgctttctgaggagatagtggggataatccctgaagagttggcagtgtgagtgcaactcatttatcttctgtgaggtgggatttttgtgttcctcacacccatgtaattattcttagaattgagattgctacacggagcagtccttgacgatcgtgtttctgacgtttctcttccttgcctggactgcctttgacaaggcagaaatgaacatgaaaagtccccaggagaggggagctgtgtagtgagggatactgagggcagtcctgtggctgaggggcacagattgaactgctgaactagttggaggtctagatgaggtgctttacgcatcagctgccttagacagcttctagaaaggagcgagcgctacttcttaagtacttaagtgacatttagataatttatagtaaaactgaaattattattagccaatgcattggtgcatagaatttactagggctacttctggaagccaaaatagaatagcatttccatgtgcattaaatactttgccagcactgcctttgccagcatcctaaatctggagttttacaaagaaggaaactgtatctttaggttaatcaaagctatgcatttcatatagctttttcatttaaaacaagacaaagaaacaaattcctatgaccaaattgcttgcctacagttccctgcagtaattgtatgatctcacccagtgtgcaatttgtgaaaatgaaccaaatgtcattacttttgtcttaaagaaaagtctatttcaagaatatgaacagcagtgtttccttgtacatgtcaccttttttcacattttcattaatcagaatgaccttattgagcctactcctggggtcaattgcatttcaaactaatccaatatttagtgtttcacagaaacactagaaaacgttgaacactcctactgcctggatatatggtagtgcagttatgttgtttatggctcaagatgtcattagaaatactgcagtggtgtattcacagctgctccttctctgaatgaaagagtgtagggacacctgccaccatggccagaccctgactgaatttcacattaaggctttggaaaggagcaaataataatgggagaattaactccaaaactttgacctgaatca

SEQ ID NO: 59159 - DNA, 3243 bp, Homo sapiens
agctcgcgcgggggaagcggggctgtagctgggcagggagagggcggacgaaatcggtagcgatctcggctgcggcgctgccgcagctgcccggcccgcggggcgcgccctgacccttcatctttgggcaggctcgagggcgcgcgcacggttggcgttctggggcctcaaactcctgggccttgaccgggcaggccgcgtctccccgggtgtgagtccaccgggacccggccgccgcctaagcgcgggcgccacagaagcggcggcgcccgaagacgcgctcctggctcggcccgacagcctcgcttggccgccagttcttctgcagccgaaggcggttgttcttttaaagaattattgaagacgaaggtttttttctttttatttttttaatggctttacagaatcttaaatagaatacagtttgacatgacggcaaaaaatgttggtttgacttccacaaatgcagaagtaagaggatttatagatcagaatctcagtccaacaaaaggtaagcaacatttcatttgttgcatttccagtttccaataccaactcacctacaaagattttaccaaaaaccttaggaccaataaatgtgaatgttggaccccaaatggatgcaaccagaaggcatcatctttgaagcagagaataaaccctcaccaggcactgaatctgccggcactttcattttggacctctcagcaacctccagaacaattataagcacaccacagagactaaccagttcaggaagtgttctgattgggagtccatatacccctgcaccagcaatggttactcagacacacatagcagaagctactggctgggtccctggtgatagaaaacgggctagaaaatttatagactctgatttttcagaaagtaaacgaagcaaaaaaggagataaaaatgggaaaggcttgagacacttttcaatgaaagtgtgtgagaaagttcaacgaaaaggtacaacatcgtacaatgaagtcgctgatgagctggtgtcagagttcaccaattcaaataaccatttggctgctgattcggcttatgatcagaagaacattaggcgaagagtttatgatgctttaaatgtgctaatggcaatgaacataatttcaaaggaaaaaaaagaaatcaagtggattggcctgcctaccaattctgctcaggaatgtcagaatctggagatagagaagcagaggcggatagaacggataaagcagaagcgggcccagctgcaagaacttctcctacagcaaatcgctttcaaaaacctggtacagagaaatcgacaaaatgagcagcaaaaccagggcccgccggctctgaactctaccattcagctgccattcataatcatcaatacaagcagaaaaacagtcatagattgcagcatctccagtgacaagtttgagtatcttttcaattttgacaacacctttgagatccatgatgacatagaagtactaaagcggatgggaatgtcgtttggcctggagtcaggcaaatgctctctggaggatctgaaacttgcgaaatccctggtgccaaaggctttagaaggttatatcacagatatctccacaggaccttcttggttaaatcagggactacttctgaactctacccaatcagtttcaaatttagacctgaccactggtgccaccttaccccagtcaagtgtaaaccaagggttatgcttggatgcagaagtggccttagcaactgggcagttcctggccccaaacagtcaccagtccagcagtgcggcctctcactgctccgagtcccgaggcgagaccccctgttcgttcaatgatgaagatgaggaagatgatgaggaggattcctcctccccagaataaagacaagagaaagcctacgtttcaatatgtgatgctcatgtgtgtttgtagtgtgagctcttgtttttgaaatgattgcttcagtctttgcctttgtttgcactgtgtgttcagtgaaaactagagaaacacaataagcaaatcacatgaaggctgagatgattgagatgaaagttaacatagtgtgaatgaaagtctggccaacagagcagtagatgatataacaaagaaagcatgctttctgaggagatagtggggataatccctgaagagttggcagtgtgagtgcaactcatttatcttctgtgaggtgggatttttgtgttcctcacacccatgtaattattcttagaattgagattgctacacggagcagtccttgacgatcgtgtttctgacgtttctcttccttgcctggactgcctttgacaaggcagaaatgaacatgaaaagtccccaggagaggggagctgtgtagtgagggatactgagggcagtcctgtggctgaggggcacagattgaactgctgaactagttggaggtctagatgaggtgctttacgcatcagctgccttagacagcttctagaaaggagcgagcgctacttcttaagtacttaagtgacatttagataatttatagtaaaactgaaattattattagccaatgcattggtgcatagaatttactagggctacttctggaagccaaaatagaatagcatttccatgtgcattaaatactttgccagcactgcctttgccagcatcctaaatctggagttttacaaagaaggaaactgtatctttaggttaatcaaagctatgcatttcatatagctttttcatttaaaacaagacaaagaaacaaattcctatgaccaaattgcttgcctacagttccctgcagtaattgtatgatctcacccagtgtgcaatttgtgaaaatgaaccaaatgtcattacttttgtcttaaagaaaagtctatttcaagaatatgaacagcagtgtttccttgtacatgtcaccttttttcacattttcattaatcagaatgaccttattgagcctactcctggggtcaattgcatttcaaactaatccaatatttagtgtttcacagaaacactagaaaacgttgaacactcctactgcctggatatatggtagtgcagttatgttgtttatggctcaagatgtcattagaaatactgcagtggtgtattcacagctgctccttctctgaatgaaagagtgtagggacacctgccaccatggccagaccctgactgaatttcacattaaggctttggaaaggagcaaataataatgggagaattaactccaaaactttgacctgaatca

SEQ ID NO: 59160 - DNA, 2575 bp, Homo sapiens
agcgtggtagaatgttgttggtactgcagtgagaggcatgcttccttagaccagattataagcacaccacagagactaaccagttcaggaagtgttctgattgggagtccatatacccctgcaccagcaatggttactcagacacacatagcagaagctactggctgggtccctggtgatagaaaacgggctagaaaatttatagactctgatttttcagaaagtaaacgaagcaaaaaaggagataaaaatgggaaaggcttgagacacttttcaatgaaagtgtgtgagaaagttcaacgaaaaggtacaacatcgtacaatgaagtcgctgatgagctggtgtcagagttcaccaattcaaataaccatttggctgctgattcggcttatgatcagaagaacattaggcgaagagtttatgatgctttaaatgtgctaatggcaatgaacataatttcaaaggaaaaaaaagaaatcaagtggattggcctgcctaccaattctgctcaggaatgtcagaatctggagatagagaagcagaggcggatagaacggataaagcagaagcgggcccagctgcaagaacttctcctacagcaaatcgctttcaaaaacctggtacagagaaatcgacaaaatgagcagcaaaaccagggcccgccggctctgaactctaccattcagctgccattcataatcatcaatacaagcagaaaaacagtcatagattgcagcatctccagtgacaagtttgagtatcttttcaattttgacaacacctttgagatccatgatgacatagaagtactaaagcggatgggaatgtcgtttggcctggagtcaggcaaatgctctctggaggatctgaaacttgcgaaatccctggtgccaaaggctttagaaggttatatcacagatatctccacaggaccttcttggttaaatcagggactacttctgaactctacccaatcagtttcaaatttagacctgaccactggtgccaccttaccccagtcaagtgtaaaccaagggttatgcttggatgcagaagtggccttagcaactgggcagttcctggccccaaacagtcaccagtccagcagtgcggcctctcactgctccgagtcccgaggcgagaccccctgttcgttcaatgatgaagatgaggaagatgatgaggaggattcctcctccccagaataaagacaagagaaagcctacgtttcaatatgtgatgctcatgtgtgtttgtagtgtgagctcttgtttttgaaatgattgcttcagtctttgcctttgtttgcactgtgtgttcagtgaaaactagagaaacacaataagcaaatcacatgaaggctgagatgattgagatgaaagttaacatagtgtgaatgaaagtctggccaacagagcagtagatgatataacaaagaaagcatgctttctgaggagatagtggggataatccctgaagagttggcagtgtgagtgcaactcatttatcttctgtgaggtgggatttttgtgttcctcacacccatgtaattattcttagaattgagattgctacacggagcagtccttgacgatcgtgtttctgacgtttctcttccttgcctggactgcctttgacaaggcagaaatgaacatgaaaagtccccaggagaggggagctgtgtagtgagggatactgagggcagtcctgtggctgaggggcacagattgaactgctgaactagttggaggtctagatgaggtgctttacgcatcagctgccttagacagcttctagaaaggagcgagcgctacttcttaagtacttaagtgacatttagataatttatagtaaaactgaaattattattagccaatgcattggtgcatagaatttactagggctacttctggaagccaaaatagaatagcatttccatgtgcattaaatactttgccagcactgcctttgccagcatcctaaatctggagttttacaaagaaggaaactgtatctttaggttaatcaaagctatgcatttcatatagctttttcatttaaaacaagacaaagaaacaaattcctatgaccaaattgcttgcctacagttccctgcagtaattgtatgatctcacccagtgtgcaatttgtgaaaatgaaccaaatgtcattacttttgtcttaaagaaaagtctatttcaagaatatgaacagcagtgtttccttgtacatgtcaccttttttcacattttcattaatcagaatgaccttattgagcctactcctggggtcaattgcatttcaaactaatccaatatttagtgtttcacagaaacactagaaaacgttgaacactcctactgcctggatatatggtagtgcagttatgttgtttatggctcaagatgtcattagaaatactgcagtggtgtattcacagctgctccttctctgaatgaaagagtgtagggacacctgccaccatggccagaccctgactgaatttcacattaaggctttggaaaggagcaaataataatgggagaattaactccaaaactttgacctgaatca

SEQ ID NO: 59161 - DNA, 1211 bp, Homo sapiens
agcgtggtagaatgttgttggtactgcagtgagaggcatgcttccttagaccaggcaacatttcatttgttgcatttccagtttccaataccaactcacctacaaagattttaccaaaaaccttaggaccaataaatgtgaatgttggaccccaaatgattataagcacaccacagagactaaccagttcaggaagtgttctgattgggagtccatatacccctgcaccagcaatggttactcagacacacatagcagaagctactggctgggtccctggtgatagaaaacgggctagaaaatttatagactctgatttttcagaaagtaaacgaagcaaaaaaggagataaaaatgggaaaggcttgagacacttttcaatgaaagtgtgtgagaaagttcaacgaaaaggtacaacatcgtacaatgaagtcgctgatgagctggtgtcagagttcaccaattcaaataaccatttggctgctgattcggcttatgatcagaagaacattaggcgaagagtttatgatgctttaaatgtgctaatggcaatgaacataatttcaaaggaaaaaaaagaaatcaagtggattggcctgcctaccaattctgctcaggaatgtcagaatctggagatagagaagcagaggcggatagaacggataaagcagaagcgggcccagctgcaagaacttctcctacagcaaatcgctttcaaaaacctggtacagagaaatcgacaaaatgagcagcaaaaccagggcccgccggctctgaactctaccattcagctgccattcataatcatcaatacaagcagaaaaacagtcatagattgcagcatctccagtgacaagtttgagtatcttttcaattttgacaacacctttgagatccatgatgacatagaagtactaaagcggatgggaatgtcgtttggcctggagtcaggcaaatgctctctggaggatctgaaacttgcgaaatccctggtgccaaaggctttagaaggttatatcacagatatctccacaggaccttcttggttaaatcagggactacttctgaactctacccaatcagtttcaaatttagacctgaccactggtgccaccttaccccagtcaaggtacgtatttttttcagggttagaaaggcaaaccccagagccctgactgtctgtgtaggggtgagccggggtcatgttactg

SEQ ID NO: 59162 - DNA, 1951 bp, Homo sapiens
gtcgtctgataaggggaagctgtgacgcagacacgcacagtaatacacagatggaggctcaaaagacacgagtttcgcgtcctgaaattccgcttccagggccaagctttcttttctgatactgtttgtccctcgcgaggcaccgttgggtcgcgcagtaggcgtgactaggggcgggaagtggggcgggagcagggccgcggagcctgggctgcggctgtcatggacgcctgggtccgcttcagtgctcagagccaagcccgggagcggctgtgtagggccgcccagtatgcttgctctcttcttggccatgcgctgcagaggcatggagccagtcctgagttacagaaacagattcgacaactggagagccacctgagccttggaagaaagcttctacgcctgggtaactcagcagatgcccttgagtcagccaaaagagctgttcacctatcagatgttgtcctgagattctgcatcactgttagtcacctcaatcgagccttgtacttcgcctgtgacaatgtcctgtgggctggaaagtctggactggctccccgtgtggatcaggagaagtgggcccagcgttcattcaggtactatttgttttccctcatcatgaatttgagccgtgatgcttatgagattcgcctactgatggagcaagagtcttctgcttgtagccggcgactgaaaggttctggaggaggagtcccaggaggaagtgaaactgggggacttgggggaccagggactccaggaggaggtctgccccaactggctctgaaacttcggctgcaagtcctgctcctggctcgagtccttagaggtcatcccccacttctgctagacgtggtcagaaatgcctgtgatctcttcattcctctggacaaactaggcctctggcgctgtggccctgggattgtggggctttgtggcctcgtgtcctccatcctgtctattctcaccctaatctatccctggctacgactcaagccctgaccttccggtacaggataaggaggggacctgaattggtgagatggaatcttagatcgtcccccatgtgccagcctcattcgaattctactctttggttaaagttagaaattcagagatttaggggtggaggaagagctttggggaagatgaggtaaggaaagatgactcgtgaagttaataggatgtctctaatttctagatgtgcctgagcttctgttcttttcctctttctttgtgtctctcttgaatatatttactttgtgtctcttaactctgtttaaggttctgtgtctatgcatctctctctttcttttttcaaccttctcattctcctatccagggatttaatcagcagaattactttttgataggggaggtataaggtttggcctgtaaggttctaactgccttcttttttctcacagaggtggcttatggcagatttttcctccttcaaactccaaacataatttttaagactatgtgccagtggactcttcccttatatctctgcaccacaagttgttggatgtttcctcttcctcccttatgtctacctcaccaacctcgctcatcatttggcccttatccttccttgtacacctaccttcagatttctgcttacactttgatttcagagctttattccccagtctgttcttactcctttgtcgcttatccagaatgatgctatgtgtagcatcttgctgtaaatcctgtacaatgattctgtgtaaatagctgtggcctatgccaataatgaagagcaagcctttcaggtaagcaaattaaagttcagtttgctcatcgacaaaaaaaaaggggggtcaaagtcccgggccatacgcgtcccgttgtaaggccaagaggttaaaagggggaacggagagcgtcttagacttgtggggaccgaacggaattgggtgcgggaggagacagagacgtgcag

SEQ ID NO: 59163 - DNA, 1502 bp, Homo sapiens
gttaggctagtacgaggcttgggtgttggttacagaaacagattcgacaactggagagccacctgagccttggaagaaagcttctacgcctgggtaactcagcagatgcccttgagtcagccaaaagagctgttcacctatcagatgttgtcctgagattctgcatcactgttagtcacctcaatcgagccttgtacttcgcctgtgacaatgtcctgtgggctggaaagtctggactggctccccgtgtggatcaggagaagtgggcccagcgttcattcaggtactatttgttttccctcatcatgaatttgagccgtgatgcttatgagattcgcctactgatggagcaagagtcttctgcttgtagccggcgactgaaaggttctggaggaggagtcccaggaggaagtgaaactgggggacttgggggaccagggactccaggaggaggtctgccccaactggctctgaaacttcggctgcaagtcctgctcctggctcgagtccttagaggtcatcccccacttctgctagacgtggtcagaaatgcctgtgatctcttcattcctctggacaaactaggcctctggcgctgtggccctgggattgtggggctttgtggcctcgtgtcctccatcctgtctattctcaccctaatctatccctggctacgactcaagccctgaccttccggtacaggataaggaggggacctgaattggtgagatggaatcttagatcgtcccccatgtgccagcctcattcgaattctactctttggttaaagttagaaattcagagatttaggggtggaggaagagctttggggaagatgaggtaaggaaagatgactcgtgaagttaataggatgtctctaatttctagatgtgcctgagcttctgttcttttcctctttctttgtgtctctcttgaatatatttactttgtgtctcttaactctgtttaaggttctgtgtctatgcatctctctctttcttttttcaaccttctcattctcctatccagggatttaatcagcagaattactttttgataggggaggtataaggtttggcctgtaaggttctaactgccttcttttttctcacagaggtggcttatggcagatttttcctccttcaaactccaaacataatttttaagactatgtgccagtggactcttcccttatatctctgcaccacaagttgttggatgtttcctcttcctcccttatgtctacctcaccaacctcgctcatcatttggcccttatccttccttgtacacctaccttcagatttctgcttacactttgatttcagagctttattccccagtctgttcttactcctttgtcgcttatccagaatgatgctatgtgtagcatcttgctgtaaatcctgtacaatgattctgtgtaaatagctgtggcctatgccaataatgaagagcaagcctttcaggtaagcaaattaaagttcagtttgctcatcgaca

SEQ ID NO: 59164 - DNA, 1587 bp, Homo sapiens
cgctgttgagatgattcctttccgttcgcggaagagatggggaaactgagggccgcccagtatgcttgctctcttcttggccatgcgctgcagaggcatggagccagtcctgagttacagaaacagattcgacaactggagagccacctgagccttggaagaaagcttctacgcctgggtaactcagcagatgcccttgagtcagccaaaagagctgttcacctatcagatgttgtcctgagattctgcatcactgttagtcacctcaatcgagccttgtacttcgcctgtgacaatgtcctgtgggctggaaagtctggactggctccccgtgtggatcaggagaagtgggcccagcgttcattcaggtactatttgttttccctcatcatgaatttgagccgtgatgcttatgagattcgcctactgatggagcaagagtcttctgcttgtagccggcgactgaaaggttctggaggaggagtcccaggaggaagtgaaactgggggacttgggggaccagggactccaggaggaggtctgccccaactggctctgaaacttcggctgcaagtcctgctcctggctcgagtccttagaggtcatcccccacttctgctagacgtggtcagaaatgcctgtgatctcttcattcctctggacaaactaggcctctggcgctgtggccctgggattgtggggctttgtggcctcgtgtcctccatcctgtctattctcaccctaatctatccctggctacgactcaagccctgaccttccggtacaggataaggaggggacctgaattggtgagatggaatcttagatcgtcccccatgtgccagcctcattcgaattctactctttggttaaagttagaaattcagagatttaggggtggaggaagagctttggggaagatgaggtaaggaaagatgactcgtgaagttaataggatgtctctaatttctagatgtgcctgagcttctgttcttttcctctttctttgtgtctctcttgaatatatttactttgtgtctcttaactctgtttaaggttctgtgtctatgcatctctctctttcttttttcaaccttctcattctcctatccagggatttaatcagcagaattactttttgataggggaggtataaggtttggcctgtaaggttctaactgccttcttttttctcacagaggtggcttatggcagatttttcctccttcaaactccaaacataatttttaagactatgtgccagtggactcttcccttatatctctgcaccacaagttgttggatgtttcctcttcctcccttatgtctacctcaccaacctcgctcatcatttggcccttatccttccttgtacacctaccttcagatttctgcttacactttgatttcagagctttattccccagtctgttcttactcctttgtcgcttatccagaatgatgctatgtgtagcatcttgctgtaaatcctgtacaatgattctgtgtaaatagctgtggcctatgccaataatgaagagcaagcctttcaggtaagcaaattaaagttcagtttgctcatcgaca

SEQ ID NO: 59165 - DNA, 1762 bp, Homo sapiens
gtcgtctgataaggggaagctgtgacgcagacacgcacagtaatacacagatggaggctcaaaagacacgagtttcgcgtcctgaaattccgcttccagggccaagctttcttttctgatactgtttgtccctcgcgaggcaccgttgggtcgcgcagtaggcgtgactaggggcgggaagtggggcgggagcagggccgcggagcctgggctgcggctgtcatggacgcctgggtccgcttcagtgctcagagccaagcccgggagcggctgtgtagggccgcccagtatgcttgctctcttcttggccatgcgctgcagaggcatggagccagtcctgagttacagaaacagattcgacaactggagagccacctgagccttggaagaaagcttctacgcctgggtaactcagcagatgcccttgagtcagcctcacctcaatcgagccttgtacttcgcctgtgacaatgtcctgtgggctggaaagtctggactggctccccgtgtggatcaggagaagtgggcccagcgttcattcaggtactatttgttttccctcatcatgaatttgagccgtgatgcttatgagattcgcctactgatggagcaagagtcttctgcttgtagccggcgactgaaaggttctggaggaggagtcccaggaggaagtgaaactgggggacttgggggaccagggactccaggaggaggtctgccccaactggctctgaaacttcggctgcaagtcctgctcctggctcgagtccttagaggtcatcccccacttctgctagacgtggtcagaaatgcctgtgatctcttcattcctctggacaaactaggcctctggcgctgtggccctgggattgtggggctttgtggcctcgtgtcctccatcctgtctattctcaccctaatctatccctggctacgactcaagccctgaccttccggtacaggataaggaggggacctgaattggtgagatggaatcttagatcgtcccccatgtgccagcctcattcgaattctactctttggttaaagttagaaattcagagatttaggggtggaggaagagctttggggaagatgaggtaaggaaagatgactcgtgaagttaataggatgtctctaatttctagatgtgcctgagcttctgttcttttcctctttctttgtgtctctcttgaatatatttactttgtgtctcttaactctgtttaaggttctgtgtctatgcatctctctctttcttttttcaaccttctcattctcctatccagggatttaatcagcagaattactttttgataggggaggtataaggtttggcctgtaaggttctaactgccttcttttttctcacagaggtggcttatggcagatttttcctccttcaaactccaaacataatttttaagactatgtgccagtggactcttcccttatatctctgcaccacaagttgttggatgtttcctcttcctcccttatgtctacctcaccaacctcgctcatcatttggcccttatccttccttgtacacctaccttcagatttctgcttacactttgatttcagagctttattccccagtctgttcttactcctttgtcgcttatccagaatgatgctatgtgtagcatcttgctgtaaatcctgtacaatgattctgtgtaaatagctgtggcctatgccaataatgaagagcaagcctttcaggtaagcaaattaaagttcagtttgctcatcgaca

SEQ ID NO: 59166 - DNA, 1425 bp, Homo sapiens
gtcgtctgataaggggaagctgtgacgcagacacgcacagtaatacacagatggaggctcaaaagacacgagtttcgcgtcctgaaattccgcttccagggccaagctttcttttctgatactgtttgtccctcgcgaggcaccgttgggtcgcgcagtaggcgtgactaggggcgggaagtggggcgggagcagggccgcggagcctgggctgcggctgtcatggacgcctgggtccgcttcagtgctcagagccaagcccgggagcggctgtgtagggccgcccagtatgcttgctctcttcttggccatgcgctgcagaggcatggagccagtcctgagttacagaaacagattcgacaactggagagccacctgagccttggaagaaagcttctacgcctgggtaactcagcagatgcccttgagtcagccaaaagagctgttcacctatcagatgttgtcctgagattctgcatcactgttagtcacctcaatcgagccttgtacttcgcctgtgacaatgtcctgtgggctggaaagtctggactggctccccgtgtggatcaggagaagtgggcccagcgttcattcaggtactatttgttttccctcatcatgaatttgagccgtgatgcttatgagattcgcctactgatggagcaagagtcttctgcttgtagccggcgactgaaaggttctggaggaggagtcccaggaggaagtgaaactgggggacttgggggaccagggactccaggaggaggtctgccccaactggctctgaaacttcggctgcaagtcctgctcctggctcgagtccttagaggtcatcccccacttctgctagacgtggtcagaaatgcctgtgatctcttcattcctctggacaaactaggcctctggcgctgtggccctgggattgtggggctttgtggcctcgtgtcctccatcctgtctattctcaccctaatctatccctggctacgactcaagccctgaccttccggtacaggataaggaggggacctgaattgaggtggcttatggcagatttttcctccttcaaactccaaacataatttttaagactatgtgccagtggactcttcccttatatctctgcaccacaagttgttggatgtttcctcttcctcccttatgtctacctcaccaacctcgctcatcatttggcccttatccttccttgtacacctaccttcagatttctgcttacactttgatttcagagctttattccccagtctgttcttactcctttgtcgcttatccagaatgatgctatgtgtagcatcttgctgtaaatcctgtacaatgattctgtgtaaatagctgtggcctatgccaataatgaagagcaagcctttcaggtaagcaaattaaagttcagtttgctcatcgaca

SEQ ID NO: 59167 - DNA, 784 bp, Homo sapiens
aactctagaggaacccctgtatcctggagcacaacatcagtatcaggcaataaaagaaaatttgcacagagtaaacaggctgacaaacttctacctgatttgagttagtctagttattctctttctatcacttacctctgattctctttaggtcaataatcttaaaaaagagaataattttaataattgaacctatcatttatttaatgaagttatagattacctaatgccacgctgagtaacagcagaactgaaacttttaaccttctcttcttacaattagctttcttttaaaaaataaagtaaatttgtgaactactccccgggatcagctgtatcccggggaggtataaggtttggcctgtaaggttctaactgccttcttttttctcacagaggtggcttatggcagatttttcctccttcaaactccaaacataatttttaagactatgtgccagtggactcttcccttatatctctgcaccacaagttgttggatgtttcctcttcctcccttatgtctacctcaccaacctcgctcatcatttggcccttatccttccttgtacacctaccttcagatttctgcttacactttgatttcagagctttattccccagtctgttcttactcctttgtcgcttatccagaatgatgctatgtgtagcatcttgctgtaaatcctgtacaatgattctgtgtaaatagctgtggcctatgccaataatgaagagcaagcctttcaggtaagcaaattaaagttcagtttgctcatcgaca

SEQ ID NO: 59168 - DNA, 527 bp, Homo sapiens
tcgagctcggtaacaccttgtgcaaaagtccccccatgtctcgtcactccagtgggaggctccctcggaaggggcccgccccccggggaggtataaggtttggcctgtaaggttctaactgccttcttttttctcacagaggtggcttatggcagatttttcctccttcaaactccaaacataatttttaagactatgtgccagtggactcttcccttatatctctgcaccacaagttgttggatgtttcctcttcctcccttatgtctacctcaccaacctcgctcatcatttggcccttatccttccttgtacacctaccttcagatttctgcttacactttgatttcagagctttattccccagtctgttcttactcctttgtcgcttatccagaatgatgctatgtgtagcatcttgctgtaaatcctgtacaatgattctgtgtaaatagctgtggcctatgccaataatgaagagcaagcctttcaggtaagcaaattaaagttcagtttgctcatcgaca

SEQ ID NO: 59169 - DNA, 490 bp, Homo sapiens
gcagctgggactacaggtgcccaccaccatgccgggctaatttttgtatttttagtagagatggggttacaccatgttggccaggctggtctcaaactcgtgacctcaggtgatccacccacctcggcctcccaaaatgttgggattacaggcttgagccaccatgcccagcctgtttctgctctttaaaaaaattgtcattattattgctcaacttttgccctcttgctttctctgtttctgtttcttgttatctgcctctccacttacaaatccttgctttccctttctaatctccacaagttctacgcctgggtaactcagcagatgcccttgagtcagccaaaagagctgttcacctatcagatgttgtcctgagattctgcatcactgttagtcacctcaatcgagccttgtacttcgcctgtgacaatgtcctgtgggctggaaagtctggactggctccccgtgtggatcaggagaagtgggc

SEQ ID NO: 59170 - DNA, 822 bp, Homo sapiens
gcaattctcatgcctcagcctcccaagtagctgggattacaggtgctggccaccacaactggccaatttttgtatttttagtagggacggggtttcaccatgttggccaggctggtcttaaactcctgacctcaggtgatccacctgccttggcctcccaaagtgctgggattacaggcatgagccaccacgcccggccttattttagcttccacctataagtgagattatgcagtatttgtctttctgtgtctggcttattttgcttagcatagtgtcctcgatggaggacatttctaataggggtaatagcattcactttacttctgatctaatgtgtaatctctttgctacaggaaaagaaaatgttaaaatgtgatgttggatatgttaagtaggtatacatgcccttactgacccttttgctctgtgtatcaggtactatttgttttccctcatcatgaatttgagccgtgatgcttatgagattcgcctactgatggagcaagagtcttctgcttgtagccggcgactgaaaggttctggaggaggagtcccaggaggaagtgaaactgggggacttgggggaccagggactccaggaggaggtctgccccaactggctctgaaacttcggctgcaagtcctgctcctggctcgagtccttagaggtcatcccccacttctgctagacgtggtcagaaatgcctgtgatctcttcattcctctggacaaactaggcctctggcgctgtggccctgggattgtggggctttgtggcctcgtgtcctccatcctgtctattctcaccctaatctatcc

SEQ ID NO: 59171 - DNA, 1815 bp, Homo sapiens
gtcgtctgataaggggaagctgtgacgcagacacgcacagtaatacacagatggaggctcaaaagacacgagtttcgcgtcctgaaattccgcttccagggccaagctttcttttctgatactgtttgtccctcgcgaggcaccgttgggtcgcgcagtaggcgtgactaggggcgggaagtggggcgggagcagggccgcggagcctgggctgcggctgtcatggacgcctgggtccgcttcagtgctcagagccaagcccgggagcggctgtgtagggccgcccagtatgcttgctctcttcttggccatgcgctgcagaggcatggagccagtcctgagttacagaaacagattcgacaactggagagccacctgagccttggaagaaagcttctacgcctgggtaactcagcagatgcccttgagtcagccaaaagagctgttcacctatcagatgttgtcctgagattctgcatcactgttagtcacctcaatcgagccttgtacttcgcctgtgacaatgtcctgtgggctggaaagtctggactggctccccgtgtggatcaggagaagtgggcccagcgttcattcaggtactatttgttttccctcatcatgaatttgagccgtgatgcttatgagattcgcctactgatggagcaagagtcttctgcttgtagccggcgactgaaaggttctggaggaggagtcccaggaggaagtgaaactgggggacttgggggaccagggactccaggaggaggtctgccccaactggctctgaaacttcggctgcaagtcctgctcctggctcgagtccttagaggtcatcccccacttctgctagacgtggtcagaaatgcctgtgatctcttcattcctctggacaaactaggcctctggcgctgtggccctgggattgtggggctttgtggcctcgtgtcctccatcctgtctattctcaccctaatctatccctggctacgactcaagccctgaccttccggtacaggataaggaggggacctgaattggtgagatggaatcttagatcgtcccccatgtgccagcctcattcgaattctactctttggttaaagttagaaattcagagatttaggggtggaggaagagctttggggaagatgaggtaaggaaagatgactcgtgaagttaataggatgtctctaatttctagatgtgcctgagcttctgttcttttcctctttctttgtgtctctcttgaatatatttactttgtgtctcttaactctgtttaaggttctgtgtctatgcatctctctctttcttttttcaaccttctcattctcctatccagggatttaatcagcagaattactttttgataggggaggtataaggtttggcctgtaaggttctaactgccttcttttttctcacagaggtggcttatggcagatttttcctccttcaaactccaaacataatttttaagactatgtgccagtggactcttcccttatatctctgcaccacaagttgttggatgtttcctcttcctcccttatgtctacctcaccaacctcgctcatcatttggcccttatccttccttgtacacctaccttcagatttctgcttacactttgatttcagagctttattccccagtctgttcttactcctttgtcgcttatccagaatgatgctatgtgtagcatcttgctgtaaatcctgtacaatgattctgtgtaaatagctgtggcctatgccaataatgaagagcaagcctttcaggtaagcaaattaaagttcagtttgctcatcgaca

SEQ ID NO: 59172 - DNA, 2013 bp, Homo sapiens
catgagtgggccagcggggaggccgctcagggttgctgtgtccacataagaccgacagtgtcctcactgggcggtgatggaatgaggagcattcgccccacggtggatagccccagactctgcccccagagctgaggaggcactcccagtttccgtgtccccacaccgtgctgccattcgggaactcccctgcctccgccctggcgtttggtctccattcagctagagggccttgaaatctctcagttcacctattctgaggaataaaatgccctccaactgtctgcctccccctcatcgatcacgtacatgctcacgctgatgtgcttgtgatggacccctgcggcctgcactggccccttcaggcctcatcattgtcaaatctctaatttgctcaacattcagtagtgctccccacccctttctagactcttttttctccttatgcctttcccttcctctggcctggagaaatgggccgcccagtatgcttgctctcttcttggccatgcgctgcagaggcatggagccagtcctgagttacagaaacagattcgacaactggagagccacctgagccttggaagaaagcttctacgcctgggtaactcagcagatgcccttgagtcagccaaaagagctgttcacctatcagatgttgtcctgagattctgcatcactgttagtcacctcaatcgagccttgtacttcgcctgtgacaatgtcctgtgggctggaaagtctggactggctccccgtgtggatcaggagaagtgggcccagcgttcattcaggtactatttgttttccctcatcatgaatttgagccgtgatgcttatgagattcgcctactgatggagcaagagtcttctgcttgtagccggcgactgaaaggttctggaggaggagtcccaggaggaagtgaaactgggggacttgggggaccagggactccaggaggaggtctgccccaactggctctgaaacttcggctgcaagtcctgctcctggctcgagtccttagaggtcatcccccacttctgctagacgtggtcagaaatgcctgtgatctcttcattcctctggacaaactaggcctctggcgctgtggccctgggattgtggggctttgtggcctcgtgtcctccatcctgtctattctcaccctaatctatccctggctacgactcaagccctgaccttccggtacaggataaggaggggacctgaattggtgagatggaatcttagatcgtcccccatgtgccagcctcattcgaattctactctttggttaaagttagaaattcagagatttaggggtggaggaagagctttggggaagatgaggtaaggaaagatgactcgtgaagttaataggatgtctctaatttctagatgtgcctgagcttctgttcttttcctctttctttgtgtctctcttgaatatatttactttgtgtctcttaactctgtttaaggttctgtgtctatgcatctctctctttcttttttcaaccttctcattctcctatccagggatttaatcagcagaattactttttgataggggaggtataaggtttggcctgtaaggttctaactgccttcttttttctcacagaggtggcttatggcagatttttcctccttcaaactccaaacataatttttaagactatgtgccagtggactcttcccttatatctctgcaccacaagttgttggatgtttcctcttcctcccttatgtctacctcaccaacctcgctcatcatttggcccttatccttccttgtacacctaccttcagatttctgcttacactttgatttcagagctttattccccagtctgttcttactcctttgtcgcttatccagaatgatgctatgtgtagcatcttgctgtaaatcctgtacaatgattctgtgtaaatagctgtggcctatgccaataatgaagagcaagcctttcaggtaagcaaattaaagttcagtttgctcatcgaca

SEQ ID NO: 59173 - DNA, 2229 bp, Homo sapiens
gcgtgatcactctagggctgaaattaaaggctgctttcttttccttctgaagccaggctgcttcttcggagtacaccctcctgagccaggagcacaagcactagcagaaagcagggattgtttcaggaaagcccatttaccctcagtaggaaggcagcctggtcacttgaacagcacagctgaggctgcttctctcaatttactcattttgcaaagaattgacctctaccaactcattagggagaggaaaaagaatcacttagtaattttaaatcatatgagaagtcctgtaccaagtgccaacaactgcaaagaaatgcagctagaggaatgtattgaaattactactgggtcttcctttttaatgagaaaatgacaaaaatggttgctgtagccctgcctgattttgtacacgtttgtctaagaattgagttggcacttaagctcacttctcaaagtataataatattgtatgacctcatttgtcctttcacaaaagcacttgcatcatttccttaagtcatctgctccctgacatgttttcttccctaataaacaacttctgtctgttattcctgccaatgatgttctgtttctgatgccatatcctattgagcgtgcccctgtactaatatcattgaaaatattgatatgcaaacacatttccttttcatccccattctatctttccctttggggacagattgctttccaaaagctcatgaacaaatatttggaatgctggtacctttggggcagaggtaagggtgggcggggtgggggcagaaaggtaatgcttaatgcagataactcttctaatcagtgtccatggcaatatgaacgcttgaagaaaactcagtgacatatcttgctcagtagtttcttattcctgaagaaccacaagcataaagtgaggcctcagtgctggtgctcttggagtatggggaatgtgcaaatatttaactgttttgtatgctgcacattgcaggtctgctcatgtgcattctccctttgtcttcctttgtcatatgtgtttttgcttttttgaaagtgcagtctttattgtaccctcctccagcttgtagcaaattagaatgcttagcatttatgttcattcattattgtatttgccatgtaaaatttttattaccttagacaagcttataagctgttactacataacttatcttactgtaactcttttatttcccccgacgttgtaatttgtttgtgatgtatattgtgaaattgtattctatgttaatttaatcagcacaattcactgacatgctggactgacatgctggctgctgtttcaaagtgtaaagtttgtgtagggctgttgggacaactgcaactctgttgtcaaggtactgtgctttggttcctatagcaacactgggtgtggcccttgaattgctaagggcatttaatacatcctggagcaaattttaactgcagattttctttgtagaaattctatgtataatgcaggtacctacttggcccatggctggtaactatttgggcaattagaaaaaaagaaaaaaacataaaaactagtgtctattgctgctttgaatatgtttgaaagtctgaaaatgtaaatagtttatcaaaaaaaaatcttgtacagtccagtgtaaagtttttaaatgaccttaagggttgccatcacatctttctcacactctcctcttgataataataataataaaaagtttgctaaggattaaagaaatgggaaaaataaaaaaaatctcttcaaatttacaggaatgaatcattgttcttagctttgttgcatacacaaacttcttggattttgttgtgcagtattgacgtgagataaagctcaacattgaataatctttcagtggtacttttcaaagtcttcccctcctctgcctcataattaagggaaaagacaaaattgaaagacacactgtctttatctatcctggtgtatgttggcaccttagctactttttttttttcctttttgcacaaggtgctttcctgatatgttcaacatgccatctttgggtgataatgtatatgccgtgatggggctcaggccccttaggggagtgtctataagaactgcctatttatgctcatttacctcaagactgtcctctctaccctaatctagttgtcatcactccatcttttgtactgctgttgacacttacaaattaaagataaattttgttttatgaaaaaaaa

SEQ ID NO: 59174 - DNA, 2772 bp, Homo sapiens
gggggagggatgactaaagacaacggctgtaagagaactccacaagagagtcagaacgaaaatgtgcaacaagtgcggcggctcctaccatggcaggtgattcgaggactcagcacgaggcgagagtagggaccaggaagagccggaaaacccgcctgtgattggccgtccacgggtatcggtcgttgtgattgggtgaggcccagacagacagctgcgttttgaaccgcgtagggttctgggtagcaaaggccttgcaaggctcttaaccgaaagggggagggggaaggtcgccaacaaacggctgagctcacaatcctggccggggcgtccccctcccccatggagagagccagacccgagccgccgcctcagccgcgcccgttgcgtcccgctccgcccccgctgccggtcgagggcacctccttttgggcagcagccatggagccccctccgtcgtctcccacactgagcgcggcagccagtgcgaccttggcctcgtcgtgcggggaggcagtggcgtccggcttacagcccgcggtgcggcggctgctgcaggtgaagccagagcaggtgttgctgctaccacagcctcaggcccagaacgaggaagccgctgcctcgtccgcgcaggcgcggctgttgcagttcaggcccgacctgcggctcctgcagccgccgacagcgtcagacggcgccacctccaggcccgagttgcacccggtgcagcccctggcgctgcatgtcaaggccaagaagcagaagctggggcccagcctggatcagtcagtggggcctcgaggggccgtcgaaaccggtcctagagcctccagggtggtcaagttggaaggccccgggccggccctcggctacttccgaggggacgagaagggcaagctggaggcggaggaggtcatgagagactcgatgcaaggcggggcaggcaaaagcccggcagccatccgagaaggtgtgatcaaaacggaggaacccgagagactcctcgaggactgcaggctcggcgcggagcccgcgtccaatggcctggttcatggcagcgcggaggtcatcttggccccaacgtccggtgcctttgggccgcaccagcaagaccttaggatccctttgacgctccacacggtcccccctggggcccggatccagtttcagggagctccgccttcagagctgataagattgaccaaggtccccctgacaccagtgcctactaaaatgcagtccctactggagccttctgtaaaaattgaaaccaaagatgtcccgctcaccgtgttgccctcagatgcaggcataccagatactcccttcagtaaggacagaaatggtcatgtgaagcgacccatgaacgcatttatggtttgggcaaggatccaccgaccagcactagccaaagctaacccagcagccaacaatgcagaaatcagtgtccagcttgggttagagtggaacaaacttagtgaagaacaaaagaaaccctattacgatgaagcacaaaagattaaggaaaagcacagagaggaatttcctggttgggtttatcagcctcgtccagggaagcgaaaacgattccctctaagtgtttccaatgtattttctggtaccacacagaatatcatctctacaaatcctacaacagtttatccttaccgctcacctacgtactctgtggtaattcccagcctacagaatcccatcactcatccagttgtacatgcccttacagtcggcctccctttggctatggaaattttccgagttcaatgccagaatgccttagttattatgaagacaggtacccaaaacatgagggtatcttttcaactttaaatagagactattcttttagagactactcaagtgaatgcacacacagtgaaaattctcggagttgtgagaacatgaatggaacttcttactataacagtcatagccacagtggggaagaaaacttaaaccctgtgcctcagctggacattggaaccttggagaatgtcttcacagccccgacatcaactccttctagcatccagcaagtcaatgtcaccgacagtgatgaggaggaagaagaaaaagtgctcagggatttataattttaaaacaaatatgcacagaaaataaacatttcttaaaatatattctgggtcagttggtatgagaaaaaaaaaagcctagaattctttgttgaaagttttcagtcgtgatttgaggagttaaaaccaaatgcaatttatgtcttcataaaattttgattagtgaaactagagtctggatgtttcattgtaggaatatttaagttattaagtagtttaattttaatggctgaaatttgcatcaacatgtattattattactttatcctggaacatgcaaaatactgaagcctcacagttgtatgtgaggggaaaggggaaataaatctagcatagtgtgatttttattttatctcaggatacattttttaaatgattttttgtttgctttttatgtaatacttatggatgttgtcaatttttgatgtaacattttgaaagtattttgacaactcctagtgaacttggacttggttgctaaatttaacttacactaataaccaattataagttccaaatgtgttttaatggcacctgggtgattcttcagctaaatttagtcatttctgtttctaaatatttttatcattttaaaatattttttttccatttggcatacatcgttctttgttgtaattaaataaacatagataaaattgtt

SEQ ID NO: 59175 - DNA, 1070 bp, Homo sapiens
gggaaggggacgggggctgttggacatgcgcgcagagtccggcggccacggacgcggtaatattgtccctcggcatccgccgtggtgagacccggcgcgttgctgtgaagacggacgggtctggaagaagtggggtgcggtgagctgagcagaccttttccgcttcgacgtggggactgcagtgaccccggcctgctggcggggcgggtaacgggttgagccagggtggggctgctcagcggcatggagctgaggtctgaagacccagcacaggcgattcctttctgcgacgagacaattgctatggaaaccaaagtgctgggtcagcggggattgaggctccaggatcaagactggtgtctttccggaagacccttggctaaggcttcccggagcggctgcttcctgaatgaatccgccatctcctgcggggtcttgacaccgagcaggcgaagaagcctattccaatgccagctcccccgggaaacctacctggcccacccctataagtggtgcctcgctctcgttaactcttagactttgttccacgtttataacctaatatttcggtaacgccccgcggtttttgtttacttttcccacacataatggaccagaaagacttgcttccggactttgctttatgactctgaacaagtcatttttcccactgggtctcacttccctcttgtgtaaaatggaaatattaactctagatgccggtctggttaggtttgaagatcgaaccagatgagggaagccaaagacttcataggctgtaaagtggtgaaactgaactgctaacgagttgctatttttttctcccctccctctccctcaagctaaaagttcttcagatttcttgtgatttcttcaggcggtcttgggactccctagcctccgacctggaatagatctctcttcacacttcacttccacagagcccttcattttaacttccctatccaaagcaagaaaaatagttatcatttttagagggcttactctgtgccaagccctgataaaactctttacctggattatctcattaaatttcacaacatcctttt

SEQ ID NO: 59176 - DNA, 3250 bp, Homo sapiens
  misc_feature (2041)..(2041): n is a, c, g, or t
  misc_feature (2050)..(2050): n is a, c, g, or t
  misc_feature (2054)..(2054): n is a, c, g, or t
  misc_feature (2061)..(2062): n is a, c, g, or t
  misc_feature (2073)..(2073): n is a, c, g, or t
  misc_feature (2077)..(2077): n is a, c, g, or t
gggggagggatgactaaagacaacggctgtaagagaactccacaagagagtcagaacgaaaatgtgcaacaagtgcggcggctcctaccatggcaggtgattcgaggactcagcacgaggcgagagtagggaccaggaagagccggaaaacccgcctgtgattggccgtccacgggtatcggtcgttgtgattgggtgaggcccagacagacagctgcgttttgaaccgcgtagggttctgggtagcaaaggccttgcaaggctcccccatggagagagccagacccgagccgccgcctcagccgcgcccgttgcgtcccgctccgcccccgctgccggtcgagggcacctccttttgggcagcagccatggagccccctccgtcgtctcccacactgagcgcggcagccagtgcgaccttggcctcgtcgtgcggggaggcagtggcgtccggcttacagcccgcggtgcggcggctgctgcaggtgaagccagagcaggtgttgctgctaccacagcctcaggcccagaacgaggaagccgctgcctcgtccgcgcaggcgcggctgttgcagttcaggcccgacctgcggctcctgcagccgccgacagcgtcagacggcgccacctccaggcccgagttgcacccggtgcagcccctggcgctgcatgtcaaggccaagaagcagaagctggggcccagcctggatcagtcagtggggcctcgaggggccgtcgaaaccggtcctagagcctccagggtggtcaagttggaaggccccgggccggccctcggctacttccgaggggacgagaagggcaagctggaggcggaggaggtcatgagagactcgatgcaaggcggggcaggcaaaagcccggcagccatccgagaaggtgtgatcaaaacggaggaacccgagagactcctcgaggactgcaggctcggcgcggagcccgcgtccaatggcctggttcatggcagcgcggaggtcatcttggccccaacgtccggtgcctttgggccgcaccagcaagaccttaggatccctttgacgctccacacggtcccccctggggcccggatccagtttcagggagctccgccttcagagctgataagattgaccaaggtccccctgacaccagtgcctactaaaatgcagtccctactggagccttctgtaaaaattgaaaccaaagatgtcccgctcaccgtgttgccctcagatgcaggcataccagatactcccttcagtaaggacagaaatggtcatgtgaagcgacccatgaacgcatttatggtttgggcaaggatccaccgaccagcactagccaaagctaacccagcagccaacaatgcagaaatcagtgtccagcttgggttagagtggaacaaacttagtgaagaacaaaagaaaccctattacgatgaagcacaaaagattaaggaaaagcacagagaggaatttcctggttgggtttatcagcctcgtccagggaagcgaaaacgattccctctaagtgtttccaatgtattttctggtaccacacagaatatcatctctacaaatcctacaacagtttatccttaccgctcacctacgtactctgtggtaattcccagcctacagaatcccatcactcatccagttggtgaaacctcacctgctatccagctgcccacacctgcagtccagagcccaagccctgtcacacttttccagcccagcgtctccagtgctgctcaggtggctgtccaggatccaagtctacctgtctatccagcactcccaccccaacgctttactgggccttcccaaacagacactcatcagctgcattctgaagccactcacactgtgaagcaacccactcctgtctctctagagagcgccaacaggatttcaagtagtgcaagtactgcccatgccagatttgcaacttcgaccatccaacctcctagggagtattccagcgtttccccttgtcccagaagtgctccaatcccccaaggggctttcctttcccccccccaaantttttcccnaacnaaccccnncacaatttggnttcntttaaccccaaggcccccccttcccccctttgggccccatcccaggcccagcactggtgttcgggacaccaccaagattctcttttcatcacccttacttcctacccggacctcactacttcccatcaagtacatgcccttacagtcggcctccctttggctatggaaattttccgagttcaatgccagaatgccttagttattatgaagacaggtacccaaaacatgagggtatcttttcaactttaaatagagactattcttttagagactactcaagtgaatgcacacacagtgaaaattctcggagttgtgagaacatgaatggaacttcttactataacagtcatagccacagtggggaagaaaacttaaaccctgtgcctcagctggacattggaaccttggagaatgtcttcacagccccgacatcaactccttctagcatccagcaagtcaatgtcaccgacagtgatgaggaggaagaagaaaaagtgctcagggatttataattttaaaacaaatatgcacagaaaataaacatttcttaaaatatattctgggtcagttggtatgagaaaaaaaaaagcctagaattctttgttgaaagttttcagtcgtgatttgaggagttaaaaccaaatgcaatttatgtcttcataaaattttgattagtgaaactagagtctggatgtttcattgtaggaatatttaagttattaagtagtttaattttaatggctgaaatttgcatcaacatgtattattattactttatcctggaacatgcaaaatactgaagcctcacagttgtatgtgaggggaaaggggaaataaatctagcatagtgtgatttttattttatctcaggatacattttttaaatgattttttgtttgctttttatgtaatacttatggatgttgtcaatttttgatgtaacattttgaaagtattttgacaactcctagtgaacttggacttggttgctaaatttaacttacactaataaccaattataagttccaaatgtgttttaatggcacctgggtgattcttcagctaaatttagtcatttctgtttctaaatatttttatcattttaaaatattttttttccatttggcatacatcgttctttgttgtaattaaataaacatagataaaattgtt

SEQ ID NO: 59177 - DNA, 797 bp, Homo sapiens
gggaaggggacgggggctgttggacatgcgcgcagagtccggcggccacggacgcggtaatattgtccctcggcatccgccgtggtgagacccggcgcgttgctgtgaagacggacgggtctggaagaagtggggtgcggtgagctgagcagaccttttccgcttcgacgtggggactgcagtgaccccggcctgctggcggggcgggtaacgggttgagccagggtggggctgctcagcggcatggagctgaggtctgaagacccagcacaggcgattcctttctgcgacgagacaattgctatggaaaccaaagtgctgggtcagcggggattgaggctccaggatcaagactggtgtctttccggaagacccttggctaaggcttcccggagcggctgcttcctgaatgaatccgccatctcctgcggggtcttgacaccgagcaggcgaagaagcctattccaatgccagctcccccgggaaacctacctggcccacccctataagtggtgcctcgctctcgttaactcttagactttgttccacgtttataacctaatatttcgctaaaagttcttcagatttcttgtgatttcttcaggcggtcttgggactccctagcctccgacctggaatagatctctcttcacacttcacttccacagagcccttcattttaacttccctatccaaagcaagaaaaatagttatcatttttagagggcttactctgtgccaagccctgataaaactctttacctggattatctcattaaatttcacaacatcctttt

SEQ ID NO: 59178 - DNA, 3265 bp, Homo sapiens
gggggagggatgactaaagacaacggctgtaagagaactccacaagagagtcagaacgaaaatgtgcaacaagtgcggcggctcctaccatggcaggtgattcgaggactcagcacgaggcgagagtagggaccaggaagagccggaaaacccgcctgtgattggccgtccacgggtatcggtcgttgtgattgggtgaggcccagacagacagctgcgttttgaaccgcgtagggttctgggtagcaaaggccttgcaaggctcttaaccgaaagggggagggggaaggtcgccaacaaacggctgagctcacaatcctggccggggcgtccccctcccccatggagagagccagacccgagccgccgcctcagccgcgcccgttgcgtcccgctccgcccccgctgccggtcgagggcacctccttttgggcagcagccatggagccccctccgtcgtctcccacactgagcgcggcagccagtgcgaccttggcctcgtcgtgcggggaggcagtggcgtccggcttacagcccgcggtgcggcggctgctgcaggtgaagccagagcaggtgttgctgctaccacagcctcaggcccagaacgaggaagccgctgcctcgtccgcgcaggcgcggctgttgcagttcaggcccgacctgcggctcctgcagccgccgacagcgtcagacggcgccacctccaggcccgagttgcacccggtgcagcccctggcgctgcatgtcaaggccaagaagcagaagctggggcccagcctggatcagtcagtggggcctcgaggggccgtcgaaaccggtcctagagcctccagggtggtcaagttggaaggccccgggccggccctcggctacttccgaggggacgagaagggcaagctggaggcggaggaggtcatgagagactcgatgcaaggcggggcaggcaaaagcccggcagccatccgagaaggtgtgatcaaaacggaggaacccgagagactcctcgaggactgcaggctcggcgcggagcccgcgtccaatggcctggttcatggcagcgcggaggtcatcttggccccaacgtccggtgcctttgggccgcaccagcaagaccttaggatccctttgacgctccacacggtcccccctggggcccggatccagtttcagggagctccgccttcagagctgataagattgaccaaggtccccctgacaccagtgcctactaaaatgcagtccctactggagccttctgtaaaaattgaaaccaaagatgtcccgctcaccgtgttgccctcagatgcaggcataccagatactcccttcagtaaggacagaaatggtcatgtgaagcgacccatgaacgcatttatggtttgggcaaggatccaccgaccagcactagccaaagctaacccagcagccaacaatgcagaaatcagtgtccagcttgggttagagtggaacaaacttagtgaagaacaaaagaaaccctattacgatgaagcacaaaagattaaggaaaagcacagagaggaatttcctggttgggtttatcagcctcgtccagggaagcgaaaacgattccctctaagtgtttccaatgtattttctggtaccacacagaatatcatctctacaaatcctacaacagtttatccttaccgctcacctacgtactctgtggtaattcccagcctacagaatcccatcactcatccagttggtgaaacctcacctgctatccagctgcccacacctgcagtccagagcccaagccctgtcacacttttccagcccagcgtctccagtgctgctcaggtggctgtccaggatccaagtctacctgtctatccagcactcccaccccaacgctttactgggccttcccaaacagacactcatcagctgcattctgaagccactcacactgtgaagcaacccactcctgtctctctagagagcgccaacaggatttcaagtagtgcaagtactgcccatgccagatttgcaacttcgaccatccaacctcctagggagtattccagcgtttccccttgtcccagaagtgctccaatcccccaggcttctcccattccacacccacatgtctaccagccccctccccttggccatccagccacactgttcgggacaccaccaagattctcttttcatcacccttacttcctacccggacctcactacttcccatcaagtacatgcccttacagtcggcctccctttggctatggaaattttccgagttcaatgccagaatgccttagttattatgaagacaggtacccaaaacatgagggtatcttttcaactttaaatagagactattcttttagagactactcaagtgaatgcacacacagtgaaaattctcggagttgtgagaacatgaatggaacttcttactataacagtcatagccacagtggggaagaaaacttaaaccctgtgcctcagctggacattggaaccttggagaatgtcttcacagccccgacatcaactccttctagcatccagcaagtcaatgtcaccgacagtgatgaggaggaagaagaaaaagtgctcagggatttataattttaaaacaaatatgcacagaaaataaacatttcttaaaatatattctgggtcagttggtatgagaaaaaaaaaagcctagaattctttgttgaaagttttcagtcgtgatttgaggagttaaaaccaaatgcaatttatgtcttcataaaattttgattagtgaaactagagtctggatgtttcattgtaggaatatttaagttattaagtagtttaattttaatggctgaaatttgcatcaacatgtattattattactttatcctggaacatgcaaaatactgaagcctcacagttgtatgtgaggggaaaggggaaataaatctagcatagtgtgatttttattttatctcaggatacattttttaaatgattttttgtttgctttttatgtaatacttatggatgttgtcaatttttgatgtaacattttgaaagtattttgacaactcctagtgaacttggacttggttgctaaatttaacttacactaataaccaattataagttccaaatgtgttttaatggcacctgggtgattcttcagctaaatttagtcatttctgtttctaaatatttttatcattttaaaatattttttttccatttggcatacatcgttctttgttgtaattaaataaacatagataaaattgtt

SEQ ID NO: 59179 - DNA, 3192 bp, Homo sapiens
gggggagggatgactaaagacaacggctgtaagagaactccacaagagagtcagaacgaaaatgtgcaacaagtgcggcggctcctaccatggcaggtgattcgaggactcagcacgaggcgagagtagggaccaggaagagccggaaaacccgcctgtgattggccgtccacgggtatcggtcgttgtgattgggtgaggcccagacagacagctgcgttttgaaccgcgtagggttctgggtagcaaaggccttgcaaggctcccccatggagagagccagacccgagccgccgcctcagccgcgcccgttgcgtcccgctccgcccccgctgccggtcgagggcacctccttttgggcagcagccatggagccccctccgtcgtctcccacactgagcgcggcagccagtgcgaccttggcctcgtcgtgcggggaggcagtggcgtccggcttacagcccgcggtgcggcggctgctgcaggtgaagccagagcaggtgttgctgctaccacagcctcaggcccagaacgaggaagccgctgcctcgtccgcgcaggcgcggctgttgcagttcaggcccgacctgcggctcctgcagccgccgacagcgtcagacggcgccacctccaggcccgagttgcacccggtgcagcccctggcgctgcatgtcaaggccaagaagcagaagctggggcccagcctggatcagtcagtggggcctcgaggggccgtcgaaaccggtcctagagcctccagggtggtcaagttggaaggccccgggccggccctcggctacttccgaggggacgagaagggcaagctggaggcggaggaggtcatgagagactcgatgcaaggcggggcaggcaaaagcccggcagccatccgagaaggtgtgatcaaaacggaggaacccgagagactcctcgaggactgcaggctcggcgcggagcccgcgtccaatggcctggttcatggcagcgcggaggtcatcttggccccaacgtccggtgcctttgggccgcaccagcaagaccttaggatccctttgacgctccacacggtcccccctggggcccggatccagtttcagggagctccgccttcagagctgataagattgaccaaggtccccctgacaccagtgcctactaaaatgcagtccctactggagccttctgtaaaaattgaaaccaaagatgtcccgctcaccgtgttgccctcagatgcaggcataccagatactcccttcagtaaggacagaaatggtcatgtgaagcgacccatgaacgcatttatggtttgggcaaggatccaccgaccagcactagccaaagctaacccagcagccaacaatgcagaaatcagtgtccagcttgggttagagtggaacaaacttagtgaagaacaaaagaaaccctattacgatgaagcacaaaagattaaggaaaagcacagagaggaatttcctggttgggtttatcagcctcgtccagggaagcgaaaacgattccctctaagtgtttccaatgtattttctggtaccacacagaatatcatctctacaaatcctacaacagtttatccttaccgctcacctacgtactctgtggtaattcccagcctacagaatcccatcactcatccagttggtgaaacctcacctgctatccagctgcccacacctgcagtccagagcccaagccctgtcacacttttccagcccagcgtctccagtgctgctcaggtggctgtccaggatccaagtctacctgtctatccagcactcccaccccaacgctttactgggccttcccaaacagacactcatcagctgcattctgaagccactcacactgtgaagcaacccactcctgtctctctagagagcgccaacaggatttcaagtagtgcaagtactgcccatgccagatttgcaacttcgaccatccaacctcctagggagtattccagcgtttccccttgtcccagaagtgctccaatcccccaggcttctcccattccacacccacatgtctaccagccccctccccttggccatccagccacactgttcgggacaccaccaagattctcttttcatcacccttacttcctacccggacctcactacttcccatcaagtacatgcccttacagtcggcctccctttggctatggaaattttccgagttcaatgccagaatgccttagttattatgaagacaggtacccaaaacatgagggtatcttttcaactttaaatagagactattcttttagagactactcaagtgaatgcacacacagtgaaaattctcggagttgtgagaacatgaatggaacttcttactataacagtcatagccacagtggggaagaaaacttaaaccctgtgcctcagctggacattggaaccttggagaatgtcttcacagccccgacatcaactccttctagcatccagcaagtcaatgtcaccgacagtgatgaggaggaagaagaaaaagtgctcagggatttataattttaaaacaaatatgcacagaaaataaacatttcttaaaatatattctgggtcagttggtatgagaaaaaaaaaagcctagaattctttgttgaaagttttcagtcgtgatttgaggagttaaaaccaaatgcaatttatgtcttcataaaattttgattagtgaaactagagtctggatgtttcattgtaggaatatttaagttattaagtagtttaattttaatggctgaaatttgcatcaacatgtattattattactttatcctggaacatgcaaaatactgaagcctcacagttgtatgtgaggggaaaggggaaataaatctagcatagtgtgatttttattttatctcaggatacattttttaaatgattttttgtttgctttttatgtaatacttatggatgttgtcaatttttgatgtaacattttgaaagtattttgacaactcctagtgaacttggacttggttgctaaatttaacttacactaataaccaattataagttccaaatgtgttttaatggcacctgggtgattcttcagctaaatttagtcatttctgtttctaaatatttttatcattttaaaatattttttttccatttggcatacatcgttctttgttgtaattaaataaacatagataaaattgtt

SEQ ID NO: 59180 - DNA, 2150 bp, Homo sapiens
gggaaggggacgggggctgttggacatgcgcgcagagtccggcggccacggacgcggtaatattgtccctcggcatccgccgtggtgagacccggcgcgttgctgtgaagacggacgggtctggaagaagtggggtgcggtcatggagaaatgttgtagagggaaggaacaaagtctactgtgcatccagcaaggcataccagatactcccttcagtaaggacagaaatggtcatgtgaagcgacccatgaacgcatttatggtttgggcaaggatccaccgaccagcactagccaaagctaacccagcagccaacaatgcagaaatcagtgtccagcttgggttagagtggaacaaacttagtgaagaacaaaagaaaccctattacgatgaagcacaaaagattaaggaaaagcacagagaggaatttcctggttgggtttatcagcctcgtccagggaagcgaaaacgattccctctaagtgtttccaatgtattttctggtaccacacagaatatcatctctacaaatcctacaacagtttatccttaccgctcacctacgtactctgtggtaattcccagcctacagaatcccatcactcatccagttggtgaaacctcacctgctatccagctgcccacacctgcagtccagagcccaagccctgtcacacttttccagcccagcgtctccagtgctgctcaggtggctgtccaggatccaagtctacctgtctatccagcactcccaccccaacgctttactgggccttcccaaacagacactcatcagctgcattctgaagccactcacactgtgaagcaacccactcctgtctctctagagagcgccaacaggatttcaagtagtgcaagtactgcccatgccagatttgcaacttcgaccatccaacctcctagggagtattccagcgtttccccttgtcccagaagtgctccaatcccccaggcttctcccattccacacccacatgtctaccagccccctccccttggccatccagccacactgttcgggacaccaccaagattctcttttcatcacccttacttcctacccggacctcactacttcccatcaagtacatgcccttacagtcggcctccctttggctatggaaattttccgagttcaatgccagaatgccttagttattatgaagacaggtacccaaaacatgagggtatcttttcaactttaaatagagactattcttttagagactactcaagtgaatgcacacacagtgaaaattctcggagttgtgagaacatgaatggaacttcttactataacagtcatagccacagtggggaagaaaacttaaaccctgtgcctcagctggacattggaaccttggagaatgtcttcacagccccgacatcaactccttctagcatccagcaagtcaatgtcaccgacagtgatgaggaggaagaagaaaaagtgctcagggatttataattttaaaacaaatatgcacagaaaataaacatttcttaaaatatattctgggtcagttggtatgagaaaaaaaaaagcctagaattctttgttgaaagttttcagtcgtgatttgaggagttaaaaccaaatgcaatttatgtcttcataaaattttgattagtgaaactagagtctggatgtttcattgtaggaatatttaagttattaagtagtttaattttaatggctgaaatttgcatcaacatgtattattattactttatcctggaacatgcaaaatactgaagcctcacagttgtatgtgaggggaaaggggaaataaatctagcatagtgtgatttttattttatctcaggatacattttttaaatgattttttgtttgctttttatgtaatacttatggatgttgtcaatttttgatgtaacattttgaaagtattttgacaactcctagtgaacttggacttggttgctaaatttaacttacactaataaccaattataagttccaaatgtgttttaatggcacctgggtgattcttcagctaaatttagtcatttctgtttctaaatatttttatcattttaaaatattttttttccatttggcatacatcgttctttgttgtaattaaataaacatagataaaattgtt

SEQ ID NO: 59181 - DNA, 627 bp, Homo sapiens
cagacctgaaggtcaatgattgtttaatctttctttgacagcattatgaaggtataatgggcatacaagaaactgcacgtctttaaagtgtacagttggagggtttttggcatgtgtggacacccatgaaacctcccccataatcaagacagtgaattgatccgccactcccaaaagtggccttgcgcctccagcaacccctctttcctgctcctcactgtcccccatccccaccgccactgcttggcttgctgtcactatagattaattcccattttctagaattccatagaaatggactcatacagtgtatgtctggcctctttcactcagcacaattcttttttcatcaggtgtttttgtgcatatcagtactccatttttttttattgttggtaggatcccattgtatgggtggaccacaatacctgttgaatacctgttgatggacatttgggttgttaccaggttttggccatgacaaataaagctgctgtgaacatttgtgtaccaatttctgcgtggacatatgttttcatttctcttggatatacggctaggagtggaattgttgggtcatgtggtaactctgtgttcaactgtgcgaggaactaccaagcttttcca

SEQ ID NO: 59182 - DNA, 573 bp, Homo sapiens
cagacctgaaggtcaatgattgtttaatctttctttgacagcattatgaaggtataatgggcatacaagaaactgcacgtctttaaagtgtacagttggagggtttttggcatgtgtggacacccatgaaacctcccccataatcaagacagtgaattgatccgccacccccatccccaccgccactgcttggcttgctgtcactatagattaattcccattttctagaattccatagaaatggactcatacagtgtatgtctggcctctttcactcagcacaattcttttttcatcaggtgtttttgtgcatatcagtactccatttttttttattgttggtaggatcccattgtatgggtggaccacaatacctgttgaatacctgttgatggacatttgggttgttaccaggttttggccatgacaaataaagctgctgtgaacatttgtgtaccaatttctgcgtggacatatgttttcatttctcttggatatacggctaggagtggaattgttgggtcatgtggtaactctgtgttcaactgtgcgaggaactaccaagcttttcca

SEQ ID NO: 59183 - DNA, 369 bp, Homo sapiens
atatatacactaatataaatatatatttatatacatttccttacatcaaccacattttaaaaaaccccactttgggaggcaatgagatgatttaaaagtagctactacttgtctcaaagggtttgctacctgaacaggaagaagtgctggggattaaataggtagtaactgtgcattgttgaacactgtgcaagtaattagggtattcagaaggcatcaaaattttttatactgaggcaagtagcaaaataggagcatccaatttacattttacaaaggaatagaagaagttggccatgtagaaatattaaagaagacagtaccaagcagataaaacagaaacgaccataagggtggaagtttaagggg

SEQ ID NO: 59184 - DNA, 1035 bp, Homo sapiens
ggggacacaaaggggtggtcaccctgccctcaccttgacctgtaagttgcctaggacagtggcctggtcccaggggctgttgtggggagttgaagaacaccctggcctcctccatcatgtcggccaagagggcagaattgaagaaaacacatctgagcaagaactacaaggcagtttgcctggaattgaagccagagccgaccaaaacatttgattacaaagcagttaaacaagaagggcggtttaccaaagcaggagtgacacaggacctaaagaatgaactcagggaagtgagagaagagctcaaggagaaaatggaggagataaaacagataaaggatctaatggacaaggattttgataaacttcacgaatttgtggaaattatgaaggaaatgcagaaagatatggatgagaagatggacattttaataaatacacagaagaactataagcttccccttagaagagcaccaaaggagcagcaggaactcaggctgatgggaaagactcacagagaaccacagctcaggcccaagaaaatggatggagccagtggagtcaatggagcaccctgtgctcttcacaagaagacgatggcaccacaaaaaacaaaacagggctcactggatccccttcatcactgtgggacctgctgcgagaaatgtttgttgtgtgctctaaagaacaactacaatcgggggaacattccttcagaggcctcaggcctttacaaaggtggagaggagccagtgaccacccaaccttctgtgggccacgctgtgcctgccccaaagtcccagactgagggaaggtgaagcttaactgccagcttgaaatgagagtaaagaagatacagagcaaacagtgtttcagaaactgtcctgccctgggtgtgattctttggcttcaatttgaaggaggaggaatgatgggatttcatattttatttcacaccagttcctccttgtttcatctctttgctaagctggctgcttctaccatctaataaataattggccaagttcttttttt

SEQ ID NO: 59185 - DNA, 857 bp, Homo sapiens
ggggacacaaaggggtggtcaccctgccctcaccttgacctgtaagttgcctaggacagtggcctggtcccaggggctgttgtggggagttgaagaacaccctggcctcctccatcatgtcggccaagagggcagaattgaagaaaacacatctgagcaagaactacaaggcagtttgcctggaattgaagccagagccgaccaaaacatttgattacaaagcagttaaacaagaagggcggtttaccaaagcaggagtgacacaggacctaaagaatgaactcagggaagtgagagaagagctcaaggagaaaatggaggagataaaacagataaaggatctaatggacaaggattttgataaacttcacgaatttgtggaaattatgaaggaaatgcagaaagatatggatgagaagatggacattttaataaatacacagaagaactataagcttccccttagaagagcaccaaaggagcagcaggaactcaggctgatgggaaagactcacagagaaccacagctcaggcccaagaaaatggatggagccagtggagtcaatggagcaccctgtgctcttcacaagaagacgatggcaccacaaaaaacaaaacagggctcactggatccccttcatcactgtgggacctgctgcgtatatacgctgcagtgggactgctggatctatggtagctcaatttttagtttttgaggaacaacctccaaactgttctccatagtggctgtactaatttacattcccaccaacagtgtacaaagattcccttttctccgggtcaagttcttaatggctgcaaattaatgagcaatgtatttggtgcttcagataaat

SEQ ID NO: 59186 - DNA, 955 bp, Homo sapiens
ggggacacaaaggggtggtcaccctgccctcaccttgacctgtaagttgcctaggacagtggcctggtcccaggggctgttgtggggagttgaagaacaccctggcctcctccatcatgtcggccaagagggcagaattgaagaaaacacatctgagcaagaactacaaggcagtttgcctggaattgaagccagagccgaccaaaacatttgattacaaagcagttaaacaagaagggcggtttaccaaagcaggagtgacacaggacctaaagaatgaactcagggaagtgagagaagagctcaaggagaaaatggaggagataaaacagataaaggatctaatggacaaggattttgataaacttcacgaatttgtggaaattatgaaggaaatgcagaaagatatggatgagaagatggacattttaataaatacacagaagaactataagcttccccttagaagagcaccaaaggagcagcaggaactcaggctgatgggaaagactcacagagaaccacagctcaggcccaagaaaatggatggagccagtggagtcaatggagcaccctgtgctcttcacaagaagacgatggcaccacaaaaaacaaaacagggctcactggatccccttcatcactgtgggacctgctgcgagaaatgtttgttgtgtgctctaaagaacaactacaatcgggtgggaaatattcacaccaggtctgggcacccttttcacccttggcttctggagctgccttctgatttatctgtacctcaaccccggtgacatcgaatatgtgtttccaacctagcgcagctgcagaacctaccagcagttccgattcatcacctccaagctccttaagatgcacagtcagggcttcttgtcctgttaaataccaccccaaccccaggcctccactggagattaaaaaccttcattcaaagcca

SEQ ID NO: 59187 - DNA, 841 bp, Homo sapiens
ggggacacaaaggggtggtcaccctgccctcaccttgacctgtaagttgcctaggacagtggcctggtcccaggggctgttgtggggagttgaagaacaccctggcctcctccatcatgtcggccaagagggcagaattgaagaaaacacatctgagcaagaactacaaggcagtttgcctggaattgaagccagagccgaccaaaacatttgattacaaagcagttaaacaagaagggcggtttaccaaagcaggagtgacacaggacctaaagaatgaactcagggaagtgagagaagagctcaaggagaaaatggaggagataaaacagataaaggatctaatggacaaggattttgataaacttcacgaatttgtggaaattatgaaggaaatgcagaaagatatggatgagaagatggacattttaataaatacacagaagaactataagcttccccttagaagagcaccaaaggagcagcaggaactcaggctgatgggaaagactcacagagaaccacagctcaggcccaagaaaatggatggagccagtggagtcaatggagcaccctgtgctcttcacaagaagacgatggcaccacaaaaaacaaaacagggctcactggatccccttcatcactgtgggacctgctgcgagaaatgtttgttgtgtgctctaaagaacaactacaatcgggcgcagctgcagaacctaccagcagttccgattcatcacctccaagctccttaagatgcacagtcagggcttcttgtcctgttaaataccaccccaaccccaggcctccactggagattaaaaaccttcattcaaagcca

SEQ ID NO: 59188 - DNA, 879 bp, Homo sapiens
ggggacacaaaggggtggtcaccctgccctcaccttgacctgtaagttgcctaggacagtggcctggtcccaggggctgttgtggggagttgaagaacaccctggcctcctccatcatgtcggccaagagggcagaattgaagaaaacacatctggtaaaagagagacattgctggacaagcaagaactacaaggcagtttgcctggaattgaagccagagccgaccaaaacatttgattacaaagcagttaaacaagaagggcggtttaccaaagcaggagtgacacaggacctaaagaatgaactcagggaagtgagagaagagctcaaggagaaaatggaggagataaaacagataaaggatctaatggacaaggattttgataaacttcacgaatttgtggaaattatgaaggaaatgcagaaagatatggatgagaagatggacattttaataaatacacagaagaactataagcttccccttagaagagcaccaaaggagcagcaggaactcaggctgatgggaaagactcacagagaaccacagctcaggcccaagaaaatggatggagccagtggagtcaatggagcaccctgtgctcttcacaagaagacgatggcaccacaaaaaacaaaacagggctcactggatccccttcatcactgtgggacctgctgcgagaaatgtttgttgtgtgctctaaagaacaactacaatcggggtatatacgctgcagtgggactgctggatctatggtagctcaatttttagtttttgaggaacaacctccaaactgttctccatagtggctgtactaatttacattcccaccaacagtgtacaaagattcaacaaaaaaaaaaaatccccaggt

SEQ ID NO: 59189 - DNA, 900 bp, Homo sapiens
ggggacacaaaggggtggtcaccctgccctcaccttgacctgtaagttgcctaggacagtggcctggtcccaggggctgttgtggggagttgaagaacaccctggcctcctccatcatgtcggccaagagggcagaattgaagaaaacacatctgagcaagaactacaaggcagtttgcctggaattgaagccagagccgaccaaaacatttgattacaaagcagttaaacaagaagggcggtttaccaaagcaggagtgacacaggacctaaagaatgaactcagggaagtgagagaagagctcaaggagaaaatggaggagataaaacagataaaggatctaatggacaaggattttgataaacttcacgaatttgtggaaattatgaaggaaatgcagaaagatatggatgagaagatggacattttaataaatacacagaagaactataagcttccccttagaagagcaccaaaggagcagcaggaactcaggctgatgggaaagactcacagagaaccacagctcaggcccaagaaaatggatggagccagtggagtcaatggagcaccctgtgctcttcacaagaagacgatggcaccacaaaaaacaaaacagggctcactggatccccttcatcactgtgggacctgctgcgagaaatgtttgttgtgtgctctaaagaacaactacaatcggggtatatacgctgcagtgggactgctggatctatggtagctcaatttttagtttttgaggaacaacctccaaactgttctccatagtggctgtactaatttacattcccaccaacagtgtacaaagattcccttttctccgggtcaagttcttaatggctgcaaattaatgagcaatgtatttggtgcttcagataaat

SEQ ID NO: 59190 - DNA, 223 bp, Homo sapiens
ataaaggattactgattgcatttacttacctttaaagttcttcagttgttgacactactgccacatgcttacttgctttattgagaggaaattttaatatctaaagatttgttaatgtaactataacgtagaattaagcaatggatactcttctgcctagcaggagtgacagcatctcatggtggagaaagcactggatgtatgactctggcaatatcatttt

SEQ ID NO: 59191 - DNA, 578 bp, Homo sapiens
gagtccatgggtattgggtgtgtgtcccgtcaacctcacatcatgcaaaaacgtaggactgagttgtgaagagtttattcaagtgaaaagctgggaatggccattcaggaaaagacacactccagagaaatgggcacagggctccaaagacaagagttctttcttagattttcaatgaatcattttcaccagtcctaacagtctgcgggtcacctttccttctgttctaactgctctccttgtacccttgggagggtttgtgatgctgtcctgtttggaaaagccatgctgctctctttacacttcacagtagcttggtttggatcatttctgtgctgtgctcagatgctccttccttcatataaggttgaggaaaaggagacacatctgacccatccatgtgtgtttgtgaaacaggcagcagcaaataattattcagttttaggaattaggctcacactggagggagaggtcagagcccttcgggggaatatttatgaacaagtaacagatgattaaattctccaaagcaaacaacttttctacttgagaataaagtgtttctagttaaattatgc

SEQ ID NO: 59192 - DNA, 362 bp, Homo sapiens
  misc_feature (357)..(357): n is a, c, g, or t
ccctaaggctggctttattatcaagtgatttgcccgcctgtgtgggtagtggtttccctaatgagtaggatgcagggttgagactggggagctcctgcagcatgaggctcttaactgatgggacgccagcacaagacattcagtacattgtggctgtcaggagctggatgggaaaagtagttacttttcccttctttgcccattcccaatatcagcagtcctaaccttattttattttattgtattttattttaatttttttaagactccatcttgaaaaaaagaaaaaattcccaaaagaaagctttaattttaaggtaaatagttataaataattggtttgctaccatgattttngtaga

SEQ ID NO: 59193 - DNA, 730 bp, Homo sapiens
gcggggagcgggctccgctggggagccgaaagcatcttggcgccgcagccgccgccgccgcagcaacaccaggagaggccgggggcagccgccatcggcagcgccaggggacagagcacaggaaagggacccccacagtcacctgtgtttgaaggcgtctacaacaattccagaatgctgcatttccttacagctgttgtgggctccacttgtgatgtaaaggtgaaaaatggtaccacttatgagggtatcttcaagacgctaagctcaaagtttgaactagccgtggatgctgtgcaccggaaagcatctgagccagcaggtggccctcgtcgggaggacattgtggacaccatggtgtttaagccaagtgatgtcatgcttgttcacttccgaaatgttgacttcaactatgctactaaagacaagttcaccgattcagccattgccatgaactcgaaagtgaatggggaacacaaagagaaggtgcttcagcgctgggagcggggtgacagcaacagcgacgactatgacctcgagtctaacatgtccaatggatgggaccccaatgaaatgttcaagttcaatgaggagaactacggtgtgaagactacctatgatagcagtctttcttcttatacggtgcccttagaaaaggacaactcagaagagtttcgtcagcgagagctgcgtgcggcccagttggctccagagattgaatcaagccccc

SEQ ID NO: 59194 - DNA, 667 bp, Homo sapiens
gcggggagcgggctccgctggggagccgaaagcatcttggcgccgcagccgccgccgccgcagcaacaccaggagaggccgggggcagccgccatcggcagcgccaggggacagagcacaggaaagggacccccacagtcacctgtgtttgaaggcgtctacaacaattccagaatgctgcatttccttacagctgttgtgggctccacttgtgatgtaaaggtgaaaaatggtaccacttatgagggtatcttcaagacgctaagctcaaagtttgaactagccgtggatgctgtgcaccggaaagcatctgagccagcaggtggccctcgtcgggaggacattgtggacaccatggtgtttaagccaagtgatgtcatgcttgttcacttccgaaatgttgacttcaactatgctactaaagacaagttcaccgattcagccattgccatgaactcgaaagtgaatggggaacacaaagagaagtccaatggatgggaccccaatgaaatgttcaagttcaatgaggagaactacggtgtgaagactacctatgatagcagtctttcttcttatacggtgcccttagaaaaggacaactcagaagagtttcgtcagcgagagctgcgtgcggcccagttggctccagagattgaatcaagccccc

SEQ ID NO: 59195 - DNA, 300 bp, Homo sapiens
gaagggtattgtaggggtagaggatgacacgatggcagggaacgctgagggttgtaggggatgtaggaagaatagggcgtggcggcaagagcgaaggatatgaactcgagtctgacatgtccaatggatgggaccccaatgaaatgttcaagttcaatgaggagaactacggtgtgaagactacctatgatagcagtctttcttcttatacggtgcccttagaaaaggacaactcagaagagtttcgtcagcgagagctgcgtgcggcccagttggctccagagattgaatcaagccccc

SEQ ID NO: 59196 - DNA, 170 bp, Homo sapiens
ctctcccccacaggttctcagcagttactaagatgtcccctgatttcattgacctctgtgtgtcttcagtccttgacctttaaggctccctggtgccagaatgtctgcagctgtaggatcaaagacccttgggggaaaaatccattctcaaaagagaggaagatggggtg

SEQ ID NO: 59197 - DNA, 316 bp, Homo sapiens
  misc_feature (21)..(21): n is a, c, g, or t
caagtcacagggccccccttngtggcgcggatgttaagattgatatcgaattccgcaagacatgatttggatagaaatatagttgttgcttagatgatctctatatcattccaaatgtgactggcctgattatttttcctgataaactgtctaaaatagctcattattttcatgtcatatagacacgaccttaaggataaaaaaattgaattaaatgggcaatatttcagcaatagtcattttccattccagatttaaaatcagaatcgaagaacataatggatttaaacccagttcagtgcacatgtatcaaaca

SEQ ID NO: 59198 - DNA, 2117 bp, Homo sapiens
agcggacagtgtggtgcccagccaaccagctatacctcttttgaagattttaagaacttagcctcctgaacagtcttcttcgaaagtgaaaagtggtaacagctgatgagtatcaagaaattattttctgcaaaggggcagagttaattgtatttggaacccatgacagcacctactggggaaagacttctaagtgaggagaaacggctctacaggtcatgaaactatggaaatgagatggtttttgtcaaagattcaggatgacttcagaggtggaaaaattaacctagaaaaaactcagaggttacttgaaaaattagatattcggtgcagttatattcatgtgaaacagatttttaagaggacaatgacaggctgaaacaaggaagaatcaccatagaagaatttagagcaatttatcgaattatcacgcacagagaagaaattattgagattttcaacacatattctgaaaaccggaaaattcttttagcaagtaatctggctcaatttctgacacaagaacaatatgcagctgagatgagtaaagctattgcttttgagatcattcagaaatacgagcctatcgaagaagttaggaaagcacaccaaatgtcattagaaggttttacaagatacatggattcacgtgaatgtctactgtttaaaaatgaatgtagaaaagtttatcaagatatgactcatccattaaatgattattttatttcatcttcacataacacatatttggtatctgatcaattattgggaccaagtgacctttggggatatgtaagtgcccttgtgaaaggatgccgttgtttggagattgactgctgggatggagcacaaaatgaacctgttgtatatcatggctacacactcacaagcaaacttctgtttaaaactgttatccaagctatacacaagtatgcattcatgacatctgactacccagtggtgctctctttagaaaatcactgctccactgcccaacaagaagtaatggcagacaatttgcaggctacttttggagagtccttgctttctgatatgcttgatgattttcctgatactctaccatcaccagaggcactaaaattcaaagtattagttaaaaataagaaaataggaaccttaaaggaaacccatgaaagaaaaggttctgataagcgtggagacaatcaagacaaggaaacaggggtaaaaaagttacctggagtaatgcttttcaagaaaaagaagaccaggaagctaaaaattgctctggccttatctgatcttgtcatttatacgaaagctgagaaattcaaaagctttcaacattcaagattatatcagcaatttaatgaaaataattctattggggagacacaagcccgaaaactttcaaaattgcgagtccatgagtttatttttcacaccaggaagttcattaccagaatatatcccaaagcaacaagagcagactcttctaattttaatccccaagaattttggaatataggttgtcaaatggtggctttaaatttccagacccctggtctgcccatggatctgcaaaatgggaaatttttggataatggtggttctggatatattttgaaaccacatttcttaagagagagtaaatcatactttaacccaagtaacataaaagagggtatgccaattacacttacaataaggctcatcagtggtatccagttgcctcttactcattcatcatctaacaaaggtgattcattagtaattatagaagtttttggtgttccaaatgatcaaatgaagcagcagactcgtgtaattaaaaaaaatgcttttagtccaagatggaatgaaacattcacatttattattcatgtcccagaattggcattgatacgttttgttgttgaaggtcaaggtttaatagcaggaaatgaatttcttgggcaatatactttgccacttctatgcatgaacaaaggttatcgtcgtattcctctgttttccagaatgggtgagagccttgagcctgcttcactgtttgtttatgtttggtacgtcagataacagctaatgataaatgacatatcattagctatgcatcgcaataaaacagccaaaatgaatgc

SEQ ID NO: 59199 - DNA, 2095 bp, Homo sapiens
agcggacagtgtggtgcccagccaaccagctatacctcttttgaagattttaagaacttagcctcctgaacagtcttcttcgaaagtgaaaagtggtaacagctgatgagtatcaagaaattattttctgcaaaggggcagagttaattgtatttggaacccatgacagcacctactggggaaagacttctaagtgaggagaaacggctctacagatggtttttgtcaaagattcaggatgacttcagaggtggaaaaattaacctagaaaaaactcagaggttacttgaaaaattagatattcggtgcagttatattcatgtgaaacagatttttaagaggacaatgacaggctgaaacaaggaagaatcaccatagaagaatttagagcaatttatcgaattatcacgcacagagaagaaattattgagattttcaacacatattctgaaaaccggaaaattcttttagcaagtaatctggctcaatttctgacacaagaacaatatgcagctgagatgagtaaagctattgcttttgagatcattcagaaatacgagcctatcgaagaagttaggaaagcacaccaaatgtcattagaaggttttacaagatacatggattcacgtgaatgtctactgtttaaaaatgaatgtagaaaagtttatcaagatatgactcatccattaaatgattattttatttcatcttcacataacacatatttggtatctgatcaattattgggaccaagtgacctttggggatatgtaagtgcccttgtgaaaggatgccgttgtttggagattgactgctgggatggagcacaaaatgaacctgttgtatatcatggctacacactcacaagcaaacttctgtttaaaactgttatccaagctatacacaagtatgcattcatgacatctgactacccagtggtgctctctttagaaaatcactgctccactgcccaacaagaagtaatggcagacaatttgcaggctacttttggagagtccttgctttctgatatgcttgatgattttcctgatactctaccatcaccagaggcactaaaattcaaagtattagttaaaaataagaaaataggaaccttaaaggaaacccatgaaagaaaaggttctgataagcgtggagacaatcaagacaaggaaacaggggtaaaaaagttacctggagtaatgcttttcaagaaaaagaagaccaggaagctaaaaattgctctggccttatctgatcttgtcatttatacgaaagctgagaaattcaaaagctttcaacattcaagattatatcagcaatttaatgaaaataattctattggggagacacaagcccgaaaactttcaaaattgcgagtccatgagtttatttttcacaccaggaagttcattaccagaatatatcccaaagcaacaagagcagactcttctaattttaatccccaagaattttggaatataggttgtcaaatggtggctttaaatttccagacccctggtctgcccatggatctgcaaaatgggaaatttttggataatggtggttctggatatattttgaaaccacatttcttaagagagagtaaatcatactttaacccaagtaacataaaagagggtatgccaattacacttacaataaggctcatcagtggtatccagttgcctcttactcattcatcatctaacaaaggtgattcattagtaattatagaagtttttggtgttccaaatgatcaaatgaagcagcagactcgtgtaattaaaaaaaatgcttttagtccaagatggaatgaaacattcacatttattattcatgtcccagaattggcattgatacgttttgttgttgaaggtcaaggtttaatagcaggaaatgaatttcttgggcaatatactttgccacttctatgcatgaacaaaggttatcgtcgtattcctctgttttccagaatgggtgagagccttgagcctgcttcactgtttgtttatgtttggtacgtcagataacagctaatgataaatgacatatcattagctatgcatcgcaataaaacagccaaaatgaatgc

SEQ ID NO: 59200 - DNA, 1189 bp, Homo sapiens
atctccagttgtggcagccgaaaatgtctccagacattgccaaatccctcctgtgaggcaaagtcgtcccagtggaaaaccagtagcctgtagacatgggtgcccttgtgaaaggatgccgttgtttggagattgactgctgggatggagcacaaaatgaacctgttgtatatcatggctacacactcacaagcaaacttctgtttaaaactgttatccaagctatacacaagtatgcattcatgacatctgactacccagtggtgctctctttagaaaatcactgctccactgcccaacaagaagtaatggcagacaatttgcaggctacttttggagagtccttgctttctgatatgcttgatgattttcctgatactctaccatcaccagaggcactaaaattcaaagtattagttaaaaataagaaaataggaaccttaaaggaaacccatgaaagaaaaggttctgataagcgtggagacaatcaagacaaggaaacaggggtaaaaaagttacctggagtaatgcttttcaagaaaaagaagaccaggaagctaaaaattgctctggccttatctgatcttgtcatttatacgaaagctgagaaattcaaaagctttcaacattcaagattatatcagcaatttaatgaaaataattctattggggagacacaagcccgaaaactttcaaaattgcgagtccatgagtttatttttcacaccaggaagttcattaccagaatatatcccaaagcaacaagagcagactcttctaattttaatccccaagaattttggaatataggttgtcaaatggtggctttaaatttccagacccctggtctgcccatggatctgcaaaatgggaaatttttggataatggtggttctggatatattttgaaaccacatttcttaagagagagtaaatcatactttaacccaagtaacataaaagagggtatgccaattacacttacaataaggctcatcagtggtatccagttgcctcttactcattcatcatctaacaaaggttatcgtcgtattcctctgttttccagaatgggtgagagccttgagcctgcttcactgtttgtttatgtttggtacgtcagataacagctaatgataaatgacatatcattagctatgcatcgcaataaaacagccaaaatgaatgc

SEQ ID NO: 59201 - DNA, 1390 bp, Homo sapiens
agcggacagtgtggtgcccagccaaccagctatacctcttttgaagattttaagaacttagcctcctgaacagtcttcttcgaaagtgaaaagtggtaacagctgatgagtatcaagaaattattttctgcaaaggggcagagttaattgtatttggaacccatgacagcacctactggggaaagacttctaagtgaggagaaacggctctacaggtcatgaaactatggaaatgagatggtttttgtcaaagattcaggatgacttcagaggtggaaaaattaacctagaaaaaactcagaggttacttgaaaaattagatattcggtgcagttatattcatgtgaaacagatttttaagaggacaatgacaggctgaaacaaggaagaatcaccatagaagaatttagagcaatttatcgaattatcacgcacagagaagaaattattgagattttcaacacatattctgaaaaccggaaaattcttttagcaagtaatctggctcaatttctgacacaagaacaatatgcagctgagatgagtaaagctattgcttttgagatcattcagaaatacgagcctatcgaagaagttaggaaagcacaccaaatgtcattagaaggttttacaagatacatggattcacgtgaatgtctactgtttaaaaatgaatgtagaaaagtttatcaagatatgactcatccattaaatgattattttatttcatcttcacataacacatatttggtatctgatcaattattgggaccaagtgacctttggggatatgtaagtgcccttgtgaaaggatgccgttgtttggagattgactgctgggatggagcacaaaatgaacctgttgtatatcatggctacacactcacaagcaaacttctgtttaaaactgttatccaagctatacacaagtatgcattcatgacatctgactacccagtggtgctctctttagaaaatcactgctccactgcccaacaagaagtaatggcagacaatttgcaggctacttttggagagtccttgctttctgatatgcttgatgattttcctgatactctaccatcaccagagcttttagtccaagatggaatgaaacattcacatttattattcatgtcccagaattggcattgatacgttttgttgttgaaggtcaaggtttaatagcaggaaatgaatttcttgggcaatatactttgccacttctatgcatgaacaaaggttatcgtcgtattcctctgttttccagaatgggtgagagccttgagcctgcttcactgtttgtttatgtttggtacgtcagataacagctaatgataaatgacatatcattagctatgcatcgcaataaaacagccaaaatgaatgc

SEQ ID NO: 59202 - DNA, 513 bp, Homo sapiens
cagggtgatttacactgtgctcccaattaccttgtctcaatatgcttacttttctaacagcatctgagatgtgcctaggaaacaggtcttcctgaagcagaagggtggtggctaattttggatcatgcagcgctttgcggaaggagaagtatgagctgtgtattcagttttgggcagttaggaagtcagaatagaaaatgcaaatatttaatttttgtggaagattaatataccagatgggaatataactctatagtcatggtttttaatgtaggcttagtaaagagctcttgtttctcagcaaggctattggagacaccactgattaattggttattggtctaattagatataattccttttgcaggttatcgtcgtattcctctgttttccagaatgggtgagagccttgagcctgcttcactgtttgtttatgtttggtacgtcagataacagctaatgataaatgacatatcattagctatgcatcgcaataaaacagccaaaatgaat

SEQ ID NO: 59203 - DNA, 1420 bp, Homo sapiens
atctccagttgtggcagccgaaaatgtctccagacattgccaaatccctcctgtgaggcaaagtcgtcccagtggaaaaccagtagcctgtagacatgggtgcccttgtgaaaggatgccgttgtttggagattgactgctgggatggagcacaaaatgaacctgttgtatatcatggctacacactcacaagcaaacttctgtttaaaactgttatccaagctatacacaagtatgcattcatgacatctgactacccagtggtgctctctttagaaaatcactgctccactgcccaacaagaagtaatggcagacaatttgcaggctacttttggagagtccttgctttctgatatgcttgatgattttcctgatactctaccatcaccagaggcactaaaattcaaagtattagttaaaaataagaaaataggaaccttaaaggaaacccatgaaagaaaaggttctgataagcgtggagacaatcaagacaaggaaacaggggtaaaaaagttacctggagtaatgcttttcaagaaaaagaagaccaggaagctaaaaattgctctggccttatctgatcttgtcatttatacgaaagctgagaaattcaaaagctttcaacattcaagattatatcagcaatttaatgaaaataattctattggggagacacaagcccgaaaactttcaaaattgcgagtccatgagtttatttttcacaccaggaagttcattaccagaatatatcccaaagcaacaagagcagactcttctaattttaatccccaagaattttggaatataggttgtcaaatggtggctttaaatttccagacccctggtctgcccatggatctgcaaaatgggaaatttttggataatggtggttctggatatattttgaaaccacatttcttaagagagagtaaatcatactttaacccaagtaacataaaagagggtatgccaattacacttacaataaggctcatcagtggtatccagttgcctcttactcattcatcatctaacaaaggtgattcattagtaattatagaagtttttggtgttccaaatgatcaaatgaagcagcagactcgtgtaattaaaaaaaatgcttttagtccaagatggaatgaaacattcacatttattattcatgtcccagaattggcattgatacgttttgttgttgaaggtcaaggtttaatagcaggaaatgaatttcttgggcaatatactttgccacttctatgcatgaacaaaggttatcgtcgtattcctctgttttccagaatgggtgagagccttgagcctgcttcactgtttgtttatgtttggtacgtcagataacagctaatgataaatgacatatcattagctatgcatcgcaataaaacagccaaaatgaatgc

SEQ ID NO: 59204 - DNA, 1883 bp, Homo sapiens
agcggacagtgtggtgcccagccaaccagctatacctcttttgaagattttaagaacttagcctcctgaacagtcttcttcgaaagtgaaaagtggtaacagctgatgagtatcaagaaattattttctgcaaaggggcagagttaattgtatttggaacccatgacagcacctactggggaaagacttctaagtgaggagaaacggctctacaggtcatgaaactatggaaatgagatggtttttgtcaaagattcaggatgacttcagaggtggaaaaattaacctagaaaaaactcagaggttacttgaaaaattagatattcggtgcagttatattcatgtgaaacagatttttaagttaggaaagcacaccaaatgtcattagaaggttttacaagatacatggattcacgtgaatgtctactgtttaaaaatgaatgtagaaaagtttatcaagatatgactcatccattaaatgattattttatttcatcttcacataacacatatttggtatctgatcaattattgggaccaagtgacctttggggatatgtaagtgcccttgtgaaaggatgccgttgtttggagattgactgctgggatggagcacaaaatgaacctgttgtatatcatggctacacactcacaagcaaacttctgtttaaaactgttatccaagctatacacaagtatgcattcatgacatctgactacccagtggtgctctctttagaaaatcactgctccactgcccaacaagaagtaatggcagacaatttgcaggctacttttggagagtccttgctttctgatatgcttgatgattttcctgatactctaccatcaccagaggcactaaaattcaaagtattagttaaaaataagaaaataggaaccttaaaggaaacccatgaaagaaaaggttctgataagcgtggagacaatcaagacaaggaaacaggggtaaaaaagttacctggagtaatgcttttcaagaaaaagaagaccaggaagctaaaaattgctctggccttatctgatcttgtcatttatacgaaagctgagaaattcaaaagctttcaacattcaagattatatcagcaatttaatgaaaataattctattggggagacacaagcccgaaaactttcaaaattgcgagtccatgagtttatttttcacaccaggaagttcattaccagaatatatcccaaagcaacaagagcagactcttctaattttaatccccaagaattttggaatataggttgtcaaatggtggctttaaatttccagacccctggtctgcccatggatctgcaaaatgggaaatttttggataatggtggttctggatatattttgaaaccacatttcttaagagagagtaaatcatactttaacccaagtaacataaaagagggtatgccaattacacttacaataaggctcatcagtggtatccagttgcctcttactcattcatcatctaacaaaggtgattcattagtaattatagaagtttttggtgttccaaatgatcaaatgaagcagcagactcgtgtaattaaaaaaaatgcttttagtccaagatggaatgaaacattcacatttattattcatgtcccagaattggcattgatacgttttgttgttgaaggtcaaggtttaatagcaggaaatgaatttcttgggcaatatactttgccacttctatgcatgaacaaaggttatcgtcgtattcctctgttttccagaatgggtgagagccttgagcctgcttcactgtttgtttatgtttggtacgtcagataacagctaatgataaatgacatatcattagctatgcatcgcaataaaacagccaaaatgaatgc

SEQ ID NO: 59205 - DNA, 794 bp, Homo sapiens
acgagagcgagcgagggagccagcgagagagggagggagagaaggaaagaagaggggaggggtgggggcgagaggtaaatagtcttaaatcggaagggagctgcttctctgtggtcttgacaagcgctgcctgggctccgccggctcactaataactgagtgaccttttctttggctgtattatgtctggctgggaagggattgcattttgcagctgagagccggagcttccttcagctcggctcctcgcacgctgctggggtaagttgtcttgaaccaggacggagagagacagcctcggactgcagttgcctaaaaggaggacacctgtggctcagatgcggtcaacaccattgcttggcgtatccttgaggacctcattattttaaacttaaaaaaaaatagacattccctcccccgtctttttttttttttcaaacaatgcttcttttggacctttcccaaggagaagcgctacaaagcagccactgtgcttactgaacggcctccccctgtatcgcttaattgagaaggtatacaaatgctctcagtccagccagacaccaagccgaaaggttgtgctggctgcaaccgaaagatcaaggaccggtatcttctaaaggcactggacaaatactggcatgaagactgcctgaagtgtgcctgctgtgactgtcgcttgggagaggtgggctccaccctgtacactaaagctaatcttatcctttgtcgcagagactatctgaggtaggaattatccttgcacaccagtgatgactggatgccttttaaag

SEQ ID NO: 59206 - DNA, 3431 bp, Homo sapiens
ggctgtagcagagaggtggggtagaacagtggggagctgtgcggatgggtgaagtgcatgtatgcctgcctagacgggccagaaaagccaaacttaagaaatctgcctatgtacagaacaagtcaactaaggggttctcattaatctaccgtctgtgaataacgttatttttcaggagaagcgctacaaagcagccactgtgcttactgaacggcctccccctgtatcgcttaattgagaaggtatacaaatgctctcagtccagccagacaccaagccgaaaggttgtgctggctgcaaccgaaagatcaaggaccggtatcttctaaaggcactggacaaatactggcatgaagactgcctgaagtgtgcctgctgtgactgtcgcttgggagaggctctttggtgtaacgggaaactgcgctgcctgtagtaagctcatccctgcctttgagatggtgatgcgtgccaaggacaatgtttaccacctggactgctttgcatgtcagctttgtaatcagagattttgtgttggagacaaatttttcctaaagaataacatgatcctttgccagacggactacgaggaaggtttaatgaaagaaggttatgcaccccaggttcgctgatctatcaacatcaccccattaagaatacaaagcactacattcttttatcttttttgctccacatgtacataagaattgacacaggaacctactgaatagcgtagatataggaaggcaggatggttatatggaataaaaggcggactgcatctgtatgtagtgaaattgccccagttcagagttgaatgtttattattaaagaaaaaagtaatgtacatatggctggatttttttgcttgctattcgtttttgtgtcacttggcatgagatgtttattttggactattgtatataatgtattgtaatatttgaagcacaaatgtaatacagttttattgtgttaccatttgtgttccatttgcttctttgtattgttgcatttagtacaatcagtgtttaaacttactgtatatttatgctttctgtatttaccagctattttaaatgagctgtaactttctagtaaagaattgaaaagcaaatctcactaatgatacacagatagataaagcaagtctatcaacattaaaaatactaaaaaataaagacacacacagagcattttagtgacatccactacttattgccgctatgagttagagtctatcagtgttcttgttataaccccctattttcagggggttaaaaatcagctttaaaaaaatacataaaaatttcatcttaaagcactttcattttataccaacgtgaaaagtgccatttttagaataactttaaagcttaacaggtttccttttaatatcctttttttgtgtgctctttacttacacaatggctttgttttgctttttcagccacaccccttatgtgaactagtgcctttgggtatcacgtaaaattttttccaaagggttactttaaaaatctgttaccacaattatgagatgatttttaagtgataaattaaacttcttcttgtataaattctgcccagatctctccacaagagctgagggtttcataactttatggcttaataaatgtatgacactgaaaagatttgagtgtgaatctactgaaatcactataatgcacattgaagctatgatggtatttgagtagtgaggttacttttgatcggagcaacataatgctcatagaatcttctagaagaagagaaacaaagggattgataaaatgctgagaactagtgattatatatttttctgtatttacctgacatttattttaatgttcaaaaagtaaacactttaagtttgatgtgttttactctctcattgttttaagtaattgccaactcagaatacatcattcttaggctgaaatttgtctttccattttttaaggtgaaatagtactaccttacgtgatagcatacaaagaagaaagctctagaaagagaaattatggagaatgattatttaaattacaattaaggaaatgagaatatgatcccctcttccgagttgcccacaaacttgcttctttgcttttgctccctgtaatagaactacttttcaacaaatctaattttgcacggcaccgttaaccatattttcactacagcaaacttagtgctatgggttttctttttctttgtttttttcttgatcacttgtataggaaacaatattttccagtgttatttgcatatatattttgtccttccaatatatgcattacagatgaaaattaaatgttatacctgaattcttgggttggggccaaaatattaagctgaaaataatgctggtgtggatttgttttaaaacaaagctttattatgaacatgcatgtgaatctggatattgcctcttatttttaagaaaatggttctgtgaaaagtgaatgatatgtatttttccaaatgcttcatggttaggagtcttcaagttccatgttccccagatttgagatatactaaagaaagaaattcaaaagtagctatttggggcccacaaaaataactattattttagccttagagccttacacttgtttcatgaagagaaaggacttgcataaccaaaataaacaaagcaagacaaattaaaaatatgtgggggagagatcagtgaaaagtggttttcttaatgcagccctgctggtccccattaacaattgcttgaaattcacatggatgtaaaattataattgtcaggatcttattcagatgatcttttaaggtttaactggttttgcttttgtttatctatatgtcaaaatacttgtaaattgggaacaaacttctctcagcttcttgaagttgttcaactatccttgccactggaagaccaaacaaggttttcactgcttttttttttacataatatgctgagaattatttcttatgctttttactacaaacaaaattactcacctggattaaagattaaggccttaatctgtttagattatctttaatctccatgaaatcgtgaaataagacaagaatagtgtttcagctgtaggccattttacagctaattgcccataaattgtagcatttattgacctgaagtactaagctaattgtcttgactactcaaagcccctgaattgttgtcaactttcccctttgtgttgtgtagccctaacgtcatttagcttgttgtctgatgcctccagtaggacacctccgatggagctttgatttctgagcagcgaaagctcccttcctaagatgcatctcgcataggctgcctatgatgaaggaccgtgcacctccactccaacagagtgctgagtttaaaagttgacctgtgtttgtaatttcactttcatcttgcttaataaatatctgctggattctttcattca

SEQ ID NO: 59207 - DNA, 3423 bp, Homo sapiens
ggctgtagcagagaggtggggtagaacagtggggagctgtgcggatgggtgaagtgcatgtatgcctgcctagacgggccagaaaagccaaacttaagaaatctgcctatgtacagaacaagtcaactaaggggttctcattaatctaccgtctgtgaataacgttatttttcaggtatacaaatgctctcagtccagccagacaccaagccgaaaggttgtgctggctgcaaccgaaagatcaaggaccggtatcttctaaaggcactggacaaatactggcatgaagactgcctgaagtgtgcctgctgtgactgtcgcttgggagaggtgggctccaccctgtacactaaagctaatcttatcctttgtcgcagagactatctgaggctctttggtgtaacgggaaactgcgctgcctgtagtaagctcatccctgcctttgagatggtgatgcgtgccaaggacaatgtttaccacctggactgctttgcatgtcagctttgtaatcagagattttgtgttggagacaaatttttcctaaagaataacatgatcctttgccagacggactacgaggaaggtttaatgaaagaaggttatgcaccccaggttcgctgatctatcaacatcaccccattaagaatacaaagcactacattcttttatcttttttgctccacatgtacataagaattgacacaggaacctactgaatagcgtagatataggaaggcaggatggttatatggaataaaaggcggactgcatctgtatgtagtgaaattgccccagttcagagttgaatgtttattattaaagaaaaaagtaatgtacatatggctggatttttttgcttgctattcgtttttgtgtcacttggcatgagatgtttattttggactattgtatataatgtattgtaatatttgaagcacaaatgtaatacagttttattgtgttaccatttgtgttccatttgcttctttgtattgttgcatttagtacaatcagtgtttaaacttactgtatatttatgctttctgtatttaccagctattttaaatgagctgtaactttctagtaaagaattgaaaagcaaatctcactaatgatacacagatagataaagcaagtctatcaacattaaaaatactaaaaaataaagacacacacagagcattttagtgacatccactacttattgccgctatgagttagagtctatcagtgttcttgttataaccccctattttcagggggttaaaaatcagctttaaaaaaatacataaaaatttcatcttaaagcactttcattttataccaacgtgaaaagtgccatttttagaataactttaaagcttaacaggtttccttttaatatcctttttttgtgtgctctttacttacacaatggctttgttttgctttttcagccacaccccttatgtgaactagtgcctttgggtatcacgtaaaattttttccaaagggttactttaaaaatctgttaccacaattatgagatgatttttaagtgataaattaaacttcttcttgtataaattctgcccagatctctccacaagagctgagggtttcataactttatggcttaataaatgtatgacactgaaaagatttgagtgtgaatctactgaaatcactataatgcacattgaagctatgatggtatttgagtagtgaggttacttttgatcggagcaacataatgctcatagaatcttctagaagaagagaaacaaagggattgataaaatgctgagaactagtgattatatatttttctgtatttacctgacatttattttaatgttcaaaaagtaaacactttaagtttgatgtgttttactctctcattgttttaagtaattgccaactcagaatacatcattcttaggctgaaatttgtctttccattttttaaggtgaaatagtactaccttacgtgatagcatacaaagaagaaagctctagaaagagaaattatggagaatgattatttaaattacaattaaggaaatgagaatatgatcccctcttccgagttgcccacaaacttgcttctttgcttttgctccctgtaatagaactacttttcaacaaatctaattttgcacggcaccgttaaccatattttcactacagcaaacttagtgctatgggttttctttttctttgtttttttcttgatcacttgtataggaaacaatattttccagtgttatttgcatatatattttgtccttccaatatatgcattacagatgaaaattaaatgttatacctgaattcttgggttggggccaaaatattaagctgaaaataatgctggtgtggatttgttttaaaacaaagctttattatgaacatgcatgtgaatctggatattgcctcttatttttaagaaaatggttctgtgaaaagtgaatgatatgtatttttccaaatgcttcatggttaggagtcttcaagttccatgttccccagatttgagatatactaaagaaagaaattcaaaagtagctatttggggcccacaaaaataactattattttagccttagagccttacacttgtttcatgaagagaaaggacttgcataaccaaaataaacaaagcaagacaaattaaaaatatgtgggggagagatcagtgaaaagtggttttcttaatgcagccctgctggtccccattaacaattgcttgaaattcacatggatgtaaaattataattgtcaggatcttattcagatgatcttttaaggtttaactggttttgcttttgtttatctatatgtcaaaatacttgtaaattgggaacaaacttctctcagcttcttgaagttgttcaactatccttgccactggaagaccaaacaaggttttcactgcttttttttttacataatatgctgagaattatttcttatgctttttactacaaacaaaattactcacctggattaaagattaaggccttaatctgtttagattatctttaatctccatgaaatcgtgaaataagacaagaatagtgtttcagctgtaggccattttacagctaattgcccataaattgtagcatttattgacctgaagtactaagctaattgtcttgactactcaaagcccctgaattgttgtcaactttcccctttgtgttgtgtagccctaacgtcatttagcttgttgtctgatgcctccagtaggacacctccgatggagctttgatttctgagcagcgaaagctcccttcctaagatgcatctcgcataggctgcctatgatgaaggaccgtgcacctccactccaacagagtgctgagtttaaaagttgacctgtgtttgtaatttcactttcatcttgcttaataaatatctgctggattctttcattca

SEQ ID NO: 59208 - DNA, 3364 bp, Homo sapiens
ggctgtagcagagaggtggggtagaacagtggggagctgtgcggatgggtgaagtgcatgtatgcctgcctagacgggccagaaaagccaaacttaagaaatctgcctatgtacagaacaagtcaactaaggggttctcattaatctaccgtctgtgaataacgttatttttcaggtatacaaatgctctcagtccagccagacaccaagccgaaaggttgtgctggctgcaaccgaaagatcaaggaccggtatcttctaaaggcactggacaaatactggcatgaagactgcctgaagtgtgcctgctgtgactgtcgcttgggagaggctctttggtgtaacgggaaactgcgctgcctgtagtaagctcatccctgcctttgagatggtgatgcgtgccaaggacaatgtttaccacctggactgctttgcatgtcagctttgtaatcagagattttgtgttggagacaaatttttcctaaagaataacatgatcctttgccagacggactacgaggaaggtttaatgaaagaaggttatgcaccccaggttcgctgatctatcaacatcaccccattaagaatacaaagcactacattcttttatcttttttgctccacatgtacataagaattgacacaggaacctactgaatagcgtagatataggaaggcaggatggttatatggaataaaaggcggactgcatctgtatgtagtgaaattgccccagttcagagttgaatgtttattattaaagaaaaaagtaatgtacatatggctggatttttttgcttgctattcgtttttgtgtcacttggcatgagatgtttattttggactattgtatataatgtattgtaatatttgaagcacaaatgtaatacagttttattgtgttaccatttgtgttccatttgcttctttgtattgttgcatttagtacaatcagtgtttaaacttactgtatatttatgctttctgtatttaccagctattttaaatgagctgtaactttctagtaaagaattgaaaagcaaatctcactaatgatacacagatagataaagcaagtctatcaacattaaaaatactaaaaaataaagacacacacagagcattttagtgacatccactacttattgccgctatgagttagagtctatcagtgttcttgttataaccccctattttcagggggttaaaaatcagctttaaaaaaatacataaaaatttcatcttaaagcactttcattttataccaacgtgaaaagtgccatttttagaataactttaaagcttaacaggtttccttttaatatcctttttttgtgtgctctttacttacacaatggctttgttttgctttttcagccacaccccttatgtgaactagtgcctttgggtatcacgtaaaattttttccaaagggttactttaaaaatctgttaccacaattatgagatgatttttaagtgataaattaaacttcttcttgtataaattctgcccagatctctccacaagagctgagggtttcataactttatggcttaataaatgtatgacactgaaaagatttgagtgtgaatctactgaaatcactataatgcacattgaagctatgatggtatttgagtagtgaggttacttttgatcggagcaacataatgctcatagaatcttctagaagaagagaaacaaagggattgataaaatgctgagaactagtgattatatatttttctgtatttacctgacatttattttaatgttcaaaaagtaaacactttaagtttgatgtgttttactctctcattgttttaagtaattgccaactcagaatacatcattcttaggctgaaatttgtctttccattttttaaggtgaaatagtactaccttacgtgatagcatacaaagaagaaagctctagaaagagaaattatggagaatgattatttaaattacaattaaggaaatgagaatatgatcccctcttccgagttgcccacaaacttgcttctttgcttttgctccctgtaatagaactacttttcaacaaatctaattttgcacggcaccgttaaccatattttcactacagcaaacttagtgctatgggttttctttttctttgtttttttcttgatcacttgtataggaaacaatattttccagtgttatttgcatatatattttgtccttccaatatatgcattacagatgaaaattaaatgttatacctgaattcttgggttggggccaaaatattaagctgaaaataatgctggtgtggatttgttttaaaacaaagctttattatgaacatgcatgtgaatctggatattgcctcttatttttaagaaaatggttctgtgaaaagtgaatgatatgtatttttccaaatgcttcatggttaggagtcttcaagttccatgttccccagatttgagatatactaaagaaagaaattcaaaagtagctatttggggcccacaaaaataactattattttagccttagagccttacacttgtttcatgaagagaaaggacttgcataaccaaaataaacaaagcaagacaaattaaaaatatgtgggggagagatcagtgaaaagtggttttcttaatgcagccctgctggtccccattaacaattgcttgaaattcacatggatgtaaaattataattgtcaggatcttattcagatgatcttttaaggtttaactggttttgcttttgtttatctatatgtcaaaatacttgtaaattgggaacaaacttctctcagcttcttgaagttgttcaactatccttgccactggaagaccaaacaaggttttcactgcttttttttttacataatatgctgagaattatttcttatgctttttactacaaacaaaattactcacctggattaaagattaaggccttaatctgtttagattatctttaatctccatgaaatcgtgaaataagacaagaatagtgtttcagctgtaggccattttacagctaattgcccataaattgtagcatttattgacctgaagtactaagctaattgtcttgactactcaaagcccctgaattgttgtcaactttcccctttgtgttgtgtagccctaacgtcatttagcttgttgtctgatgcctccagtaggacacctccgatggagctttgatttctgagcagcgaaagctcccttcctaagatgcatctcgcataggctgcctatgatgaaggaccgtgcacctccactccaacagagtgctgagtttaaaagttgacctgtgtttgtaatttcactttcatcttgcttaataaatatctgctggattctttcattca

SEQ ID NO: 59209 - DNA, 3361 bp, Homo sapiens
tccggagctctctcgcaggagttcttcttttggactggtccaggaggagaagcgctacaaagcagccactgtgcttactgaacggcctccccctgtatcgcttaattgagaaggtatacaaatgctctcagtccagccagacaccaagccgaaaggttgtgctggctgcaaccgaaagatcaaggaccggtatcttctaaaggcactggacaaatactggcatgaagactgcctgaagtgtgcctgctgtgactgtcgcttgggagaggtgggctccaccctgtacactaaagctaatcttatcctttgtcgcagagactatctgaggctctttggtgtaacgggaaactgcgctgcctgtagtaagctcatccctgcctttgagatggtgatgcgtgccaaggacaatgtttaccacctggactgctttgcatgtcagctttgtaatcagagattttgtgttggagacaaatttttcctaaagaataacatgatcctttgccagacggactacgaggaaggtttaatgaaagaaggttatgcaccccaggttcgctgatctatcaacatcaccccattaagaatacaaagcactacattcttttatcttttttgctccacatgtacataagaattgacacaggaacctactgaatagcgtagatataggaaggcaggatggttatatggaataaaaggcggactgcatctgtatgtagtgaaattgccccagttcagagttgaatgtttattattaaagaaaaaagtaatgtacatatggctggatttttttgcttgctattcgtttttgtgtcacttggcatgagatgtttattttggactattgtatataatgtattgtaatatttgaagcacaaatgtaatacagttttattgtgttaccatttgtgttccatttgcttctttgtattgttgcatttagtacaatcagtgtttaaacttactgtatatttatgctttctgtatttaccagctattttaaatgagctgtaactttctagtaaagaattgaaaagcaaatctcactaatgatacacagatagataaagcaagtctatcaacattaaaaatactaaaaaataaagacacacacagagcattttagtgacatccactacttattgccgctatgagttagagtctatcagtgttcttgttataaccccctattttcagggggttaaaaatcagctttaaaaaaatacataaaaatttcatcttaaagcactttcattttataccaacgtgaaaagtgccatttttagaataactttaaagcttaacaggtttccttttaatatcctttttttgtgtgctctttacttacacaatggctttgttttgctttttcagccacaccccttatgtgaactagtgcctttgggtatcacgtaaaattttttccaaagggttactttaaaaatctgttaccacaattatgagatgatttttaagtgataaattaaacttcttcttgtataaattctgcccagatctctccacaagagctgagggtttcataactttatggcttaataaatgtatgacactgaaaagatttgagtgtgaatctactgaaatcactataatgcacattgaagctatgatggtatttgagtagtgaggttacttttgatcggagcaacataatgctcatagaatcttctagaagaagagaaacaaagggattgataaaatgctgagaactagtgattatatatttttctgtatttacctgacatttattttaatgttcaaaaagtaaacactttaagtttgatgtgttttactctctcattgttttaagtaattgccaactcagaatacatcattcttaggctgaaatttgtctttccattttttaaggtgaaatagtactaccttacgtgatagcatacaaagaagaaagctctagaaagagaaattatggagaatgattatttaaattacaattaaggaaatgagaatatgatcccctcttccgagttgcccacaaacttgcttctttgcttttgctccctgtaatagaactacttttcaacaaatctaattttgcacggcaccgttaaccatattttcactacagcaaacttagtgctatgggttttctttttctttgtttttttcttgatcacttgtataggaaacaatattttccagtgttatttgcatatatattttgtccttccaatatatgcattacagatgaaaattaaatgttatacctgaattcttgggttggggccaaaatattaagctgaaaataatgctggtgtggatttgttttaaaacaaagctttattatgaacatgcatgtgaatctggatattgcctcttatttttaagaaaatggttctgtgaaaagtgaatgatatgtatttttccaaatgcttcatggttaggagtcttcaagttccatgttccccagatttgagatatactaaagaaagaaattcaaaagtagctatttggggcccacaaaaataactattattttagccttagagccttacacttgtttcatgaagagaaaggacttgcataaccaaaataaacaaagcaagacaaattaaaaatatgtgggggagagatcagtgaaaagtggttttcttaatgcagccctgctggtccccattaacaattgcttgaaattcacatggatgtaaaattataattgtcaggatcttattcagatgatcttttaaggtttaactggttttgcttttgtttatctatatgtcaaaatacttgtaaattgggaacaaacttctctcagcttcttgaagttgttcaactatccttgccactggaagaccaaacaaggttttcactgcttttttttttacataatatgctgagaattatttcttatgctttttactacaaacaaaattactcacctggattaaagattaaggccttaatctgtttagattatctttaatctccatgaaatcgtgaaataagacaagaatagtgtttcagctgtaggccattttacagctaattgcccataaattgtagcatttattgacctgaagtactaagctaattgtcttgactactcaaagcccctgaattgttgtcaactttcccctttgtgttgtgtagccctaacgtcatttagcttgttgtctgatgcctccagtaggacacctccgatggagctttgatttctgagcagcgaaagctcccttcctaagatgcatctcgcataggctgcctatgatgaaggaccgtgcacctccactccaacagagtgctgagtttaaaagttgacctgtgtttgtaatttcactttcatcttgcttaataaatatctgctggattctttcattca

SEQ ID NO: 59210 - DNA, 3899 bp, Homo sapiens
ggctgtagcagagaggtggggtagaacagtggggagctgtgcggatgggtgaagtgcatgtatgcctgcctagacgggccagaaaagccaaacttaagaaatctgcctatgtacagaacaagtcaactaaggggttctcattaatctaccgtctgtgaataacgttatttttcaggagaagcgctacaaagcagccactgtgcttactgaacggcctccccctgtatcgcttaattgagaaggtatacaaatgctctcagtccagccagacaccaagccgaaaggttgtgctggctgcaaccgaaagatcaaggaccggtatcttctaaaggcactggacaaatactggcatgaagactgcctgaagtgtgcctgctgtgactgtcgcttgggagaggctctttggtgtaacgggaaactgcgctgcctgtagtaagctcatccctgcctttgagatggtgatgcgtgccaaggacaatgtttaccacctggactgctttgcatgtcagctttgtaatcagagattttgtgttggagacaaatttttcctaaagaataacatgatcctttgccagacggactacgaggaaggtttaatgaaagaaggttatgcaccccaggttcgctgatctatcaacatcaccccattaagaatacaaagcactacattcttttatcttttttgctccacatgtacataagaattgacacaggaacctactgaatagcgtagatataggaaggcaggatggttatatggaataaaaggcggactgcatctgtatgtagtgaaattgccccagttcagagttgaatgtttattattaaagaaaaaagtaatgtacatatggctggatttttttgcttgctattcgtttttgtgtcacttggcatgagatgtttattttggactattgtatataatgtattgtaatatttgaagcacaaatgtaatacagttttattgtgttaccatttgtgttccatttgcttctttgtattgttgcatttagtacaatcagtgtttaaacttactgtatatttatgctttctgtatttaccagctattttaaatgagctgtaactttctagtaaagaattgaaaagcaaatctcactaatgatacacagatagataaagcaagtctatcaacattaaaaatactaaaaaataaagacacacacagagcattttagtgacatccactacttattgccgctatgagttagagtctatcagtgttcttgttataaccccctattttcagggggttaaaaatcagctttaaaaaaatacataaaaatttcatcttaaagcactttcattttataccaacgtgaaaagtgccatttttagaataactttaaagcttaacaggtttccttttaatatcctttttttgtgtgctctttacttacacaatggctttgttttgctttttcagccacaccccttatgtgaactagtgcctttgggtatcacgtaaaattttttccaaagggttactttaaaaatctgttaccacaattatgagatgatttttaagtgataaattaaacttcttcttgtataaattctgcccagatctctccacaagagctgagggtttcataactttatggcttaataaatgtatgacactgaaaagatttgagtgtgaatctactgaaatcactataatgcacattgaagctatgatggtatttgagtagtgaggttacttttgatcggagcaacataatgctcatagaatcttctagaagaagagaaacaaagggattgataaaatgctgagaactagtgattatatatttttctgtatttacctgacatttattttaatgttcaaaaagtaaacactttaagtttgatgtgttttactctctcattgttttaagtaattgccaactcagaatacatcattcttaggctgaaatttgtctttccattttttaaggtgaaatagtactaccttacgtgatagcatacaaagaagaaagctctagaaagagaaattatggagaatgattatttaaattacaattaaggaaatgagaatatgatcccctcttccgagttgcccacaaacttgcttctttgcttttgctccctgtaatagaactacttttcaacaaatctaattttgcacggcaccgttaaccatattttcactacagcaaacttagtgctatgggttttctttttctttgtttttttcttgatcacttgtataggaaacaatattttccagtgttatttgcatatatattttgtccttccaatatatgcattacagatgaaaattaaatgttatacctgaattcttgggttggggccaaaatattaagctgaaaataatgctggtgtggatttgttttaaaacaaagctttattatgaacatgcatgtgaatctggatattgcctcttatttttaagaaaatggttctgtgaaaagtgaatgatatgtatttttccaaatgcttcatggttaggagtcttcaagttccatgttccccagatttgagatatactaaagaaagaaattcaaaagtagctatttggggcccacaaaaataactattattttagccttagagccttacacttgtttcatgaagagaaaggacttgcataaccaaaataaacaaagcaagacaaattaaaaatatgtgggggagagatcagtgaaaagtggttttcttaatgcagccctgctggtccccattaacaattgcttgaaattcacatggatgtaaaattataattgtcaggatcttattcagatgatcttttaaggtttaactggttttgcttttgtttatctatatgtcaaaatacttgtaaattgggaacaaacttctctcagcttcttgaagttgttcaactatccttgccactggaagaccaaacaaggttttcactgcttttttttttacataatatgctgagaattatttcttatgctttttactacaaacaaaattactcacctggattaaagattaaggccttaatctgtttagattatctttaatctccatgaaatcgtgaaataagacaagaatagtgtttcagctgtaggccattttacagctaattgcccataaattgtagcatttattgacctgaagtactaagctaattgtcttgactactcaaagcccctgaattgttgtcaactttcccctttgtgttgtgtagccctaacgtcatttagcttgttgtctgatgcctccagtaggacacctccgatggagctttgatttctgagcagcgaaagctcccttcctaagatgcatctcgcataggctgcctatgatgaaggaccgtgcacctccactccaacagagtgctgagtttaaaagttgacctgtgtttgtaatttcactttcatcttgcttaataaatatctgctggattctttcattcaaaaaaaaaaaaaaaaaaaaaaaaaaaaaaaaggggggcgcccccccccaaaagtttcccccgcggggggccccaaagctttccgcccgttccccgcgtttttttgtggttccaagggggccccctatgagggggaggcgcgttttaaaagcctgaggcccgtgggccgccgccgttttacacaaccgctgggtgcagcggggggaaaacacgcggcgctagtcctggggaatctctgcgggggaggggacccctacacctctgcgtggggggtgggaccctatacttggcgcaccaaacctcccatactcagagaatttaaaaggcctcataaggggtaaatttctaaaactttctcagccggtgtttcttagcgggggcttcaacccatgggctgtaatagtgccttgggcggctagaaaagttgtggcctaacgcggagatattgattttcggaaactttttatcc

SEQ ID NO: 59211 - DNA, 2057 bp, Homo sapiens
cccattgtgtattgtaaagagcacacaatggctttgttttgctttttcagccacaccccttacgtgatacccaaaggcactagttcacataaggggtgtgggtatcacgtaaaattttttccaaagggttactttaaaaatctgttaccacaattatgagatgatttttaagtgataaattaaacttcttcttgtataaattctgcccagatctctccacaagagctgagggtttcataactttatggcttaataaatgtatgacactgaaaagatttgagtgtgaatctactgaaatcactataatgcacattgaagctatgatggtatttgagtagtgaggttacttttgatcggagcaacataatgctcatagaatcttctagaagaagagaaacaaagggattgataaaatgctgagaactagtgattatatatttttctgtatttacctgacatttattttaatgttcaaaaagtaaacactttaagtttgatgtgttttactctctcattgttttaagtaattgccaactcagaatacatcattcttaggctgaaatttgtctttccattttttaaggtgaaatagtactaccttacgtgatagcatacaaagaagaaagctctagaaagagaaattatggagaatgattatttaaattacaattaaggaaatgagaatatgatcccctcttccgagttgcccacaaacttgcttctttgcttttgctccctgtaatagaactacttttcaacaaatctaattttgcacggcaccgttaaccatattttcactacagcaaacttagtgctatgggttttctttttctttgtttttttcttgatcacttgtataggaaacaatattttccagtgttatttgcatatatattttgtccttccaatatatgcattacagatgaaaattaaatgttatacctgaattcttgggttggggccaaaatattaagctgaaaataatgctggtgtggatttgttttaaaacaaagctttattatgaacatgcatgtgaatctggatattgcctcttatttttaagaaaatggttctgtgaaaagtgaatgatatgtatttttccaaatgcttcatggttaggagtcttcaagttccatgttccccagatttgagatatactaaagaaagaaattcaaaagtagctatttggggcccacaaaaataactattattttagccttagagccttacacttgtttcatgaagagaaaggacttgcataaccaaaataaacaaagcaagacaaattaaaaatatgtgggggagagatcagtgaaaagtggttttcttaatgcagccctgctggtccccattaacaattgcttgaaattcacatggatgtaaaattataattgtcaggatcttattcagatgatcttttaaggtttaactggttttgcttttgtttatctatatgtcaaaatacttgtaaattgggaacaaacttctctcagcttcttgaagttgttcaactatccttgccactggaagaccaaacaaggttttcactgcttttttttttacataatatgctgagaattatttcttatgctttttactacaaacaaaattactcacctggattaaagattaaggccttaatctgtttagattatctttaatctccatgaaatcgtgaaataagacaagaatagtgtttcagctgtaggccattttacagctaattgcccataaattgtagcatttattgacctgaagtactaagctaattgtcttgactactcaaagcccctgaattgttgtcaactttcccctttgtgttgtgtagccctaacgtcatttagcttgttgtctgatgcctccagtaggacacctccgatggagctttgatttctgagcagcgaaagctcccttcctaagatgcatctcgcataggctgcctatgatgaaggaccgtgcacctccactccaacagagtgctgagtttaaaagttgacctgtgtttgtaatttcactttcatcttgcttaataaatatctgctggattctttcattca

SEQ ID NO: 59212 - DNA, 1286 bp, Homo sapiens
  misc_feature (52)..(52): n is a, c, g, or t
  misc_feature (197)..(197): n is a, c, g, or t
agataggactttgctagtagcgataacgaatagtgtgccgacgtggtcctgntggagtaatagtagatatatggtgttattacagactagtattgcatattgagaagaattcgaggatctatatgatgatgatgactctggaattctctagcgagattgagagagaaccgcactggttgaggcatgcagaagctgtntgtgagagtagtgtactagagtggtagtacatgacgagtctataattgtgatctatgcaatgtggagtctcgggtggaggtcgatattaaataagaaaatggttctgtgaaaagtgaatgatatgtatttttccaaatgcttcatggttaggagtcttcaagttccatgttccccagatttgagatatactaaagaaagaaattcaaaagtagctatttggggcccacaaaaataactattattttagccttagagccttacacttgtttcatgaagagaaaggacttgcataaccaaaataaacaaagcaagacaaattaaaaatatgtgggggagagatcagtgaaaagtggttttcttaatgcagccctgctggtccccattaacaattgcttgaaattcacatggatgtaaaattataattgtcaggatcttattcagatgatcttttaaggtttaactggttttgcttttgtttatctatatgtcaaaatacttgtaaattgggaacaaacttctctcagcttcttgaagttgttcaactatccttgccactggaagaccaaacaaggttttcactgcttttttttttacataatatgctgagaattatttcttatgctttttactacaaacaaaattactcacctggattaaagattaaggccttaatctgtttagattatctttaatctccatgaaatcgtgaaataagacaagaatagtgtttcagctgtaggccattttacagctaattgcccataaattgtagcatttattgacctgaagtactaagctaattgtcttgactactcaaagcccctgaattgttgtcaactttcccctttgtgttgtgtagccctaacgtcatttagcttgttgtctgatgcctccagtaggacacctccgatggagctttgatttctgagcagcgaaagctcccttcctaagatgcatctcgcataggctgcctatgatgaaggaccgtgcacctccactccaacagagtgctgagtttaaaagttgacctgtgtttgtaatttcactttcatcttgcttaataaatatctgctggattctttcattca

SEQ ID NO: 59213 - DNA, 3781 bp, Homo sapiens
acgagagcgagcgagggagccagcgagagagggagggagagaaggaaagaagaggggaggggtgggggcgagaggtaaatagtcttaaatcggaagggagctgcttctctgtggtcttgacaagcgctgcctgggctccgccggctcactaataactgagtgaccttttctttggctgtattatgtctggctgggaagggattgcattttgcagctgagagccggagcttccttcagctcggctcctcgcacgctgctggggtaagttgtcttgaaccaggacggagagagacagcctcggactgcagttgcctaaaaggaggacacctgtggctcagatgcggtcaacaccattgcttggcgtatccttgaggacctcattattttaaacttaaaaaaaaatagacattccctcccccgtctttttttttttttcaaacaatgcttcttttggacctttcccaaggagaagcgctacaaagcagccactgtgcttactgaacggcctccccctgtatcgcttaattgagaaggtatacaaatgctctcagtccagccagacaccaagccgaaaggttgtgctggctgcaaccgaaagatcaaggaccggtatcttctaaaggcactggacaaatactggcatgaagactgcctgaagtgtgcctgctgtgactgtcgcttgggagaggtgggctccaccctgtacactaaagctaatcttatcctttgtcgcagagactatctgaggctctttggtgtaacgggaaactgcgctgcctgtagtaagctcatccctgcctttgagatggtgatgcgtgccaaggacaatgtttaccacctggactgctttgcatgtcagctttgtaatcagagattttgtgttggagacaaatttttcctaaagaataacatgatcctttgccagacggactacgaggaaggtttaatgaaagaaggttatgcaccccaggttcgctgatctatcaacatcaccccattaagaatacaaagcactacattcttttatcttttttgctccacatgtacataagaattgacacaggaacctactgaatagcgtagatataggaaggcaggatggttatatggaataaaaggcggactgcatctgtatgtagtgaaattgccccagttcagagttgaatgtttattattaaagaaaaaagtaatgtacatatggctggatttttttgcttgctattcgtttttgtgtcacttggcatgagatgtttattttggactattgtatataatgtattgtaatatttgaagcacaaatgtaatacagttttattgtgttaccatttgtgttccatttgcttctttgtattgttgcatttagtacaatcagtgtttaaacttactgtatatttatgctttctgtatttaccagctattttaaatgagctgtaactttctagtaaagaattgaaaagcaaatctcactaatgatacacagatagataaagcaagtctatcaacattaaaaatactaaaaaataaagacacacacagagcattttagtgacatccactacttattgccgctatgagttagagtctatcagtgttcttgttataaccccctattttcagggggttaaaaatcagctttaaaaaaatacataaaaatttcatcttaaagcactttcattttataccaacgtgaaaagtgccatttttagaataactttaaagcttaacaggtttccttttaatatcctttttttgtgtgctctttacttacacaatggctttgttttgctttttcagccacaccccttatgtgaactagtgcctttgggtatcacgtaaaattttttccaaagggttactttaaaaatctgttaccacaattatgagatgatttttaagtgataaattaaacttcttcttgtataaattctgcccagatctctccacaagagctgagggtttcataactttatggcttaataaatgtatgacactgaaaagatttgagtgtgaatctactgaaatcactataatgcacattgaagctatgatggtatttgagtagtgaggttacttttgatcggagcaacataatgctcatagaatcttctagaagaagagaaacaaagggattgataaaatgctgagaactagtgattatatatttttctgtatttacctgacatttattttaatgttcaaaaagtaaacactttaagtttgatgtgttttactctctcattgttttaagtaattgccaactcagaatacatcattcttaggctgaaatttgtctttccattttttaaggtgaaatagtactaccttacgtgatagcatacaaagaagaaagctctagaaagagaaattatggagaatgattatttaaattacaattaaggaaatgagaatatgatcccctcttccgagttgcccacaaacttgcttctttgcttttgctccctgtaatagaactacttttcaacaaatctaattttgcacggcaccgttaaccatattttcactacagcaaacttagtgctatgggttttctttttctttgtttttttcttgatcacttgtataggaaacaatattttccagtgttatttgcatatatattttgtccttccaatatatgcattacagatgaaaattaaatgttatacctgaattcttgggttggggccaaaatattaagctgaaaataatgctggtgtggatttgttttaaaacaaagctttattatgaacatgcatgtgaatctggatattgcctcttatttttaagaaaatggttctgtgaaaagtgaatgatatgtatttttccaaatgcttcatggttaggagtcttcaagttccatgttccccagatttgagatatactaaagaaagaaattcaaaagtagctatttggggcccacaaaaataactattattttagccttagagccttacacttgtttcatgaagagaaaggacttgcataaccaaaataaacaaagcaagacaaattaaaaatatgtgggggagagatcagtgaaaagtggttttcttaatgcagccctgctggtccccattaacaattgcttgaaattcacatggatgtaaaattataattgtcaggatcttattcagatgatcttttaaggtttaactggttttgcttttgtttatctatatgtcaaaatacttgtaaattgggaacaaacttctctcagcttcttgaagttgttcaactatccttgccactggaagaccaaacaaggttttcactgcttttttttttacataatatgctgagaattatttcttatgctttttactacaaacaaaattactcacctggattaaagattaaggccttaatctgtttagattatctttaatctccatgaaatcgtgaaataagacaagaatagtgtttcagctgtaggccattttacagctaattgcccataaattgtagcatttattgacctgaagtactaagctaattgtcttgactactcaaagcccctgaattgttgtcaactttcccctttgtgttgtgtagccctaacgtcatttagcttgttgtctgatgcctccagtaggacacctccgatggagctttgatttctgagcagcgaaagctcccttcctaagatgcatctcgcataggctgcctatgatgaaggaccgtgcacctccactccaacagagtgctgagtttaaaagttgacctgtgtttgtaatttcactttcatcttgcttaataaatatctgctggattctttcattca

SEQ ID NO: 59214 - DNA, 3372 bp, Homo sapiens
tcctcagtcgactcctgcagaggtcacattttgtgtgcgggtttgtccccagcgtttgagaagcgctacaaagcagccactgtgcttactgaacggcctccccctgtatcgcttaattgagaaggtatacaaatgctctcagtccagccagacaccaagccgaaaggttgtgctggctgcaaccgaaagatcaaggaccggtatcttctaaaggcactggacaaatactggcatgaagactgcctgaagtgtgcctgctgtgactgtcgcttgggagaggtgggctccaccctgtacactaaagctaatcttatcctttgtcgcagagactatctgaggctctttggtgtaacgggaaactgcgctgcctgtagtaagctcatccctgcctttgagatggtgatgcgtgccaaggacaatgtttaccacctggactgctttgcatgtcagctttgtaatcagagattttgtgttggagacaaatttttcctaaagaataacatgatcctttgccagacggactacgaggaaggtttaatgaaagaaggttatgcaccccaggttcgctgatctatcaacatcaccccattaagaatacaaagcactacattcttttatcttttttgctccacatgtacataagaattgacacaggaacctactgaatagcgtagatataggaaggcaggatggttatatggaataaaaggcggactgcatctgtatgtagtgaaattgccccagttcagagttgaatgtttattattaaagaaaaaagtaatgtacatatggctggatttttttgcttgctattcgtttttgtgtcacttggcatgagatgtttattttggactattgtatataatgtattgtaatatttgaagcacaaatgtaatacagttttattgtgttaccatttgtgttccatttgcttctttgtattgttgcatttagtacaatcagtgtttaaacttactgtatatttatgctttctgtatttaccagctattttaaatgagctgtaactttctagtaaagaattgaaaagcaaatctcactaatgatacacagatagataaagcaagtctatcaacattaaaaatactaaaaaataaagacacacacagagcattttagtgacatccactacttattgccgctatgagttagagtctatcagtgttcttgttataaccccctattttcagggggttaaaaatcagctttaaaaaaatacataaaaatttcatcttaaagcactttcattttataccaacgtgaaaagtgccatttttagaataactttaaagcttaacaggtttccttttaatatcctttttttgtgtgctctttacttacacaatggctttgttttgctttttcagccacaccccttatgtgaactagtgcctttgggtatcacgtaaaattttttccaaagggttactttaaaaatctgttaccacaattatgagatgatttttaagtgataaattaaacttcttcttgtataaattctgcccagatctctccacaagagctgagggtttcataactttatggcttaataaatgtatgacactgaaaagatttgagtgtgaatctactgaaatcactataatgcacattgaagctatgatggtatttgagtagtgaggttacttttgatcggagcaacataatgctcatagaatcttctagaagaagagaaacaaagggattgataaaatgctgagaactagtgattatatatttttctgtatttacctgacatttattttaatgttcaaaaagtaaacactttaagtttgatgtgttttactctctcattgttttaagtaattgccaactcagaatacatcattcttaggctgaaatttgtctttccattttttaaggtgaaatagtactaccttacgtgatagcatacaaagaagaaagctctagaaagagaaattatggagaatgattatttaaattacaattaaggaaatgagaatatgatcccctcttccgagttgcccacaaacttgcttctttgcttttgctccctgtaatagaactacttttcaacaaatctaattttgcacggcaccgttaaccatattttcactacagcaaacttagtgctatgggttttctttttctttgtttttttcttgatcacttgtataggaaacaatattttccagtgttatttgcatatatattttgtccttccaatatatgcattacagatgaaaattaaatgttatacctgaattcttgggttggggccaaaatattaagctgaaaataatgctggtgtggatttgttttaaaacaaagctttattatgaacatgcatgtgaatctggatattgcctcttatttttaagaaaatggttctgtgaaaagtgaatgatatgtatttttccaaatgcttcatggttaggagtcttcaagttccatgttccccagatttgagatatactaaagaaagaaattcaaaagtagctatttggggcccacaaaaataactattattttagccttagagccttacacttgtttcatgaagagaaaggacttgcataaccaaaataaacaaagcaagacaaattaaaaatatgtgggggagagatcagtgaaaagtggttttcttaatgcagccctgctggtccccattaacaattgcttgaaattcacatggatgtaaaattataattgtcaggatcttattcagatgatcttttaaggtttaactggttttgcttttgtttatctatatgtcaaaatacttgtaaattgggaacaaacttctctcagcttcttgaagttgttcaactatccttgccactggaagaccaaacaaggttttcactgcttttttttttacataatatgctgagaattatttcttatgctttttactacaaacaaaattactcacctggattaaagattaaggccttaatctgtttagattatctttaatctccatgaaatcgtgaaataagacaagaatagtgtttcagctgtaggccattttacagctaattgcccataaattgtagcatttattgacctgaagtactaagctaattgtcttgactactcaaagcccctgaattgttgtcaactttcccctttgtgttgtgtagccctaacgtcatttagcttgttgtctgatgcctccagtaggacacctccgatggagctttgatttctgagcagcgaaagctcccttcctaagatgcatctcgcataggctgcctatgatgaaggaccgtgcacctccactccaacagagtgctgagtttaaaagttgacctgtgtttgtaatttcactttcatcttgcttaataaatatctgctggattctttcattca

SEQ ID NO: 59215 - DNA, 3708 bp, Homo sapiens
ggctgtagcagagaggtggggtagaacagtggggagctgtgcggatgggtgaagtgcatgtatgcctgcctagacgggccagaaaagccaaacttaagaaatctgcctatgtacagaacaagtcaactaaggggttctcattaatctaccgtctgtgaataacgttatttttcaggagaagcgctacaaagcagccactgtgcttactgaacggcctccccctgtatcgcttaattgagaaggtatacaaatgctctcagtccagccagacaccaagccgaaaggttgtgctggctgcaaccgaaagatcaaggaccggtatcttctaaaggcactggacaaatactggcatgaagactgcctgaagtgtgcctgctgtgactgtcgcttgggagaggctctttggtgtaacgggaaactgcgctgcctgtagtaagctcatccctgcctttgagatggtgatgcgtgccaaggacaatgtttaccacctggactgctttgcatgtcagctttgtaatcagagattttgtgttggagacaaatttttcctaaagaataacatgatcctttgccagacggactacgaggaaggtttaatgaaagaaggttatgcaccccaggttcgctgatctatcaacatcaccccattaagaatacaaagcactacattcttttatcttttttgctccacatgtacataagaattgacacaggaacctactgaatagcgtagatataggaaggcaggatggttatatggaataaaaggcggactgcatctgtatgtagtgaaattgccccagttcagagttgaatgtttattattaaagaaaaaagtaatgtacatatggctggatttttttgcttgctattcgtttttgtgtcacttggcatgagatgtttattttggactattgtatataatgtattgtaatatttgaagcacaaatgtaatacagttttattgtgttaccatttgtgttccatttgcttctttgtattgttgcatttagtacaatcagtgtttaaacttactgtatatttatgctttctgtatttaccagctattttaaatgagctgtaactttctagtaaagaattgaaaagcaaatctcactaatgatacacagatagataaagcaagtctatcaacattaaaaatactaaaaaataaagacacacacagagcattttagtgacatccactacttattgccgctatgagttagagtctatcagtgttcttgttataaccccctattttcagggggttaaaaatcagctttaaaaaaatacataaaaatttcatcttaaagcactttcattttataccaacgtgaaaagtgccatttttagaataactttaaagcttaacaggtttccttttaatatcctttttttgtgtgctctttacttacacaatggctttgttttgctttttcagccacaccccttatgtgaactagtgcctttgggtatcacgtaaaattttttccaaagggttactttaaaaatctgttaccacaattatgagatgatttttaagtgataaattaaacttcttcttgtataaattctgcccagatctctccacaagagctgagggtttcataactttatggcttaataaatgtatgacactgaaaagatttgagtgtgaatctactgaaatcactataatgcacattgaagctatgatggtatttgagtagtgaggttacttttgatcggagcaacataatgctcatagaatcttctagaagaagagaaacaaagggattgataaaatgctgagaactagtgattatatatttttctgtatttacctgacatttattttaatgttcaaaaagtaaacactttaagtttgatgtgttttactctctcattgttttaagtaattgccaactcagaatacatcattcttaggctgaaatttgtctttccattttttaaggtgaaatagtactaccttacgtgatagcatacaaagaagaaagctctagaaagagaaattatggagaatgattatttaaattacaattaaggaaatgagaatatgatcccctcttccgagttgcccacaaacttgcttctttgcttttgctccctgtaatagaactacttttcaacaaatctaattttgcacggcaccgttaaccatattttcactacagcaaacttagtgctatgggttttctttttctttgtttttttcttgatcacttgtataggaaacaatattttccagtgttatttgcatatatattttgtccttccaatatatgcattacagatgaaaattaaatgttatacctgaattcttgggttggggccaaaatattaagctgaaaataatgctggtgtggatttgttttaaaacaaagctttattatgaacatgcatgtgaatctggatattgcctcttatttttaagaaaatggttctgtgaaaagtgaatgatatgtatttttccaaatgcttcatggttaggagtcttcaagttccatgttccccagatttgagatatactaaagaaagaaattcaaaagtagctatttggggcccacaaaaataactattattttagccttagagccttacacttgtttcatgaagagaaaggacttgcataaccaaaataaacaaagcaagacaaattaaaaatatgtgggggagagatcagtgaaaagtggttttcttaatgcagccctgctggtccccattaacaattgcttgaaattcacatggatgtaaaattataattgtcaggatcttattcagatgatcttttaaggtttaactggttttgcttttgtttatctatatgtcaaaatacttgtaaattgggaacaaacttctctcagcttcttgaagttgttcaactatccttgccactggaagaccaaacaaggttttcactgcttttttttttacataatatgctgagaattatttcttatgctttttactacaaacaaaattactcacctggattaaagattaaggccttaatctgtttagattatctttaatctccatgaaatcgtgaaataagacaagaatagtgtttcagctgtaggccattttacagctaattgcccataaattgtagcatttattgacctgaagtactaagctaattgtcttgactactcaaagcccctgaattgttgtcaactttcccctttgtgttgtgtagccctaacgtcatttagcttgttgtctgatgcctccagtaggacacctccgatggagctttgatttctgagcagcgaaagctcccttcctaagatgcatctcgcataggctgcctatgatgaaggaccgtgcacctccactccaacagagtgctgagtttaaaagttgacctgtgtttgtaatttcactttcatcttgcttaataaatatctgctggattctttcattcacttttttacatttggatttatgtttttaataaaaggggtgttacactatttgattgcacttaattggcaaaatttaagatgatctctagaaagcatatgttaagtccatgaaaagaaaaaaaaggtgtgtaaggacatttactttctaaagctaagtcataacaagcatagacaaagcaccccaaatgtttctctgaatgtaatgtttaggatctctgcgctaggtcgtttaccgctatttatttttatggggaaaataaaactctcaaaaatgaag

SEQ ID NO: 59216 - DNA, 184 bp, Homo sapiens
atatgtagctggacatactcttctattttcaattacattttgttttactttcacccacttgctatgtagtttttcatctcatgcatttttttgatactttatgtcagtagtggctgaattgtatttgaaaaatatgtatcatatataattacatacacacaattaaagctaagtttatttcaaa

SEQ ID NO: 59217 - DNA, 659 bp, Homo sapiens
cgatctagaggatctcctccataatgtgtgcccacttactgttcccccaaaccttcttgctcttataagctttgtcaaagctattactccaggttgtagtgcttttttttctactttactttgatctaagtcctgtctttccttcaaattttggctacttattgcatgaagctttttccaatatttccattcttggtggtaattttagtctaagaattcctgaagtactacctaattgaaacacacatttgatacttggatcatgttatcttgtattataacttattactccattaatatatcctcggccgggtgcagtggctcctgcctataatcccagcatgttgggaggccgaggtgggagggtcatttgaggccaggagttggagatcagccttggcaacatagtgagaccctgtctctacaaaaaaatttaaaaaattaaaaaaattaatatgtcctatttctttagcaaaatcattggctccttgaggggagagagcttgtcttatatgcccctttgtaattccattgcctagcacagcagatgttgtcactaataggtttgattctgtgatttggatccaatgtcattgtgacaggatactttttcccccataataggttatttttatatgactttatgcccacaaaaccca

SEQ ID NO: 59218 - DNA, 957 bp, Homo sapiens
aaaaacacctcacttgctagagttctaaatcaagtttctaattctaaaaacttggctgtgtagttaagtacaaggcctgaataactattgtagaggttataggacagagagatctccatgtttttataggtgggatattttttgttgttgacagaagtaacttcgcctgatctctgttccattattttaattttttttttttactttatacactaaaaatttggattaaaaaatgaaaaatgtaagaaatcaaatgttactcaaaaagtattgttttgctcccaactctgcaattctacatgaagccatttgccaaagccagatatggtttacttactgttcccccaaaccttcttgctcttataagctttgtcaaagctattactccaggttgtagtgcttttttttctactttactttgatctaagtcctgtctttccttcaaattttggctacttattgcatgaagctttttccaatatttccattcttggtggtaattttagtctaagaattcctgaagtactacctaattgaaacacacatttgatacttggatcatgttatcttgtattataacttattactccattaatatatcctcggccgggtgcagtggctcctgcctataatcccagcatgttgggaggccgaggtgggagggtcatttgaggccaggagttggagatcagccttggcaacatagtgagaccctgtctctacaaaaaaatttaaaaaattaaaaaaattaatatgtcctatttctttagcaaaatcattggctccttgaggggagagagcttgtcttatatgcccctttgtaattccattgcctagcacagcagatgttgtcactaataggtttgattctgtgatttggatccaatgtcattgtgacaggatactttttcccccataataggttatttttatatgactttatgcccacaaaaccca

SEQ ID NO: 59219 - DNA, 888 bp, Homo sapiens
aaaaacacctcacttgctagagttctaaatcaagtttctaattctaaaaacttggctgtgtagttaagtacaaggcctgaataactattgtagaggttataggacagagagatctccatgtttttataggtgggatattttttgttgttgacagaagtaacttcgcctgatctctgttccattattttaattttttttttttactttatacactaaaaatttggattaaaaaatgaaaaatgtaagaaatcaaatgttactcaaaaagtattgttttgctcccaactctgcaattctacatgaagccatttgccaaagccagatatggtttacttactgttcccccaaaccttcttgctcttataagctttgtcaaagctattactccaggttgtagtgcttttttttctactttactttgatctaagtcctgtctttccttcaaattttggctacttattgcatgaagctttttccaatatttccattcttggtggtaattttagtctaagaattcctgaagtactacctaattgaaacacacatttgatacttggatcatgttatcttgtattataacttattactccattaatatatcctcggccgggtgcagtggctcctgcctataatcccagcatgttgggaggccgaggtgggagggtcatttgaggccaggagttggagatcagccttggcaacatagtgagaccctgtctctactagaaatataaagattggccggatgtggtggtgggtgcctgtaatcccagccacccgggaggctgaggttggagaattgtttggacccaggagacggaggttgctgtgagcccacatggtgccaatgcactccagcctgggcgacagagtgagacaccgtctcaa

SEQ ID NO: 59220 - DNA, 697 bp, Homo sapiens
gcggaagaaaaaggatgagacatgtggcttgtgggcagaaagggaggcaggagaacattcccagtctgcctttcactgagtttttacctgttcactagaacaacaaaagggaacccaatcgggaaactctgctgtcaactaagcaaactctaaatttaacatttgggggacccccttggagagtagttgagagctatgtgctccccttttcagaaaaatgctctcaaatactcagtgcataagcccacagccttagcaggttcccagaccttaggtcagcaatcctgttctaaggcatacatcacgagcagcattttgattttcatctggggaacttatagttcataaagacctactgatccattaaaatttccacttgattttgccattagtaatctcttaaacaagtccaaggaagccagaggaagttatttcttgaatgcttttatactagtgctttcaagagttcgtgttgctgactccagtttttaaaattattattctcatcttctgcaatgcctcgaggcatgtttttagctgaatagcaataattatgggattgtgcaatactggaagaagcagtaaaaataaaatgtaatactaaaaaaaaaaaaagtctttacttcatctaggaaattcagtttaaagaatttttacctccggacataacagtgactatgctggaactctgtctttg

SEQ ID NO: 59221 - DNA, 898 bp, Homo sapiens
  misc_feature (870)..(870): n is a, c, g, or t
aaaaaaccaaaccactttggaagttactcaggcctctgctctggctggacatagtttagtctataactttcaacccttaatgataattaaattcatctttgtttaatttcataaatttaaaagtagggtccttttcagttagtgattctcagccctgattcacattaaatttttaaacacgggggattctctgcccggctggaagaaaatgactggatgggacaggggtcactatttgaaacattcctctgtgcggccaaggtcgcaaaatgctgtcctcgcaggggaacaaaaagagtttgatttcccataatttgatgctgtgatttggtttcctcaggatgtgaactgtagaacattccagttactggccttgaatggttctgggaatataagaatccctgtctgtcttttcaaatagttttcatggaaccttgtcctgtttgaacttggctgaaaatggaagtaaagatgccctcttgggggcccagagatgacagatgtggctccccctgctgcccccaccccttctccagactgtgggcggctccccttcctgctttagaatccctcagatggaggaggcagtacagtagtcactgtgccatcgtgtctggcactgtgctggcgtggtctgcaggatcccacttatgaactctccagattgggagctgtggcaggataacagcccccaagacagctgtgtcctaatccccagaacctgtgaccacgctgcctcacgtggcagaagggactcggcaggtgtgattgagtgaaggatcttttttttttttttctttgagatgaagtttcgctcttgttgcagtgaaccgagattcgccactgcgctccagcctgggtgagatagancaagactgtgtctcaaaaaacaaaacaa

SEQ ID NO: 59222 - DNA, 984 bp, Homo sapiens
  misc_feature (876)..(876): n is a, c, g, or t
  misc_feature (891)..(891): n is a, c, g, or t
  misc_feature (956)..(956): n is a, c, g, or t
aaaaaaccaaaccactttggaagttactcaggcctctgctctggctggacatagtttagtctataactttcaacccttaatgataattaaattcatctttgtttaatttcataaatttaaaagtagggtccttttcagttagtgattctcagccctgattcacattaaatttttaaacacgggggattctctgcccggctggaagaaaatgactggatgggacaggggtcactatttgaaacattcctctgtgcggccaaggtcgcaaaatgctgtcctcgcaggggaacaaaaagagtttgatttcccataatttgatgctgtgatttggtttcctcaggatgtgaactgtagaacattccagttactggccttgaatggttctgggaatataagaatccctgtctgtcttttcaaatagttttcatggaaccttgtcctgtttgaacttggctgaaaatggaagtaaagatgccctcttgggggcccagagatgacagatgtggctccccctgctgcccccaccccttctccagactgtgggcggctccccttcctgctttagaatccctcagatggaggaggcagtacagtagtcactgtgccatcgtgtctggcactgtgctggcgtggtctgcaggatcccacttatgaactctccagattgggagctgtggcaggataacagcccccaagacagctgtgtcctaatccccagaacctgtgaccacgctgcctcacgtggcagaagggactcggcaggtgtgattgagtgaaggatcttttttttttttttctttgagatgaagtttcgctcttgttgcccaggctggagttcaatggcatgatctcagctcactgcagcctctgcctccnggagaatcgcttgancccgggagacggaggttgcagtgaaccgagattcgccactgcgctccagcctgggtgagatagancaagactgtgtctcaaaaaacaaaacaa

SEQ ID NO: 59223 - DNA, 1055 bp, Homo sapiens
  misc_feature (947)..(947): n is a, c, g, or t
  misc_feature (962)..(962): n is a, c, g, or t
  misc_feature (1027)..(1027): n is a, c, g, or t
aaaaaaccaaaccactttggaagttactcaggcctctgctctggctggacatagtttagtctataactttcaacccttaatgataattaaattcatctttgtttaatttcataaatttaaaagtagggtccttttcagttagtgattctcagccctgattcacattaaatttttaaacacgggggattctctgcccggctggaagaaaatgactggatgggacaggggtcactatttgaaacattcctctgtgcggccaaggtcgcaaaatgctgtcctcgcaggggaacaaaaagagtttgatttcccataatttgatgctgtgatttggtttcctcaggatgtgaactgtagaacattccagttactggccttgaatggttctgggaatataagaatccctgtctgtcttttcaaatagttttcatggaaccttgtcctgtttgaacttggctgaaaatggaagtaaagatgccctcttgggggcccagagatgacagatgtggctccccctgctgcccccaccccttctccagactgtgggcggctccccttcctgctttagaatccctcagatggaggaggcagtacagtagtcactgtgccatcgtgtctggcactgtgctggcgtggtctgcaggatcccacttatgaactctccagattgggagctgtggcaggataacagcccccaagacagctgtgtcctaatccccagaacctgtgaccacgctgcctcacgtggcagaagggactcggcaggtgtgattgagtgaaggatcttttttttttttttctttgagatgaagtttcgctcttgttgcccaggctggagttcaatggcatgatctcagctcactgcagcctctgcctcctactaaaaatacaaaattagccaggtgtgctggcgcatgcctgtaatccccgctacccaggaggctgaggcnggagaatcgcttgancccgggagacggaggttgcagtgaaccgagattcgccactgcgctccagcctgggtgagatagancaagactgtgtctcaaaaaacaaaacaa

SEQ ID NO: 59224 - DNA, 1942 bp, Homo sapiens
aaaaaaccaaaccactttggaagttactcaggcctctgctctggctggacatagtttagtctataactttcaacccttaatgataattaaattcatctttgtttaatttcataaatttaaaagtagggtccttttcagttagtgattctcagccctgattcacattaaatttttaaacacgggggattctctgcccggctggaagaaaatgactggatgggacaggggtcactatttgaaacattcctctgtgcggccaaggtcgcaaaatgctgtcctcgcaggggaacaaaaagagtttgatttcccataatttgatgctgtgatttggtttcctcaggatgtgaactgtagaacattccagttactggccttgaatggttctgggaatataagaatccctgtctgtcttttcaaatagttttcatggaaccttgtcctgtttgaacttggctgaaaatggaagtaaagatgccctcttgggggcccagagatgacagatgtggctccccctgctgcccccaccccttctccagactgtgggcggctccccttcctgctttagaatccctcagatggaggaggcagtacagtagtcactgtgccatcgtgtctggcactgtgctggcgtggtctgcaggatcccacttatgaactctccagattgggagctgtggcaggataacagcccccaagacagctgtgtcctaatccccagaacctgtgaccacgctgcctcacgtggcagaagggactcggcaggtgtgattgagtgaaggatcttttttttttttttctttgagatgaagtttcgctcttgttgcccaggctggagttcaatggcatgatctcagctcactgcagcctctgcctcccgggttcaagtgattctcccacctcagcctcccgagtagctgggattacaggtgtccagaaccatactggctaatttttgtatttttagtagagacagggtttcaccatgttgaccaggctggtctcgaactcctgacctcaggtgatccgaccgcctcggcctcccaaagtgctgggattacaggtgtgagccatcatgcctggctgagttaaggatcttgcaacagagagattatcctggatggtctgggtgggcccagtccattgggtgagtccttcaaaggtggagacctttccctgctggccagagagaggctgtcttgctggttttggagatggaaggaggtaccactagtcaaggattgcaagcagtctctagaacagggattccaacactccggacacagaccagtagtggtccatggcctattaggaagtggggtgcacagcaggttaggggccggcaagccagcgaagcttcatctgtatttatagccactccccgtcgctggcgttaccacccgagctccgcctcctgtcacatcagcggtgggcattagattctcatagcagcacgagccctattgtgaactgcacacacgagggatgtaggttgcacgctccttatgagaatctgatgcctgatgatctgtcactgtctcccgtcacccccagatggggctgtctagttgcaggaaaacaagctcagggctcccactgagtctctgtgatggtgagttgtagaattatttaattatatgttacaatgtaataatagtagaaataaagtgcacaataaatgcaatgcacttgaatcgtcctgaaaccatccctccccgaccccaatccatggaaaaattgtgttccgcgaaaccggtctctggtgccaaaaaggttggggaccgcttctggaaaagctggaaaaggcaagaaaacgcattctctccctcagcctctggaaggaaccagcactgtgggactaatttacatactgtagggtaataaatttgtgttgcttcgaaccactaaatttatggtaatttgtttgcggcagcaatggaaaact

SEQ ID NO: 59225 - DNA, 2080 bp, Homo sapiens
aaaaaaccaaaccactttggaagttactcaggcctctgctctggctggacatagtttagtctataactttcaacccttaatgataattaaattcatctttgtttaatttcataaatttaaaagtagggtccttttcagttagtgattctcagccctgattcacattaaatttttaaacacgggggattctctgcccggctggaagaaaatgactggatgggacaggggtcactatttgaaacattcctctgtgcggccaaggtcgcaaaatgctgtcctcgcaggggaacaaaaagagtttgatttcccataatttgatgctgtgatttggtttcctcaggatgtgaactgtagaacattccagttactggccttgaatggttctgggaatataagaatccctgtctgtcttttcaaatagttttcatggaaccttgtcctgtttgaacttggctgaaaatggaagtaaagatgccctcttgggggcccagagatgacagatgtggctccccctgctgcccccaccccttctccagactgtgggcggctccccttcctgctttagaatccctcagatggaggaggcagtacagtagtcactgtgccatcgtgtctggcactgtgctggcgtggtctgcaggatcccacttatgaactctccagattgggagctgtggcaggataacagcccccaagacagctgtgtcctaatccccagaacctgtgaccacgctgcctcacgtggcagaagggactcggcaggtgtgattgagtgaaggatcttttttttttttttctttgagatgaagtttcgctcttgttgcccaggctggagttcaatggcatgatctcagctcactgcagcctctgcctcccgggttcaagtgattctcccacctcagcctcccgagtagctgggattacaggtgtccagaaccatactggctaatttttgtatttttagtagagacagggtttcaccatgttgaccaggctggtctcgaactcctgacctcaggtgatccgaccgcctcggcctcccaaagtgctgggattacaggtgtgagccatcatgcctggctgagttaaggatcttgcaacagagagattatcctggatggtctgggtgggcccagtccattgggtgagtccttcaaaggtggagacctttccctgctggccagagagaggctgtcttgctggttttggagatggaaggaggtaccactagtcaaggattgcaagcagtctctagaacagggattccaacactccggacacagaccagtagtggtccatggcctattaggaagtggggtgcacagcaggttaggggccggcaagccagcgaagcttcatctgtatttatagccactccccgtcgctggcgttaccacccgagctccgcctcctgtcacatcagcggtgggcattagattctcatagcagcacgagccctattgtgaactgcacacacgagggatgtaggttgcacgctccttatgagaatctgatgcctgatgatctgtcactgtctcccgtcacccccagatggggctgtctagttgcaggaaaacaagctcagggctcccactgagtctctgtgatggtgagttgtagaattatttaattatatgttacaatgtaataatagtagaaataaagtgcacaataaatgcaatgcacttgaatcgtcctgaaaccatccctccccgaccccaatccatggaaaaattgtgttccgcgaaaccggtctctggtgccaaaaaggttggggaccgcttctggaaaagctggaaaaggcaagaaaacgcattctctccctcagcctctggaaggaaccagcactgtgggactaatttacatactgtagggtaataaatttgtcccacagtgcgggctcccactgagtctctgtgatggtgagttgtcagaattcatttaattatatgttacaatgtcataactcataagaaataaagtgcacaataaatgcaatgcactttgaatcgtcctgaaaccatccctcccgacccaatccatggaaattgtgtccgcgaaacggtcctggtgccaaaag

SEQ ID NO: 59226 - DNA, 358 bp, Homo sapiens
cttgctgatctttccatttaaacatgcatgatctccagtactttgtacaatgtatagtatattaaatacatttatgtgtaattttgtgtgtatttttatatggtataattaaaattattacatttatgtgattgtaattcacaaaaagtactacttactatattctgtagagtgtgttgtgaatgtttttacctgtgtttgagcattatggtgtaggtttaatagatgaatatttgccttcagtctctgctcaggtattaatgtgtagtaatttttggtgctttctttttaatctgtgataatctggtgttctgaatgttcaaaaataaatttggttgaatacgcacatggtaaaaag

SEQ ID NO: 59227 - DNA, 805 bp, Homo sapiens
  misc_feature (781)..(781): n is a, c, g, or t
gtatttgaagttatgtggcatttctgctgaggtaattttttaaagttaactatgacttgattcagctgaacatttttttgcagacaaaatctagtgcactaccagataggcatatagcaatagaacaattaaattttataaatattttaagaatagactgcttctttctgaatgtttttgagaaagacagggtgatagtttatctaaacattaagatcggtaaatagaattttaaataaaattgctgctttggtaaatttacctcttaattgtttgcatttggtttataaacactttccccttctcattgcaagttttaaaaaaaaatgaagttcagagggatttttagtaattatttggaccaataaactcaggtattctgccatgaacatcattactacagccaaataagctttcaggtactcaaccattgaactatatttttgtgcataggaaaactatttcgaaaacagttttgaaaatgaaaatgctaatgttgagttcagcaccactgtgccatcatcaccaaccttatgattcacagaaggagcaaagacaagggtgtctgtttatgaaatgcattcctctggtctagtgatcagggcatacgccacatggagagggccacgctaaataaaaacaaaagctattaacagcagatacagtaaagagattacaaataaattggtgtgtgttgcctcatgagaatcactcttttgtgagagaaaggttccctcttttgcattttttaggctgtgaacataggtacctacatcaaggnttaccagtcacctcttcaaaacca

SEQ ID NO: 59228 - DNA, 565 bp, Homo sapiens
tgaggtgatgtggcagttaaaacacttagaacagtcagtgcctagcatgaaacaagtgatcccagcatagaagctctgctttcatagcctcatctggaaaacaagatccacctaagtgtgcaaaaacctcacatcctttggcaatccatttgtggcacaaataaaactggatcagattgcagcatcacatttgagaaatgtaattcctgataagtttcttgagcacgacttagcccccacgaggctgggtagtcagagaagttgccacaaatgctgttgactgtgttgaggagagcaggtggaatgggctctggctggactgggcagtatgtaccctctgcacagaggtaactggccaaaggtgcccatttttcagcagaagccccaaaccctgatttttaatgtgaaatatcctgatttccaactttagcaactcaatttcttctaaacactgtgtgggccagaccagacgcaggtgcatgcagccagtttgtgccacctctcccagtggccctctctgactgccacccctggagcttttagtgcctgcggcctcacacacttc

SEQ ID NO: 59229 - DNA, 318 bp, Homo sapiens
ctgagttttgatcaaaaatagtgtacctgtgtagtgtggttaaatcatgttgacctcactctctttcatctagcctcttaaaatatcaatactaagacttataaaatgagcatatgaaaaccagtaactttccttcctacagattgaaaatactcaatcagaaagtatattcaaagaaaatatttaatccacagtagcgacataaaaattggttttaaaaaaaatctagtaataaaccttagagaaatttgaagaaactatataaagaaacaagaaactcaattgagtgtcataaaacgaaacttgaatgaatggttt

SEQ ID NO: 59230 - DNA, 300 bp, Homo sapiens
ggctgatttttaaatttttgttgttgttgttgtagagacaaggtctcactgcgtggcccaggctggtctcaaactccttagctcaaacaatcctcccacctcagcttcccaaagtgctggtatttattacaggcatgagtcactttcctagccttgtatgaaattttattttatttatttatttaaaaattgagataggatctcgttatgttgcccaggttggtattgaactcctgggcttaagcaatccttctgccatgccctcccaaagtgctgggattacaggcatgaaccatcaca

SEQ ID NO: 59231 - DNA, 691 bp, Homo sapiens
acgcgtgtgcttgtgtgcctgtgtgcgagcgtgtgcattatgtatgcgtgtgtgtgcactcctgtgcatgtggctatatgggcgtgcacacgcgtggttaggtacatgtatgtgtgtgtgcttctgtttatgcatgtgggcgggtgtgcttgcatatgtgtccgaggacatgggctgcaactcggaaacctgagcgtgggccctggccccttgagggatcccggcctccctgcaggatgtggccagcccaggtccccactcacgccctgccgtcgccttgttgcagagccgggccccacgccccctgccgcgcccgcgtccccggcctgctggagcgactcgcccggccagcactacttctccagcctcgccgcggccgcctgcccgcctgcctcgccctccgacgccgccggcgcctcctcgtcttccgcctcgtcgtcctctgccgcgtcggggcccgcccccccgcgccccgtcgagggccagctcagcgcgcggagccgcagcaacagcgccgagcgcctgctggaggccgtggccgccaccgccgccgaggagcccccggaggccgcgcccggccgcgcgcgcgccgtggagaaccagtactccttctactagcccgcggcgccgcccgggtgggacacgccaagctcttcagtgaagacacgatgttattaaaagcctgttttag

SEQ ID NO: 59232 - DNA, 798 bp, Homo sapiens
tccccacctcaggggaacagggtgcagagacggatcccgaggctgaacccgagctggagctatccgactacccatggttccacgggacactgtcccgggtcaaggctgctcaactggttctggcaggggggccccggaaccacggcctcttcgtgatccgccaaagtgagactcggcctggggagtacgtgctgaccttcaacttccagggcaaggccaagcacctgcgcctgtccctgaacggccacggccagtgtcacgtacagcatctgtggttccagtctgtgcttgacatgctccgccacttccacacacaccccatcccactggagtcagggggctcggccgacatcacccttcgcagctatgtgcgggcccaggaccccccaccagagccgggccccacgccccctgccgcgcccgcgtccccggcctgctggagcgactcgcccggccagcactacttctccagcctcgccgcggccgcctgcccgcctgcctcgccctccgacgccgccggcgcctcctcgtcttccgcctcgtcgtcctctgccgcgtcggggcccgcccccccgcgccccgtcgagggccagctcagcgcgcggagccgcagcaacagcgccgagcgcctgctggaggccgtggccgccaccgccgccgaggagcccccggaggccgcgcccggccgcgcgcgcgccgtggagaaccagtactccttctactagcccgcggcgccgcccgggtgggacacgccaagctcttcagtgaagacacgatgttattaaaagcctgttttag

SEQ ID NO: 59233 - DNA, 436 bp, Homo sapiens
ctaagagtgagtagaaaagagtcaaaccatttataatttgatagaagccgcatttactgtaatagcactaaacttaaggtgttagaaaattaagcctttttttgctcaaaacctcttttgtgtttcagcttaaacagatttcttggcattcttccagttcattttcaacatttccgaggcgttactttactaagaagcaggaattgaactaaacttccaatttctaaaacaaaggagaaaacaggcatgtgatatacagtttaatgcagtaagcactggttacatagtatgtttgattacaattagaatatcattaagttttgtgactaggtaatcattacatagtaactattaattagacttaattattttatgtataaatttaatttaacagttacatactaacaatgcatgctaagaaatattagaaattttc

SEQ ID NO: 59234 - DNA, 1983 bp, Homo sapiens
tgtcatcgtgggcttgaggacctggagagagtagatcctgaagaactttttcagtctgctgaagagcttggaagactggagacagaaggcagagtctcaggctctgaaggtataaggagtgtgagttcctgtgagaaacactcatttgattgtgaaaagacttgaattctatgctaagcagggttccaagtagctaaatgaatgatctcagcaagtctctcttgctgctgctgctactcgtttacatttattgattacttacgatgattcaggtactgttgtaagtgctttacatgctgttatacgagactcttgggagaaatcactttaatgaagcttgagacacatggcattgccatgcaatgatttttcccccctcttcacgggatcagagggaactaatagaatgtgacaatgattctttagcagggactgctgaggcttctggttcctttttaagatctgcagtgaaagaagatgagaaacatggatatgcccttcttttggtccccctcttcctttatttgatctctacttccttctataaatatattagggctacattgtccctttgtatttcaaacaaggcaaaaagaggttgtaattacactttactgcaatcctcagtttctccagggaacaggaatgcaaaggctttgaaggcctctctatttgctgacatggtcagctgggtgccatgggccaagtccttctgttgccctcctctgtcaccaagtaagctaggtcctttctgaggctcaggtttgctgtgatgatgatcacttttaggcagaaggttagaggcctcatgagtgctatatggactttattaggctttagatttgatggggaataagggatgtgatttgtcttttgggaactcatctttgattcatcattgtctcttggtatcttggaatttccatgtcattacagtctacagaatgaaagagtaacctgtcccagaggagaggcaggtgaaagactccacagcatgctcattctcattctgtcttctcagtgacaccgaggtttactgagtgcccactatgtgccaagcactgtgctcagggctttctttgtatgcatgatctcagtgaatctcaccaagcctcatctggaaaacggggacaaattaacaacaggatggcaaattgaaaaacacgtaaccatgttctacagatggaaaggggtgcttggttattatgaaggccccctcgcaagcgtgtgggacatgggtgtgttctctgggttgtactgatcagatcaaggacctcccccacccttctcacactctgcccacttccgccctttgcttatcagacccttagccagtgactcattccagaaccagaaccttggtgaaatctcaaccgacaccagagatcggtgtcttcagtcctagactgatggagaaaatccagaatatatactagaagctccaaatgctctgggtttcagctcctctgtgctgtggacactgactttggctcagaactccgatttagtacaaaaggctcatttttatttcaggggcactcttcctaaagcaaacctaataaatgaaatatggaattcacagatacacacacacattaaaaaattaacctagtgtatctgtgaggagtaggcagaaattcactgtataaaagaatgcttcatttcatagagaatttgtgttaagattccattagatagtacatttctcaaagatttttgaggttgtatttgctttaccaaaacttggtttatgtaagtggaaaaagcatgttgcaaaataacttggtgtctatgattcagtttatgtaaaataataaatgtatgtaggaatacgtgtgttgaaagatgtacatcaatttgctaacaatggttatctctgacgtggtgggatttgagatgtgtttttctttttggttgtatttttctctattgtttgacttaacacagaacatgtttggttacaacaataaagttattgaagac

SEQ ID NO: 59235 - DNA, 2298 bp, Homo sapiens
tgtcatcgtgggcttgaggacctggagagagtagatcctgaagaactttttcagtctgctgaagagcttggaagactggagacagaaggcagagtctcaggctctgaaggtataaggagtgtgagttcctgtgagaaacactcatttgattgtgaaaagacttgaattctatgctaagcagggttccaagtagctaaatgaatgatctcagcaagtctctcttgctgctgctgctactcgtttacatttattgattacttacgatgattcaggtactgttgtaagtgctttacatgctgttatacgagactcttgggagaaatcactttaatgaagcttgagacacatggcattgccatgcaatgatttttcccccctcttcacgggatcagagggaactaatagaatgtgacaatgattctttagcagggactgctgaggcttctggttcctttttaagatctgcagtgaaagaagatgagaaacatggatatgcccttcttttggtccccctcttcctttatttgatctctacttccttctataaatatattagggctacattgtccctttgtatttcaaacaaggcaaaaagaggttgtaattacactttactgcaatcctcagtttctccagggaacaggaatgcaaaggctttgaaggcctctctatttgctgacatggtcagctgggtgccatgggccaagtccttctgttgccctcctctgtcaccaagtaagctaggtcctttctgaggctcaggtttgctgtgatgatgatcacttttaggcagaaggttagaggcctcatgagtgctatatggactttattaggctttagatttgatggggaataagggatgtgatttgtcttttgggaactcatctttgattcatcattgtctcttggtatcttggaatttccatgtcattacagtctacagaatgaaagagtaacctgtcccagaggagaggcaggtgaaagactccacagcatgctcattctcattctgtcttctcagtgacaccgaggtttactgagtgcccactatgtgccaagcactgtgctcagggctttctttgtatgcatgatctcagtgaatctcaccaagcctcatctggaaaacggggacaaattaacaacaggatggcaaattgaaaaacacgtaaccatgttctacagatggaaaggggtgcttggttattatgaaggccccctcgcaagcgtgtgggacatgggtgtgttctctgggttgtactgatcagatcaaggacctcccccacccttctcacactctgcccacttccgccctttgcttatcagacccttagccagtgactcattccagaaccagaaccttggtgaaatctcaaccgacaccagagatcggtgtcttcagtcctagactgatggagaaaatccagaatatatactagaagctccaaatgctctgggtttcagctcctctgtgctgtggacactgactttggctcagaactccgatttagtacaaaaggctcatttttatttcaggggcactcttcctaaagcaaacctaataaatgaaatatggaattcacagatacacacacacattaaaaaattaacctagtgtatctgtgaggagtaggcagaaattcactgtataaaagaatgcttcatttcatagagaatttgtgttaagattccattagatagtacatttctcaaagatttttgaggttgtatttgctttaccaaaacttggtttatgtaagtggaaaaagcatgttgcaaaataacttggtgtctatgattcagtttatgtaaaataataaatgtatgtaggaatacgtgtgttgaaagatgtacatcaatttgctaacaatggttatctctgacgtggtgggatttgagatgtgtttttctttttggttgtatttttctctattgtttgacttaacacagaacatgtttggttacaacaataaagttattgaagacaatataacacccaattgtgatgagtccagacagtactcatgctgtgcatttattagacagtatgccatagaggtgggtcatggaggagtggagagagagccctgatttgttgtcccatgaagaagataggcacagggtaatatgtagtgtgattctttttttttttgcacgaggagaagtgtgtgtgtatccgtgtaagtgtatggatatccagtgggtagtgggtgttaagattgcaagtgatttttttcccctctcccttaatcatgcttttctgcctaaataaaaaaagaactctctccaaaaatccatcca

SEQ ID NO: 59236 - DNA, 303 bp, Homo sapiens
attattccaggttatcaatactctggctgaccatcatcattgtgggactggctttcgtggaagtccttggttacatttcattattgcgtttccgagaagttataaagttttcattatcctctggacagtttacctttggatgtctctcctgaagactatcttgtggtctcgaaatggacatgatggatccacggatgtacagcagagagcctggaggtccaaccgctgtagacagaaaggaaataaaattggcctgaaagacgtcattactctatggagacatgtggaaacaaaagttagagc

SEQ ID NO: 59237 - DNA, 2503 bp, Homo sapiens
gacctttatttgttacttttgagctacagtgacaagaaagatcacctaactgtggaagaactggctcagtttttgaaggtggagcaaaagatgaataatgtgacaacggactattgtcttgacatcataaagaagtttgaagtttcagaagaaaataaggtgaaaaatgttcttggcatagaaggcttcacgaacttcatgcgtagtcctgcctgtgacatatttaacccattgcaccatgaagtgtaccaagacatggatcagcccctctgcaactactacattgcttcctctcacaatacatacctgactggagaccagctcctttctcagtccaaagtggatatgtatgcacgggtgctgcaagagggctgtcgctgtgtggaagttgactgttgggatggcccagatggagagccagtagtacatcatggttacactctcacttcaaaaattctcttcagagatgttgtggagaccatcaacaagcatgcctttgtgaagaatgagtttcctgttatattgtctatcgagaatcactgcagtatccagcagcaaaggaagattgctcagtacctgaaaggaatattcggagacaaactggacctgtcatctgttgatacaggggagtgcaagcagcttccaagccctcaaagtttgaaaggcaaaattctagtgaagggtaagaagttgccttatcaccttggggatgatgcagaggaaggggaagtttccgatgaggacagtgcagatgaaattgaagacgagtgcaaattcaagctccattatagtaatgggaccactgagcatcaggtggaatctttcataaggaaaaaactggagtcactgttaaaagaatctcaaattcgagataaagaagatcctgatagtttcacagtgcgggcactactgaaggccacgcatgaaggcttaaatgcacacctgaagcagagtccagatgtaaaggaaagtggaaagaaatcacatggacgatccctcatgaccaactttggaaaacataagaaaactacaaaatcacggtctaaatcttacagtactgatgatgaggaagacacacagcagagtactggcaaggagggtggccagctgtacagattgggtcgccgaaggaaaaccatgaagctctgccgagaactctctgatttggttgtgtacacaaactccgtggccgctcaggacattgtggatgacggaaccacaggaaatgtgttatcattcagtgaaacaagagcacatcaggttgttcagcaaaaatcagagcagttcatgatttataatcaaaagcaactcacgaggatttacccctctgcctaccgcattgattccagtaacttcaaccctctcccctactggaacgcaggctgccagctagtggcactgaattatcaatctgaaggacgaatgatgcagttaaaccgagccaaattcaaggcaaatggcaattgtggctatgtcctcaaaccccagcaaatgtgcaaaggtactttcaaccctttctctggtgaccctcttcctgccaaccccaaaaagcagctcatcctgaaagttatcagtggacagcaactccccaaacctccagactccatgtttggagatcgaggcgagatcattgacccttttgttgaagttgaaattattggattgccagtagattgttgtaaagatcaaacccgtgtggtagatgacaatggatttaaccctgtgtgggaagaaacactgacatttacagtacacatgccagaaatagctttggttcggttccttgtgtgggatcacgatcccattggacgagactttgttggacaaagaactgtgaccttcagcagcttagtgcctggctaccggcatgtctatttggaaggactgacagaagcatccatatttgtacacataaccatcaatgaaatctatggaaagaacagacaactccagggtctgaagggactgttcaataagaatcctaggcacagttcttcagaaaacaattcccattatgtacggaagcgatccattggagatagaattctgcgacgcacagctagcgccccagccaaaggcaggaaaaagagcaaaatgggcttccaagaaatggtggagataaaggattctgtgtccgaggccacaagagatcaagatggcgtgctgaggaggaccacacgcagtttgcaagcacgccctgtctctatgcctgttgacagaaaccttctgggagctttgtcgctgcctgtatctgaaacagcaaaagacattgaaggaaaagaaaactctctagactctagcttttgcaggccgactgagcaggctaaagcagaaatgtgcaaagtgcctttccccagacagttagaatgtgtaatgaagatggaaatttccgagacctgaatccccaaacccagactgatctctcttctcttcttgaatataaaagtaagctggcaagatttaaaaaactgaacccaaataaatattcatcatttttttcttc

SEQ ID NO: 59238 - DNA, 2792 bp, Homo sapiens
gacctttatttgttacttttgagctacagtgacaagaaagatcacctaactgtggaagaactggctcagtttttgaaggtggagcaaaagatgaataatgtgacaacggactattgtcttgacatcataaagaagtttgaagtttcagaagaaaataaggtgaaaaatgttcttggcatagaaggcttcacgaacttcatgcgtagtcctgcctgtgacatatttaacccattgcaccatgaagtgtaccaagacatggatcagcccctctgcaactactacattgcttcctctcacaatacatacctgactggagaccagctcctttctcagtccaaagtggatatgtatgcacgggtgctgcaagagggctgtcgctgtgtggaagttgactgttgggatggcccagatggagagccagtagtacatcatggttacactctcacttcaaaaattctcttcagagatgttgtggagaccatcaacaagcatgcctttgtgaagaatgagtttcctgttatattgtctatcgagaatcactgcagtatccagcagcaaaggaagattgctcagtacctgaaaggaatattcggagacaaactggacctgtcatctgttgatacaggggagtgcaagcagcttccaagccctcaaagtttgaaaggcaaaattctagtgaagggtaagaagttgccttatcaccttggggatgatgcagaggaaggggaagtttccgatgaggacagtgcagatgaaattgaagacgagtgcaaattcaagctccattatagtaatgggaccactgagcatcaggtggaatctttcataaggaaaaaactggagtcactgttaaaagaatctcaaattcgagataaagaagatcctgatagtttcacagtgcgggcactactgaaggccacgcatgaaggcttaaatgcacacctgaagcagagtccagatgtaaaggaaagtggaaagaaatcacatggacgatccctcatgaccaactttggaaaacataagaaaactacaaaatcacggtctaaatcttacagtactgatgatgaggaagacacacagcagagtactggcaaggagggtggccagctgtacagattgggtcgccgaaggaaaaccatgaagctctgccgagaactctctgatttggttgtgtacacaaactccgtggccgctcaggacattgtggatgacggaaccacaggaaatgtgttatcattcagtgaaacaagagcacatcaggttgttcagcaaaaatcagagcagttcatgatttataatcaaaagcaactcacgaggatttacccctctgcctaccgcattgattccagtaacttcaaccctctcccctactggaacgcaggctgccagctagtggcactgaattatcaatctgaaggacgaatgatgcagttaaaccgagccaaattcaaggcaaatggcaattgtggctatgtcctcaaaccccagcaaatgtgcaaaggtactttcaaccctttctctggtgaccctcttcctgccaaccccaaaaagcagctcatcctgaaagttatcagtggacagcaactccccaaacctccagactccatgtttggagatcgaggcgagatcattgacccttttgttgaagttgaaattattggattgccagtagattgttgtaaagatcaaacccgtgtggtagatgacaatggatttaaccctgtgtgggaagaaacactgacatttacagtacacatgccagaaatagctttggttcggttccttgtgtgggatcacgatcccattggacgagactttgttggacaaagaactgtgaccttcagcagcttagtgcctggctaccggcatgtctatttggaaggactgacagaagcatccatatttgtacacataaccatcaatgaaatctatggaaagtggagccctttaatactcaaccccagttatactatattgcactttctaggagctacaaagaacagacaactccagggtctgaagggactgttcaataagaatcctaggcacagttcttcagaaaacaattcccattatgtacggaagcgatccattggagatagaattctgcgacgcacagctagcgccccagccaaaggcaggaaaaagagcaaaatgggcttccaagaaatggtggagataaaggattctgtgtccgaggccacaagagatcaagatggcgtgctgaggaggaccacacgcagtttgcaagcacgccctgtctctatgcctgttgacagaaaccttctgggagctttgtcgctgcctgtatctgaaacagcaaaagacattgaaggaaaagaaaactctctagagaagataaagatggcagaagaaaagggaaagcaagtataaaagatccacattttctaaatttcaacaaaaagttatcatcctcctccagtgctctgctccacaaagataccagccaaggggacaccattgtatctactgcccacatgtcagtcacaggagaacagctgggcatgtcaagtcctaggggtgggagaaccacatcaaatgccacaagcaattgccaggaaaacccctgtcccagcaagtctctctccccaaagcagcatttggctcccgatcctgtagttaaccccacacaagatctgcatggtgtgaaaatcaaggaaaagggtaatcctgaggactttgtggaagggaaaagcatcttgtcaggaagcgtcctttctcatagcaacctagaaattaagagaaggaactggggaacctctagagtcacc

SEQ ID NO: 59239 - DNA, 197 bp, Homo sapiens
tctgtcacagtgtaacagatttacattctccatttgtctgtccgaagacaacatgagtgtttgcaggtcctacataaagtgatagatgtcacctaaaatattgtttgtctccttcagcagaagataaagatggcagaagaaaagggaaagcaagtataaaagatccacattttctaaatttcaacaaaaagttatca

SEQ ID NO: 59240 - DNA, 5558 bp, Homo sapiens
gacctttatttgttacttttgagctacagtgacaagaaagatcacctaactgtggaagaactggctcagtttttgaaggtggagcaaaagatgaataatgtgacaacggactattgtcttgacatcataaagaagtttgaagtttcagaagaaaataaggtgaaaaatgttcttggcatagaaggcttcacgaacttcatgcgtagtcctgcctgtgacatatttaacccattgcaccatgaagtgtaccaagacatggatcagcccctctgcaactactacattgcttcctctcacaatacatacctgactggagaccagctcctttctcagtccaaagtggatatgtatgcacgggtgctgcaagagggctgtcgctgtgtggaagttgactgttgggatggcccagatggagagccagtagtacatcatggttacactctcacttcaaaaattctcttcagagatgttgtggagaccatcaacaagcatgcctttgtgaagaatgagtttcctgttatattgtctatcgagaatcactgcagtatccagcagcaaaggaagattgctcagtacctgaaaggaatattcggagacaaactggacctgtcatctgttgatacaggggagtgcaagcagcttccaagccctcaaagtttgaaaggcaaaattctagtgaagggtaagaagttgccttatcaccttggggatgatgcagaggaaggggaagtttccgatgaggacagtgcagatgaaattgaagacgagtgcaaattcaagctccattatagtaatgggaccactgagcatcaggtggaatctttcataaggaaaaaactggagtcactgttaaaagaatctcaaattcgagataaagaagatcctgatagtttcacagtgcgggcactactgaaggccacgcatgaaggcttaaatgcacacctgaagcagagtccagatgtaaaggaaagtggaaagaaatcacatggacgatccctcatgaccaactttggaaaacataagaaaactacaaaatcacggtctaaatcttacagtactgatgatgaggaagacacacagcagagtactggcaaggagggtggccagctgtacagattgggtcgccgaaggaaaaccatgaagctctgccgagaactctctgatttggttgtgtacacaaactccgtggccgctcaggacattgtggatgacggaaccacaggaaatgtgttatcattcagtgaaacaagagcacatcaggttgttcagcaaaaatcagagcagttcatgatttataatcaaaagcaactcacgaggatttacccctctgcctaccgcattgattccagtaacttcaaccctctcccctactggaacgcaggctgccagctagtggcactgaattatcaatctgaaggacgaatgatgcagttaaaccgagccaaattcaaggcaaatggcaattgtggctatgtcctcaaaccccagcaaatgtgcaaaggtactttcaaccctttctctggtgaccctcttcctgccaaccccaaaaagcagctcatcctgaaagttatcagtggacagcaactccccaaacctccagactccatgtttggagatcgaggcgagatcattgacccttttgttgaagttgaaattattggattgccagtagattgttgtaaagatcaaacccgtgtggtagatgacaatggatttaaccctgtgtgggaagaaacactgacatttacagtacacatgccagaaatagctttggttcggttccttgtgtgggatcacgatcccattggacgagactttgttggacaaagaactgtgaccttcagcagcttagtgcctggctaccggcatgtctatttggaaggactgacagaagcatccatatttgtacacataaccatcaatgaaatctatggaaagtggagccctttaatactcaaccccagttatactatattgcactttctaggagctacaaagaacagacaactccagggtctgaagggactgttcaataagaatcctaggcacagttcttcagaaaacaattcccattatgtacggaagcgatccattggagatagaattctgcgacgcacagctagcgccccagccaaaggcaggaaaaagagcaaaatgggcttccaagaaatggtggagataaaggattctgtgtccgaggccacaagagatcaagatggcgtgctgaggaggaccacacgcagtttgcaagcacgccctgtctctatgcctgttgacagaaaccttctgggagctttgtcgctgcctgtatctgaaacagcaaaagacattgaaggaaaagaaaactctctagtacaaatctgaataggaaacaacttaagagaagataaagatggcagaagaaaagggaaagcaagtataaaagatccacattttctaaatttcaacaaaaagttatcatcctcctccagtgctctgctccacaaagataccagccaaggggacaccattgtatctactgcccacatgtcagtcacaggagaacagctgggcatgtcaagtcctaggggtgggagaaccacatcaaatgccacaagcaattgccaggaaaacccctgtcccagcaagtctctctccccaaagcagcatttggctcccgatcctgtagttaaccccacacaagatctgcatggtgtgaaaatcaaggaaaagggtaatcctgaggactttgtggaagggaaaagcatcttgtcaggaagcgtcctttctcatagcaacctagaaattaagaacctggaaggtaataggggtaagggccgagctgcaacatccttttctttgtcagacgtctccatgctctgttctgacatacctgacctacattcaactgcaattctgcaggagagtgtaatttcccatcttattgacaatgtcactttaacaaatgagaatgagccgggcagttccatctcagccctgattggccagtttgatgagaccaacaatcaggctctcacagttgtttctcatcttcataataccagtgtgatgtcaggccattgtcccttgcctagcctgggcctaaaaatgcccatcaagcatggtttttgcaagggaaaatccaagtcttccttcctgtgctcatctccggagctgatagcactctcgagttctgagaccaccaaacatgcaacgaacacagtttatgaaactacctgcactcccatctctaaaaccaaaccagatgatgacctttctagtaaggccaagacagcggccttagaaagcaacctgcctggatcccctaatacttctcgtggctggttaccaaaaagtcctaccaagggagaagactgggaaacactgaagagctgcagccctgcctcttcccctgatttgaccctggaggatgtaatagctgatcccactctctgtttcaattctggggagagcagccttgtggaaattgatggagaatcagaaaatctttctctaacaacctgtgaatataggagagagggcacaagtcaacttgcttctcctttaaaactcaagtacaatcagggtgtggtagaacactttcaaagaggtttgagaaacggctactgtaaagagaccctccgcccttctgtccctgaaatattcaacaatattcaagatgtcaaaactcaaagtatttcttatctagcctatcagggtgctggctttgtgcataatcatttctcagattcagatgcaaaaatgttccagacctgtgtgccccagcaatctagtgctcaagatatgcatgtccctgtacccaagcagttggcacatcttcctttgcctgctctgaaactgcctagtccttgcaaatccaaaagtctgggggacttaacatcagaggacattgcctgcaattttgagagcaagtaccagtgtattagtaagagttttgttacaactggcattagagacaagaagggcgtgactgtgaagacaaagtcgttagagcctatagatgccctgaccgagcagcttcggaagcttgtgtcctttgaccaggaagacaactgccaagtgctatattcaaagcaggatgccaatcagctcccccgggcactggtcaggaagttgtcatccagaagtcagagcagagtgcgcaatattgctagtcgtgccaaggagaaacaggaagccaacaagcagaaagttccaaaccccagcaatggggcaggagtggttcttagaaacaaaccctcagcacccacccctgcagtgaatcgccactccaccggctcctacatcgcaggctacctgaagaacacgaaagggggtggccttgaaggccggggcatcccagagggggcatgcacggctcttcactatggccacgttgaccagttttgttcagataattctgttttgcagactgagccaagcagtgatgataaaccagaaatttattttcttttgagactgtgaattatttaaaactgcattcttaaggttttcaaggtattctgtagaatgtcagagttttcagtaaataagttccttggctttggaatgattttcaaatgtatttttaaacttgtatttgggtctccctttgacttcatgtgttctccctgttaatgcgtttgtatatagatttggtgacatttcccatgtacctattatgatctttctcccttgagttgttgtaaactgtatcagtatgaaatatgtgcatgccctagatgtgaaactcctcagcagctcgggttataatgtgtgtgtgtttcaccaagatgtcctttactgtgtcctcagattgcagtcacaaatgtagtcatttttactctctaactgttgagttgattaagagactttgcaaacgacaaagggatgaattccttactttaatctgttatcatttttcctatgtttccctctttgttcagaagcccagatgcatttttataactcagttttaaaaactttaaaatagttaccttgccttttaggatgttcttatcccacccataatgagagttgaaaggggatggatagctgctccccatgcccttcccactttttggaataggccgtgagggtgtgaggaagaaggctgtcttttgtacataaggacaaaattgtttgttttacataaattttgttacatatttttgctaatggctttgtatgtaacaagaagcgagttgccaaactacctgttgtacttttgaattttctgattgaattacagactgcgaacaacggctttcagaatgagggacttccatcagactctaatgataatagtagcacaaattgaaaacttccccaaagctttcacagaatattttctcataataaaatccaagtgaacagataattagaagaaacccttttccttcagggaaccaagcaactctattttagtactgacatgcattattttcactgtgaattcacttttttattgcatgttcagatgtccctctttgttttttttttttgtaacattaactgcaatgatgttcttcctggaattcatgaaaatataattaaaacacatttttaaacaaaaaaaa

SEQ ID NO: 59241 - DNA, 5530 bp, Homo sapiens
gacctttatttgttacttttgagctacagtgacaagaaagatcacctaactgtggaagaactggctcagtttttgaaggtggagcaaaagatgaataatgtgacaacggactattgtcttgacatcataaagaagtttgaagtttcagaagaaaataaggtgaaaaatgttcttggcatagaaggcttcacgaacttcatgcgtagtcctgcctgtgacatatttaacccattgcaccatgaagtgtaccaagacatggatcagcccctctgcaactactacattgcttcctctcacaatacatacctgactggagaccagctcctttctcagtccaaagtggatatgtatgcacgggtgctgcaagagggctgtcgctgtgtggaagttgactgttgggatggcccagatggagagccagtagtacatcatggttacactctcacttcaaaaattctcttcagagatgttgtggagaccatcaacaagcatgcctttgtgaagaatgagtttcctgttatattgtctatcgagaatcactgcagtatccagcagcaaaggaagattgctcagtacctgaaaggaatattcggagacaaactggacctgtcatctgttgatacaggggagtgcaagcagcttccaagccctcaaagtttgaaaggcaaaattctagtgaagggtaagaagttgccttatcaccttggggatgatgcagaggaaggggaagtttccgatgaggacagtgcagatgaaattgaagacgagtgcaaattcaagctccattatagtaatgggaccactgagcatcaggtggaatctttcataaggaaaaaactggagtcactgttaaaagaatctcaaattcgagataaagaagatcctgatagtttcacagtgcgggcactactgaaggccacgcatgaaggcttaaatgcacacctgaagcagagtccagatgtaaaggaaagtggaaagaaatcacatggacgatccctcatgaccaactttggaaaacataagaaaactacaaaatcacggtctaaatcttacagtactgatgatgaggaagacacacagcagagtactggcaaggagggtggccagctgtacagattgggtcgccgaaggaaaaccatgaagctctgccgagaactctctgatttggttgtgtacacaaactccgtggccgctcaggacattgtggatgacggaaccacaggaaatgtgttatcattcagtgaaacaagagcacatcaggttgttcagcaaaaatcagagcagttcatgatttataatcaaaagcaactcacgaggatttacccctctgcctaccgcattgattccagtaacttcaaccctctcccctactggaacgcaggctgccagctagtggcactgaattatcaatctgaaggacgaatgatgcagttaaaccgagccaaattcaaggcaaatggcaattgtggctatgtcctcaaaccccagcaaatgtgcaaaggtactttcaaccctttctctggtgaccctcttcctgccaaccccaaaaagcagctcatcctgaaagttatcagtggacagcaactccccaaacctccagactccatgtttggagatcgaggcgagatcattgacccttttgttgaagttgaaattattggattgccagtagattgttgtaaagatcaaacccgtgtggtagatgacaatggatttaaccctgtgtgggaagaaacactgacatttacagtacacatgccagaaatagctttggttcggttccttgtgtgggatcacgatcccattggacgagactttgttggacaaagaactgtgaccttcagcagcttagtgcctggctaccggcatgtctatttggaaggactgacagaagcatccatatttgtacacataaccatcaatgaaatctatggaaagtggagccctttaatactcaaccccagttatactatattgcactttctaggagctacaaagaacagacaactccagggtctgaagggactgttcaataagaatcctaggcacagttcttcagaaaacaattcccattatgtacggaagcgatccattggagatagaattctgcgacgcacagctagcgccccagccaaaggcaggaaaaagagcaaaatgggcttccaagaaatggtggagataaaggattctgtgtccgaggccacaagagatcaagatggcgtgctgaggaggaccacacgcagtttgcaagcacgccctgtctctatgcctgttgacagaaaccttctgggagctttgtcgctgcctgtatctgaaacagcaaaagacattgaaggaaaagaaaactctctagagaagataaagatggcagaagaaaagggaaagcaagtataaaagatccacattttctaaatttcaacaaaaagttatcatcctcctccagtgctctgctccacaaagataccagccaaggggacaccattgtatctactgcccacatgtcagtcacaggagaacagctgggcatgtcaagtcctaggggtgggagaaccacatcaaatgccacaagcaattgccaggaaaacccctgtcccagcaagtctctctccccaaagcagcatttggctcccgatcctgtagttaaccccacacaagatctgcatggtgtgaaaatcaaggaaaagggtaatcctgaggactttgtggaagggaaaagcatcttgtcaggaagcgtcctttctcatagcaacctagaaattaagaacctggaaggtaataggggtaagggccgagctgcaacatccttttctttgtcagacgtctccatgctctgttctgacatacctgacctacattcaactgcaattctgcaggagagtgtaatttcccatcttattgacaatgtcactttaacaaatgagaatgagccgggcagttccatctcagccctgattggccagtttgatgagaccaacaatcaggctctcacagttgtttctcatcttcataataccagtgtgatgtcaggccattgtcccttgcctagcctgggcctaaaaatgcccatcaagcatggtttttgcaagggaaaatccaagtcttccttcctgtgctcatctccggagctgatagcactctcgagttctgagaccaccaaacatgcaacgaacacagtttatgaaactacctgcactcccatctctaaaaccaaaccagatgatgacctttctagtaaggccaagacagcggccttagaaagcaacctgcctggatcccctaatacttctcgtggctggttaccaaaaagtcctaccaagggagaagactgggaaacactgaagagctgcagccctgcctcttcccctgatttgaccctggaggatgtaatagctgatcccactctctgtttcaattctggggagagcagccttgtggaaattgatggagaatcagaaaatctttctctaacaacctgtgaatataggagagagggcacaagtcaacttgcttctcctttaaaactcaagtacaatcagggtgtggtagaacactttcaaagaggtttgagaaacggctactgtaaagagaccctccgcccttctgtccctgaaatattcaacaatattcaagatgtcaaaactcaaagtatttcttatctagcctatcagggtgctggctttgtgcataatcatttctcagattcagatgcaaaaatgttccagacctgtgtgccccagcaatctagtgctcaagatatgcatgtccctgtacccaagcagttggcacatcttcctttgcctgctctgaaactgcctagtccttgcaaatccaaaagtctgggggacttaacatcagaggacattgcctgcaattttgagagcaagtaccagtgtattagtaagagttttgttacaactggcattagagacaagaagggcgtgactgtgaagacaaagtcgttagagcctatagatgccctgaccgagcagcttcggaagcttgtgtcctttgaccaggaagacaactgccaagtgctatattcaaagcaggatgccaatcagctcccccgggcactggtcaggaagttgtcatccagaagtcagagcagagtgcgcaatattgctagtcgtgccaaggagaaacaggaagccaacaagcagaaagttccaaaccccagcaatggggcaggagtggttcttagaaacaaaccctcagcacccacccctgcagtgaatcgccactccaccggctcctacatcgcaggctacctgaagaacacgaaagggggtggccttgaaggccggggcatcccagagggggcatgcacggctcttcactatggccacgttgaccagttttgttcagataattctgttttgcagactgagccaagcagtgatgataaaccagaaatttattttcttttgagactgtgaattatttaaaactgcattcttaaggttttcaaggtattctgtagaatgtcagagttttcagtaaataagttccttggctttggaatgattttcaaatgtatttttaaacttgtatttgggtctccctttgacttcatgtgttctccctgttaatgcgtttgtatatagatttggtgacatttcccatgtacctattatgatctttctcccttgagttgttgtaaactgtatcagtatgaaatatgtgcatgccctagatgtgaaactcctcagcagctcgggttataatgtgtgtgtgtttcaccaagatgtcctttactgtgtcctcagattgcagtcacaaatgtagtcatttttactctctaactgttgagttgattaagagactttgcaaacgacaaagggatgaattccttactttaatctgttatcatttttcctatgtttccctctttgttcagaagcccagatgcatttttataactcagttttaaaaactttaaaatagttaccttgccttttaggatgttcttatcccacccataatgagagttgaaaggggatggatagctgctccccatgcccttcccactttttggaataggccgtgagggtgtgaggaagaaggctgtcttttgtacataaggacaaaattgtttgttttacataaattttgttacatatttttgctaatggctttgtatgtaacaagaagcgagttgccaaactacctgttgtacttttgaattttctgattgaattacagactgcgaacaacggctttcagaatgagggacttccatcagactctaatgataatagtagcacaaattgaaaacttccccaaagctttcacagaatattttctcataataaaatccaagtgaacagataattagaagaaacccttttccttcagggaaccaagcaactctattttagtactgacatgcattattttcactgtgaattcacttttttattgcatgttcagatgtccctctttgttttttttttttgtaacattaactgcaatgatgttcttcctggaattcatgaaaatataattaaaacacatttttaaacaaaaaaaa

SEQ ID NO: 59242 - DNA, 257 bp, Homo sapiens
caaaatttttctcagcccattgtagaatgaaaagttaactcatcgagcttagtattgtgcctacaaggtcttcgatccggatgtctccatgagtgttaatccatttctggggtgggtactgctgagccaatatacattcctggcttcctggactcgtccactggaacgtgttgggtcctggtgctctccccagcagatggttgtaggtggtcagagatgagccacagaaaagccaacgtgcagcctggtgctggggg

SEQ ID NO: 59243 - DNA, 303 bp, Homo sapiens
ctaggcttcaaataaataaaattttcacacttgaaaattatgaacacttaaagcacacatattgactgtgatactgtgagccacatttccacttcaaggacttgcatcagtatttaaatgcaagagattggagtgctttctctgatacaggttgagttcatcatgggtgatttggggaaggtatagagaatccgattgtattaagcaagcttctatcccgcctgtcttatcaagttaactacatggtaaggtttcactggatttatccactgtgatgtgtctttcagaccataaaacacaata

SEQ ID NO: 59244 - DNA, 226 bp, Homo sapiens
  misc_feature (6)..(6): n is a, c, g, or t
  misc_feature (11)..(12): n is a, c, g, or t
  misc_feature (121)..(121): n is a, c, g, or t
gatcanggtgnngaattctttttctagaagtttttaggcagagggaacagcatgagcaatagcccagagggcacgtatggagtagagctggcagttcagtttggcaggagagtgggttgtncccagaggagttatgcaaagggaagctggacaggcggtctgtgctctggcaaagaaatttcaataccgtgcacaattctggtggtggaggaaccactgatagatc

SEQ ID NO: 59245 - DNA, 398 bp, Homo sapiens
gagtcttgctctgccgcccaggctggagtacagtggtgtgaacttggctcacagcaacctccacctcccagattcaagtgattctcctgtctcagcctcctgagtagctgggattacaggctcccgccaccctgcctagttaatttttgtatttttagtagagacagggtttctccatgtttgccaggctggtctcgaactcctgacctcaggtgatccgcctgctttggactttcaaagtgctgggattacaggcatgagccaccgggcctggctttccctagagtattttaaaacaacctagacatctgcatgcatctctgactgagaaggactgctttccctttaacataaccacttgccattattatatctaacatttacaatcattctttatg

SEQ ID NO: 59246 - DNA, 453 bp, Homo sapiens
  misc_feature (8)..(8): n is a, c, g, or t
  misc_feature (14)..(14): n is a, c, g, or t
  misc_feature (18)..(18): n is a, c, g, or t
  misc_feature (159)..(159): n is a, c, g, or t
  misc_feature (450)..(451): n is a, c, g, or t
cttcgtcnaatgcnacgnagagcatatcagtttttaaaaaggaactgaattagatatgaatgaagaaataaagtaggctggtgttttgggggaaaaaatggacatctgttattagattacaaaagaagtttatggaattagaatcaacactaaatgaancaaaagaagaatttacgtcaggtggacctcttggtcagaaacaagacccaaaagaatgggtattttctgccagaaaaatacacattgagtggtcacaggagtccaatcattcgagtcattttccatcctgtgttcagtgttatggtctctgcttcagaggatgctacaattaaggtgtgggattatgagactggagattttgaaagaactcttaaaggaaggacacacagactctgtacaggacatttcatttgaccacagtggcaagtttctggcttcctgttctgcagnnat

SEQ ID NO: 59247 - DNA, 206 bp, Homo sapiens
ttatcttacaattctacttcccagcatcctgaaattttcaaatactgtcttagtatattaaactcttttgaaatagataacaaaagcaccatgggagtccgttgaaaacttaggtttgttccttgctaaaatttctaagtccttcattatgactataaagaaaaaaggttcatcaattcaaaaaaaaatcctgattcttcaaaata

SEQ ID NO: 59248 - DNA, 311 bp, Homo sapiens
ttaaaaatactctggaaagagcacttccatcgttcatttacatcatattagaaatggatttccgagtcagcactggcttcctccagaatagcagtcctggaggagcgagatctccccaagcctccaggattgcagtctgttttgtgccttcactccctaataggtttgccttatttaaaggacccaccttcagagctgccaaggactttctcagagcagctccttggtccctccgacagcctgggatggcatttattctggggcctgggtgtggggaggtcctcaccagcctaggagtaagaggaggtggt

SEQ ID NO: 59249 - DNA, 395 bp, Homo sapiens
ttgtctcttttatagaaaatcaataggttttgaggcttttaggtcttggtcttttggatcttcataactgagtctcctgttgttcgttttgcttgtctattttgtaattgctttgtggactgaagcttgttttgaactttatgggagacttgatagtgtgatctgcctcaggaccaacagtttatgtaaaaggtgagctgacagcaactttatgtttttcattggaaagtttagtccatttatagtaaacgttattattgataggtaagaacttactcctcccattttggttatttgttttctggtacttgtggtcttctcttcctccttccttcctgtcttcctttgtgtaaagagatttctctggtagtatgtctaattcaagctttactttc

SEQ ID NO: 59250 - DNA, 239 bp, Homo sapiens
ccagcaggaaggggaggggggaataaagggaatgggtgttttggaagccacattcaaaaacaaaaactgtcccaaatagcagaaagcagtcaaaagtatcaaatgcagccgaaaggtcacgaaaggtgattttggcgacagaagatgctggagataaagactgtggtggaggaagggcctgagggccacagtgtaagtgacatgctgaagactctagagtctggctagtgtgctttccc

SEQ ID NO: 59251 - DNA, 1434 bp, Homo sapiens
ccgccccaggaagagggagggaggaagcggcttgccggagagccagggcgcagtgggcggcagggctgagcggccggtgatggggaccccacatcccaggcagtgccggcacccctggcgcctgacatgagcccttgcgggcccctcaacctgagcctggcgggcgaggcgaccacatgcgcggcgccctgggtccccaacacgtcggccgtgccgccgtcgggcgcttcgcccgcgctgcccatcttctccatgacgctgggcgccgtgtccaacctgctggcgctggcgctgctggcgcaggccgcgggccgcctgcgacgccgccgctcggccgccaccttcctgctgttcgtggccagcctgctggccaccgacctggcgggccacgtgatcccgggcgcgctggtgctgcgtctgtacactgcggggcgcgctccggccggcggggcctgccacttcctgggcggctgcatggtcttcttcggcctgtgcccgctgctgctgggctgtggcatggccgtggagcgctgcgtgggcgtcacgcggccgctgctccacgccgcgcgggtctcggtcgcccgcgcgcgcctggcgctggccgcggtggccgcggtggccttggccgtggcgctgctgccgctggcgcgcgtgggccgctatgagctgcagtacccgggcacgtggtgcttcatcggcctgggtcccccgggcggctggcgccaggcactgcttgctggcctcttcgccagcctcggcctggtcgcgctcctcgccgcgctggtgtgcaacacgctcagcggcctggccctgctacgcgcccgctggcgacgccgctcccgacggcctcccccggcctcaggccccgacagccggcgtcgctggggggcgcacggaccccgctcggcctccgcctcgtccgcctcgtccatcgcttcggcctccaccttctttggcggctctcggagcagcggctcggcacgcagagctcgcgcccacgacgtggagatggtgggccagcttgtcggtatcatggtggtgtcgtgcatctgctggagcccaatgctggtgttggtggcgctggccgtcggcggctggagctctacctccctgcagcggccactgttcctggccgtgcgccttgcctcctggaaccagatcctggacccttgggtgtacatcctactgcgccaggccgtgctgcgccaactgcttcgcctcttgcccccgagggccggagccaagggcggccccgcggggctgggcctaacaccgagcgcctgggaggccagctcgctgcgcagctcccggcacagcggcctcagccacttctaagcacaaccagaggcccaacgactaagccagcccaccctgggctgggcccaggtgcgcggcgcagagcctttgggaataaaaagccattctgcgagccca

SEQ ID NO: 59252 - DNA, 679 bp, Homo sapiens
tcggcctccaccttctttggcggctctcggagcagcggctcggcacgcagagctcgcgcccacgacgtggagatggtgggccagcttgtcggtatcatggtggtgtcgtgcatctgctggagcccaatgctggtgaggggcgcaccggcccctcgagccacgctccttcccgctccctctcggcaccctcccgccctttgtcgtcccaggacacctggggcctccatcctggactcaaccaaggccccggcccctagaggccccacctgccccgaaagccagcatcgccttctccatctgacctcccatccttcctcctagcccccctctcctcttcctttttggggtctttgtagcgcaccccgacccacacaagcctcctctcctgccccaccgttataagtcgccgcgcttcattccctagtcctttcacccaacccccttgcttttcctctttccgggacacctgagactcctctacggccggacccccacccactgaaggtgtttgtttctttgccccccttttttttccgcatccgtttctcatctggatccccatttaccctccctgcgacggctcgcccctcctcccaggcttttaccttccagccacgcccccaccatccctgcgcccccctgcgcccgcgcctgctctatagctcacaccggcttcccc

SEQ ID NO: 59253 - DNA, 1357 bp, Homo sapiens
ccgccccaggaagagggagggaggaagcggcttgccggagagccagggcgcagtgggcggcagggctgagcggccggtgatggggaccccacatcccaggcagtgccggcacccctggcgcctgacatgagcccttgcgggcccctcaacttcgcccgcgctgcccatcttctccatgacgctgggcgccgtgtccaacctgctggcgctggcgctgctggcgcaggccgcgggccgcctgcgacgccgccgctcggccgccaccttcctgctgttcgtggccagcctgctggccaccgacctggcgggccacgtgatcccgggcgcgctggtgctgcgtctgtacactgcggggcgcgctccggccggcggggcctgccacttcctgggcggctgcatggtcttcttcggcctgtgcccgctgctgctgggctgtggcatggccgtggagcgctgcgtgggcgtcacgcggccgctgctccacgccgcgcgggtctcggtcgcccgcgcgcgcctggcgctggccgcggtggccgcggtggccttggccgtggcgctgctgccgctggcgcgcgtgggccgctatgagctgcagtacccgggcacgtggtgcttcatcggcctgggtcccccgggcggctggcgccaggcactgcttgctggcctcttcgccagcctcggcctggtcgcgctcctcgccgcgctggtgtgcaacacgctcagcggcctggccctgctacgcgcccgctggcgacgccgctcccgacggcctcccccggcctcaggccccgacagccggcgtcgctggggggcgcacggaccccgctcggcctccgcctcgtccgcctcgtccatcgcttcggcctccaccttctttggcggctctcggagcagcggctcggcacgcagagctcgcgcccacgacgtggagatggtgggccagcttgtcggtatcatggtggtgtcgtgcatctgctggagcccaatgctggtgttggtggcgctggccgtcggcggctggagctctacctccctgcagcggccactgttcctggccgtgcgccttgcctcctggaaccagatcctggacccttgggtgtacatcctactgcgccaggccgtgctgcgccaactgcttcgcctcttgcccccgagggccggagccaagggcggccccgcggggctgggcctaacaccgagcgcctgggaggccagctcgctgcgcagctcccggcacagcggcctcagccacttctaagcacaaccagaggcccaacgactaagccagcccaccctgggctgggcccaggtgcgcggcgcagagcctttgggaataaaaagccattctgcgagccca

SEQ ID NO: 59254 - DNA, 616 bp, Homo sapiens
acaaacgtcttgtgtttatgtcacttagaggggtgcatggataagacattttccacaacaggaaatatgtattgggctctaacaccatgtccgtcactcgtctttctaggacccgaggccttacacatagaccgtgccctcaaaacttggggtctgtcttgtggaataaaaggggtgacttcaagaacaccagtctttatcagccacttggtgtttgaaggtatagtcttggcctggagaaagccacagcaccagcctcccctgcatccccagtatcttactctgtaaaatcagaatatgaaaactttgctacccgcctactacctctggggggttgtggaggagattgctaagttaatatttgaagaggttcctttaatgaaaggacaaaaggctatttttatgcctatctccatgtgtggctgcagatataattagcggtcataaagttatccagccctgaatggaaatcaactggagcattttcctggcggatgcgtttgtagttgaaatgccacacacagaggcggggctgcttctggaaggagcacctttcgttgactgtctcagtttctcagtggaaggggggagtttattcagggaaggaaacagatgc

SEQ ID NO: 59255 - DNA, 853 bp, Homo sapiens
tcagaatctttcagatcactgcagatgaggaatgggaagcccagactagggatgtgacctacccagggccacacggcttgcttgcggcagaactaggagttaggagtggccccctagcccttgtctctcattcctgggttcagcccaccagctcaagctgctttttgggcatactggaagacaagccctgcacaccttagcctcctaccagttcccatgtgtctttgtccttttccagatacgtttgccagcaaagctgctgccctccaggatgtatatgcagacgcctccattggcaacgtgacgggcagcaacgccgtcaatgtcttcctgggcatcggcctggcctggtccgtggccgccatctactgggctctgcagggacaggagttccacgtgtcggccggcacactggccttctccgtcaccctcttcaccatctttgcatttgtctgcatcagcgtgctcttgtaccgaaggcggccgcacctgggaggggagcttggtggcccccgtggctgcaagctcgccacaacatggctctttgtgagcctgtggctcctctacatactctttgccacactagaggcctattgctacatcaaggggttctaagccacacaacagagcctccagcagggcaggcctaggacttctcctaagagaagggcacttccccaccagtgatctctcccgactgcactgccctggagaggcagcatcaggacctaagccccaggaacttcacccaacttaggccctggcaattaactgaaagggcaaagtcttaatcaatcaaacaatggaggaatcaccgactttacacagtatttaattgaatacaaacaagcaa

SEQ ID NO: 59256 - DNA, 3229 bp, Homo sapiens
ctgacatgccccggacgcggctgcggccggcgggcagcccgcgggggcgatgagccgctgcgaccggtgaggcgccgggcggcgggggcatcgcgtaccttcctcacccccctcccttgcccactccgctcgggaggccgagaggaaacggtctctggcctatcaggaggacaactggtgctgcaatagaagccagtggctaagtctcgtgtatggcgtggttaaggttgcagcctctcacctctgccttcctccattttgggctggttacctttgtgctcttcctgaatggtcttcgagcagaggctggtggctcaggggacgtgccaagcacagggcagaacaatgagtcctgttcagggtcatcggactgcaaggagggtgtcatcctgccaatctggtacccggagaacccttcccttggggacaagattgccagggtcattgtctattttgtggccctgatatacatgttccttggggtgtccatcattgctgaccgcttcatggcatctattgaagtcatcacctctcaagagagggaggtgacaattaagaaacccaatggagaaaccagcacaaccactattcgggtctggaatgaaactgtctccaacctgacccttatggccctgggttcctctgctcctgagatactcctctctttaattgaggtgtgtggtcatgggttcattgctggtgatctgggaccttctaccattgtagggagtgcagccttcaacatgttcatcatcattggcatctgtgtctacgtgatcccagacggagagactcgcaagatcaagcatctacgagtcttcttcatcaccgctgcttggagtatctttgcctacatctggctctatatgattctggcagtcttctcccctggtgtggtccaggtttgggaaggcctcctcactctcttcttctttccagtgtgtgtccttctggcctgggtggcagataaacgactgctcttctacaaatacatgcacaaaaagtaccgcacagacaaacaccgaggaattatcatagagacagagggtgaccaccctaagggcattgagatggatgggaaaatgatgaattcccattttctagatgggaacctggtgcccctggaagggaaggaagtggatgagtcccgcagagagatgatccggattctcaaggatctgaagcaaaaacacccagagaaggacttagatcagctggtggagatggccaattactatgctctttcccaccaacagaagagccgtgccttctaccgtatccaagccactcgtatgatgactggtgcaggcaatatcctgaagaaacatgcagcagaacaagccaagaaggcctccagcatgagcgaggtgcacaccgatgagcctgaggactttatttccaaggtcttctttgacccatgttcttaccagtgcctggagaactgtggggctgtactcctgacagtggtgaggaaagggggagacatgtcaaagaccatgtatgtggactacaaaacagaggatggttctgccaatgcaggggctgactatgagttcacagagggcacggtggttctgaagccaggagagacccagaaggagttctccgtgggcataattgatgacgacatttttgaggaggatgaacacttctttgtaaggttgagcaatgtccgcatagaggaggagcagccagaggaggggatgcctccagcaatattcaacagtcttcccttgcctcgggctgtcctagcctccccttgtgtggccacagttaccatcttggatgatgaccatgcaggcatcttcacttttgaatgtgatactattcatgtcagtgagagtattggtgttatggaggtcaaggttctgcggacatcaggtgcccggggtacagtcatcgtcccctttaggacagtagaagggacagccaagggtggcggtgaggactttgaagacacatatggggagttggaattcaagaatgatgaaactgtcaaaacaattcacatcaaggtaattgatgatgaggcatatgagaaaaacaagaattacttcattgagatgatgggcccccgcatggtggatatgagttttcagaaagcgctcctgttatgtgacagacaggaagctgactatggaagaagaggaggccaagaggatagcagagatgggaaagccagtattgggtgaacaccccaaactagaagtcatcattgaagagtcctatgagttcaagactacggtggacaaactgatcaagaagacaaacctggccttggttgtggggacccattcctggagggaccagttcatggaggccatcaccgtcagtgcagcaggggatgaggatgaggatgaatccggggaggagaggctgccctcctgctttgactacgtcatgcacttcctgactgtcttctggaaggtgctgtttgcctgtgtgccccccacagagtactgccacggctgggcctgcttcgccgtctccatcctcatcattggcatgctcaccgccatcattggggacctggcctcgcacttcggctgcaccattggtctcaaagattcagtcacagctgttgttttcgtggcatttggcacctctgtcccagatacgtttgccagcaaagctgctgccctccaggatgtatatgcagacgcctccattggcaacgtgacgggcagcaacgccgtcaatgtcttcctgggcatcggcctggcctggtccgtggccgccatctactgggctctgcagggacaggagttccacgtgtcggccggcacactggccttctccgtcaccctcttcaccatctttgcatttgtctgcatcagcgtgctcttgtaccgaaggcggccgcacctgggaggggagcttggtggcccccgtggctgcaagctcgccacaacatggctctttgtgagcctgtggctcctctacatactctttgccacactagaggcctattgctacatcaaggggttctaagccacacaacagagcctccagcagggcaggcctaggacttctcctaagagaagggcacttccccaccagtgatctctcccgactgcactgccctggagaggcagcatcaggacctaagccccaggaacttcacccaacttaggccctggcaattaactgaaagggcaaagtcttaatcaatcaaacaatggaggaatcaccgactttacacagtatttaattgaatacaaacaagcaa

SEQ ID NO: 59257 - DNA, 3217 bp, Homo sapiens
ctgacatgccccggacgcggctgcggccggcgggcagcccgcgggggcgatgagccgctgcgaccggtgaggcgccgggcggcgggggcatcgcgtaccttcctcacccccctcccttgcccactccgctcgggaggccgagaggaaacggtctctggcctatcaggaggacaactggtgctgcaatagaagccagtggctaagtctcgtgtatggcgtggttaaggttgcagcctctcacctctgccttcctccattttgggctggttacctttgtgctcttcctgaatggtcttcgagcagaggctggtggctcaggggacgtgccaagcacagggcagaacaatgagtcctgttcagggtcatcggactgcaaggagggtgtcatcctgccaatctggtacccggagaacccttcccttggggacaagattgccagggtcattgtctattttgtggccctgatatacatgttccttggggtgtccatcattgctgaccgcttcatggcatctattgaagtcatcacctctcaagagagggaggtgacaattaagaaacccaatggagaaaccagcacaaccactattcgggtctggaatgaaactgtctccaacctgacccttatggccctgggttcctctgctcctgagatactcctctctttaattgaggtgtgtggtcatgggttcattgctggtgatctgggaccttctaccattgtagggagtgcagccttcaacatgttcatcatcattggcatctgtgtctacgtgatcccagacggagagactcgcaagatcaagcatctacgagtcttcttcatcaccgctgcttggagtatctttgcctacatctggctctatatgattctggcagtcttctcccctggtgtggtccaggtttgggaaggcctcctcactctcttcttctttccagtgtgtgtccttctggcctgggtggcagataaacgactgctcttctacaaatacatgcacaaaaagtaccgcacagacaaacaccgaggaattatcatagagacagagggtgaccaccctaagggcattgagatggatgggaaaatgatgaattcccattttctagatgggaacctggtgcccctggaagggaaggaagtggatgagtcccgcagagagatgatccggattctcaaggatctgaagcaaaaacacccagagaaggacttagatcagctggtggagatggccaattactatgctctttcccaccaacagaagagccgtgccttctaccgtatccaagccactcgtatgatgactggtgcaggcaatatcctgaagaaacatgcagcagaacaagccaagaaggcctccagcatgagcgaggtgcacaccgatgagcctgaggactttatttccaaggtcttctttgacccatgttcttaccagtgcctggagaactgtggggctgtactcctgacagtggtgaggaaagggggagacatgtcaaagaccatgtatgtggactacaaaacagaggatggttctgccaatgcaggggctgactatgagttcacagagggcacggtggttctgaagccaggagagacccagaaggagttctccgtgggcataattgatgacgacatttttgaggaggatgaacacttctttgtaaggttgagcaatgtccgcatagaggaggagcagccagaggaggggatgcctccagcaatattcaacagtcttcccttgcctcgggctgtcctagcctccccttgtgtggccacagttaccatcttggatgatgaccatgcaggcatcttcacttttgaatgtgatactattcatgtcagtgagagtattggtgttatggaggtcaaggttctgcggacatcaggtgcccggggtacagtcatcgtcccctttaggacagtagaagggacagccaagggtggcggtgaggactttgaagacacatatggggagttggaattcaagaatgatgaaactgtgaaaaccataagggttaaaatagtagatgaggaggaatacgaaaggcaagagaatttcttcattgcccttggtgaaccgaaatggatggaacgtggaatatcaggatgtgacagacaggaagctgactatggaagaagaggaggccaagaggatagcagagatgggaaagccagtattgggtgaacaccccaaactagaagtcatcattgaagagtcctatgagttcaagactacggtggacaaactgatcaagaagacaaacctggccttggttgtggggacccattcctggagggaccagttcatggaggccatcaccgtcagtgcagcaggggatgaggatgaggatgaatccggggaggagaggctgccctcctgctttgactacgtcatgcacttcctgactgtcttctggaaggtgctgtttgcctgtgtgccccccacagagtactgccacggctgggcctgcttcgccgtctccatcctcatcattggcatgctcaccgccatcattggggacctggcctcgcacttcggctgcaccattggtctcaaagattcagtcacagctgttgttttcgtggcatttggcacctctgtcccagatacgtttgccagcaaagctgctgccctccaggatgtatatgcagacgcctccattggcaacgtgacgggcagcaacgccgtcaatgtcttcctgggcatcggcctggcctggtccgtggccgccatctactgggctctgcagggacaggagttccacgtgtcggccggcacactggccttctccgtcaccctcttcaccatctttgcatttgtctgcatcagcgtgctcttgtaccgaaggcggccgcacctgggaggggagcttggtggcccccgtggctgcaagctcgccacaacatggctctttgtgagcctgtggctcctctacatactctttgccacactagaggcctattgctacatcaaggggttctaagccacacaacagagcctccagcagggcaggcctaggacttctcctaagagaagggcacttccccaccagtgatctctcccgactgcactgccctggagaggcagcatcaggacctaagccccaggaacttcacccaacttaggccctggcaattaactgaaagggcaaagtcttaatcaatcaaacaatggaggaatcaccgactttacacagtatttaattgaatacaaacaagcaa

SEQ ID NO: 59258 - DNA, 2884 bp, Homo sapiens
ctgacatgccccggacgcggctgcggccggcgggcagcccgcgggggcgatgagccgctgcgaccggtgaggcgccgggcggcgggggcatcgcgtaccttcctcacccccctcccttgcccactccgctcgggaggccgagaggaaacggtctctggcctatcaggaggacaactggtgctgcaatagaagccagtggctaagtctcgtgtatggcgtggttaaggttgcagcctctcacctctgccttcctccattttgggctggttacctttgtgctcttcctgaatggtcttcgagcagaggctggtggctcaggggacgtgccaagcacagggcagaacaatgagtcctgttcagggtcatcggactgcaaggagggtgtcatcctgccaatctggtacccggagaacccttcccttggggacaagattgccagggtcattgtctattttgtggccctgatatacatgttccttggggtgtccatcattgctgaccgcttcatggcatctattgaagtcatcacctctcaagagagggaggtgacaattaagaaacccaatggagaaaccagcacaaccactattcgggtctggaatgaaactgtctccaacctgacccttatggccctgggttcctctgctcctgagatactcctctctttaattgaggtgtgtggtcatgggttcattgctggtgatctgggaccttctaccattgtagggagtgcagccttcaacatgttcatcatcattggcatctgtgtctacgtgatcccagacggagagactcgcaagatcaagcatctacgagtcttcttcatcaccgctgcttggagtatctttgcctacatctggctctatatgattctggcagtcttctcccctggtgtggtccaggtttgggaaggcctcctcactctcttcttctttccagtgtgtgtccttctggcctgggtggcagataaacgactgctcttctacaaatacatgcacaaaaagtaccgcacagacaaacaccgaggaattatcatagagacagagggtgaccaccctaagggcattgagatggatgggaaaatgatgaattcccattttctagatgggaacctggtgcccctggaagggaaggaagtggatgagtcccgcagagagatgatccggattctcaaggatctgaagcaaaaacacccagagaaggacttagatcagctggtggagatggccaattactatgctctttcccaccaacagaagagccgtgccttctaccgtatccaagccactcgtatgatgactggtgcaggcaatatcctgaagaaacatgcagcagaacaagccaagaaggcctccagcatgagcgaggtgcacaccgatgagcctgaggactttatttccaaggtcttctttgacccatgttcttaccagtgcctggagaactgtggggctgtactcctgacagtggtgaggaaagggggagacatgtcaaagaccatgtatgtggactacaaaacagaggatggttctgccaatgcaggggctgactatgagttcacagagggcacggtggttctgaagccaggagagacccagaaggagttctccgtgggcataattgatgacgacatttttgaggaggatgaacacttctttgtaaggttgagcaatgtccgcatagaggaggagcagccagaggaggggatgcctccagcaatattcaacagtcttcccttgcctcgggctgtcctagcctccccttgtgtggccacagttaccatcttggatgatgaccatgcaggcatcttcacttttgaatgtgatactattcatgtcagtgagagtattggtgttatggaggtcaaggttctgcggacatcaggtgcccggggtacagtcatcgtcccctttaggacagtagaagggacagccaagggtggcggtgaggactttgaagacacatatggggagttggaattcaagaatgatgaaactgtgaaaaccataagggttaaaatagtagatgaggaggaatacgaaaggcaagagaatttcttcattgcccttggtgaaccgaaatggatggaacgtggaatatcaggatgtgacagacaggaagctgactatggaagaagaggaggccaagaggatagcagagatgggaaagccagtattgggtgaacaccccaaactagaagtcatcattgaagagtcctatgagttcaagactacggtggacaaactgatcaagaagacaaacctggccttggttgtggggacccattcctggagggaccagttcatggaggccatcaccgtcagtgcagcaggggatgaggatgaggatgaatccggggaggagaggctgccctcctgctttgactacgtcatgcacttcctgactgtcttctggaaggtgctgtttgcctgtgtgccccccacagagtactgccacggctgggcctgcttcgccgtctccatcctcatcattggcatgctcaccgccatcattggggacctggcctcgcacttcggctgcaccattggtctcaaagattcagtcacagctgttgttttcgtggcatttggcacctctgtcccaggtgagagtgagaggtgcttgaatttgcaaagaggattttacctggttcaaatgacccctggactccatctcattatcttccacaccatctcagatctgaacttaacagagcctctgcccttaaagtgcacaaaagtcaatcaaagagatgaataatgacattagtaatgacagctaatatttcttgagcactttcaatgtgacagacaccatgtgtgttcagcaatttacacatttacattttccccctgtaatgtttcccaaagccctattaaatagggta

SEQ ID NO: 59259 - DNA, 1468 bp, Homo sapiens
agtctgagtatcaactcttccagcatggagccgaaaacctagggaatgacagctagaggcatccagacgataactggcagccaggagggtggataagtcaaaggaaggggtcaaggaaagaggggaaggaaagggaaccatcacttgctgagcctgctgcctgtgctttctcatgtcacccgcacgacaacccaatgtgaatgttatcatctccaggtaactgctgaagaaacggaagctcaaagaggaaaaccataagggttaaaatagtagatgaggaggaatacgaaaggcaagagaatttcttcattgcccttggtgaaccgaaatggatggaacgtggaatatcaggatgtgacagacaggaagctgactatggaagaagaggaggccaagaggatagcagagatgggaaagccagtattgggtgaacaccccaaactagaagtcatcattgaagagtcctatgagttcaagactacggtggacaaactgatcaagaagacaaacctggccttggttgtggggacccattcctggagggaccagttcatggaggccatcaccgtcagtgcagcaggggatgaggatgaggatgaatccggggaggagaggctgccctcctgctttgactacgtcatgcacttcctgactgtcttctggaaggtgctgtttgcctgtgtgccccccacagagtactgccacggctgggcctgcttcgccgtctccatcctcatcattggcatgctcaccgccatcattggggacctggcctcgcacttcggctgcaccattggtctcaaagattcagtcacagctgttgttttcgtggcatttggcacctctgtcccagatacgtttgccagcaaagctgctgccctccaggatgtatatgcagacgcctccattggcaacgtgacgggcagcaacgccgtcaatgtcttcctgggcatcggcctggcctggtccgtggccgccatctactgggctctgcagggacaggagttccacgtgtcggccggcacactggccttctccgtcaccctcttcaccatctttgcatttgtctgcatcagcgtgctcttgtaccgaaggcggccgcacctgggaggggagcttggtggcccccgtggctgcaagctcgccacaacatggctctttgtgagcctgtggctcctctacatactctttgccacactagaggcctattgctacatcaaggggttctaagccacacaacagagcctccagcagggcaggcctaggacttctcctaagagaagggcacttccccaccagtgatctctcccgactgcactgccctggagaggcagcatcaggacctaagccccaggaacttcacccaacttaggccctggcaattaactgaaagggcaaagtcttaatcaatcaaacaatggaggaatcaccgactttacacagtatttaattgaatacaaacaagcaa

SEQ ID NO: 59260 - DNA, 1363 bp, Homo sapiens
agtctgagtatcaactcttccagcatggagccgaaaacctagggaatgacagctagaggcatccagacgataactggcagccaggagggtggataagtcaaaggaaggggtcaaggaaagaggggaaggaaagggaaccatcacttgctgagcctgctgcctgtgctttctcatgtcacccgcacgacaacccaatgtgaatgttatcatctccaggtaactgctgaagaaacggaagctcaaagagatgtgacagacaggaagctgactatggaagaagaggaggccaagaggatagcagagatgggaaagccagtattgggtgaacaccccaaactagaagtcatcattgaagagtcctatgagttcaagactacggtggacaaactgatcaagaagacaaacctggccttggttgtggggacccattcctggagggaccagttcatggaggccatcaccgtcagtgcagcaggggatgaggatgaggatgaatccggggaggagaggctgccctcctgctttgactacgtcatgcacttcctgactgtcttctggaaggtgctgtttgcctgtgtgccccccacagagtactgccacggctgggcctgcttcgccgtctccatcctcatcattggcatgctcaccgccatcattggggacctggcctcgcacttcggctgcaccattggtctcaaagattcagtcacagctgttgttttcgtggcatttggcacctctgtcccagatacgtttgccagcaaagctgctgccctccaggatgtatatgcagacgcctccattggcaacgtgacgggcagcaacgccgtcaatgtcttcctgggcatcggcctggcctggtccgtggccgccatctactgggctctgcagggacaggagttccacgtgtcggccggcacactggccttctccgtcaccctcttcaccatctttgcatttgtctgcatcagcgtgctcttgtaccgaaggcggccgcacctgggaggggagcttggtggcccccgtggctgcaagctcgccacaacatggctctttgtgagcctgtggctcctctacatactctttgccacactagaggcctattgctacatcaaggggttctaagccacacaacagagcctccagcagggcaggcctaggacttctcctaagagaagggcacttccccaccagtgatctctcccgactgcactgccctggagaggcagcatcaggacctaagccccaggaacttcacccaacttaggccctggcaattaactgaaagggcaaagtcttaatcaatcaaacaatggaggaatcaccgactttacacagtatttaattgaatacaaacaagcaa

SEQ ID NO: 59261 - DNA, 1481 bp, Homo sapiens
cccctgggattggctactttaagttcagagtacgcatgctctgactttctctctctttcgattcttccatactcagagtacgcacggtctgattttctctttggattcttccaaaatcagagtcagactgctcccggtgccatgaacggagacgacgcctttgcaaggagacccacggttggtgctcaaataccagagaagatccaaaaggccttcgatgatattgccaaatacttctctaaggaagagtgggaaaagatgaaagcctcggagaaaatcttctatgtgtatatgaagagaaagtatgaggctatgactaaactaggtttcaaggccaccctcccacctttcatgtgtaataaacgggccgaagacttccaggggaatgatttggataatgaccctaaccgtgggaatcaggttgaacgtcctcagatgactttcggcaggctccagggaatctccccgaagatcatgcccaagaagccagcagaggaaggaaatgattcggaggaagtgccagaagcatctggcccacaaaatgatgggaaagagctgtgccccccgggaaaaccaactacctctgagaagattcacgagagatctggaaatagggaggcccaagaaaaggaagagagacgcggaacagctcatcggtggagcagtcagaacacacacaacattggtcgattcagtttgtcaacttctatgggtgcagttcatggtacccccaaaacaattacacacaacagggacccaaaaggggggaacatgcctggacccacagactgcgtgagagaaaacagctggtgatttatgaagagatcagcgaccctgaggaagatgacgagtaactcccctcagggatacgacacatgcccatgatgagaagcagaacgtggtgacctttcacgaacatgggcatggctgcggacccctcgtcatcaggtgcatagcaagtgaaagcaagtgttcacaacagtgaaaagttgagcgtcatttttcttagtgtgccaagagttcgatgttagcgtttacgttgtattttcttacactgtgtcattctgttagatactaacattttcattgatgagcaagacatacttaatgcatattttggtttgtgtatccatgcacctaccttagaaaacaagtattgtcggttacctctgcatggaacagcattaccctcctctctccccagatgtgactactgagggcagttctgagtgtttaatttcagattttttcctctgcatttacacacacacgcacacaaaccacaccacacacacacacacacacacacacacacacacacacacacaccaagtaccagtataagcatctgccatctgcttttcccattgccatgcgtcctggtcaagctcccctcactctgtttcctggtcagcatgtactcccctcatccgattcccctgtagcagtcactgacagttaataaacctttgcaaacgttc

SEQ ID NO: 59262 - DNA, 1413 bp, Homo sapiens
cccctgggattggctactttaagttcagagtacgcatgctctgactttctctctctttcgattcttccatactcagagtacgcacggtctgattttctctttggattcttccaaaatcagagtcagactgctcccggtgccatgaacggagacgacgcctttgcaaggagacccacggttggtgctcaaataccagagaagatccaaaaggccttcgatgatattgccaaatacttctctaaggaagagtgggaaaagatgaaagcctcggagaaaatcttctatgtgtatatgaagagaaagtatgaggctatgactaaactaggtttcaaggccaccctcccacctttcatgtgtaataaacgggccgaagacttccaggggaatgatttggataatgaccctaaccgtgggaatcaggttgaacgtcctcagatgactttcggcaggctccagggaatctccccgaagatcatgcccaagaagccagcagaggaaggaaatgattcggaggaagtgccagaagcatctggcccacaaaatgatgggaaagagctgtgccccccgggaaaaccaactacctctgagaagattcacgagagatctggaaatagggaggcccaagaaaaggaagagagacgcggaacagctcatcggtggagcagtcagaacacacacaacattggacccaaaaggggggaacatgcctggacccacagactgcgtgagagaaaacagctggtgatttatgaagagatcagcgaccctgaggaagatgacgagtaactcccctcagggatacgacacatgcccatgatgagaagcagaacgtggtgacctttcacgaacatgggcatggctgcggacccctcgtcatcaggtgcatagcaagtgaaagcaagtgttcacaacagtgaaaagttgagcgtcatttttcttagtgtgccaagagttcgatgttagcgtttacgttgtattttcttacactgtgtcattctgttagatactaacattttcattgatgagcaagacatacttaatgcatattttggtttgtgtatccatgcacctaccttagaaaacaagtattgtcggttacctctgcatggaacagcattaccctcctctctccccagatgtgactactgagggcagttctgagtgtttaatttcagattttttcctctgcatttacacacacacgcacacaaaccacaccacacacacacacacacacacacacacacacacacacacacaccaagtaccagtataagcatctgccatctgcttttcccattgccatgcgtcctggtcaagctcccctcactctgtttcctggtcagcatgtactcccctcatccgattcccctgtagcagtcactgacagttaataaacctttgcaaacgttc

SEQ ID NO: 59263 - DNA, 1335 bp, Homo sapiens
cccctgggattggctactttaagttcagagtacgcatgctctgactttctctctctttcgattcttccatactcagagtacgcacggtctgattttctctttggattcttccaaaatcagagtcagactgctcccggtgccatgaacggagacgacgcctttgcaaggagacccacggttggtgctcaaataccagagaagatccaaaaggccttcgatgatattgccaaatacttctctaaggaagagtgggaaaagatgaaagcctcggagaaaatcttctatgtgtatatgaagagaaagtatgaggctatgactaaactaggtttcaaggccaccctcccacctttcatgtgtaataaacgggccgaagacttccaggggaatgatttggataatgaccctaaccgtgggaatcaggttgaacgtcctcagatgactttcggcaggctccagggaatctccccgaagatcatgcccaagaagccagcagaggaaggaaatgattcggaggaagtgccagaagcatctggcccacaaaatgatgggaaagagctgtgccccccgggaaaaccaactacctctgagaagattcacgagagatctggacccaaaaggggggaacatgcctggacccacagactgcgtgagagaaaacagctggtgatttatgaagagatcagcgaccctgaggaagatgacgagtaactcccctcagggatacgacacatgcccatgatgagaagcagaacgtggtgacctttcacgaacatgggcatggctgcggacccctcgtcatcaggtgcatagcaagtgaaagcaagtgttcacaacagtgaaaagttgagcgtcatttttcttagtgtgccaagagttcgatgttagcgtttacgttgtattttcttacactgtgtcattctgttagatactaacattttcattgatgagcaagacatacttaatgcatattttggtttgtgtatccatgcacctaccttagaaaacaagtattgtcggttacctctgcatggaacagcattaccctcctctctccccagatgtgactactgagggcagttctgagtgtttaatttcagattttttcctctgcatttacacacacacgcacacaaaccacaccacacacacacacacacacacacacacacacacacacacacaccaagtaccagtataagcatctgccatctgcttttcccattgccatgcgtcctggtcaagctcccctcactctgtttcctggtcagcatgtactcccctcatccgattcccctgtagcagtcactgacagttaataaacctttgcaaacgttc

SEQ ID NO: 59264 - DNA, 834 bp, Homo sapiens
  misc_feature (612)..(612): n is a, c, g, or t
  misc_feature (634)..(634): n is a, c, g, or t
cccctgggattggctactttaagttcagagtacgcatgctctgactttctctctctttcgattcttccatactcagagtacgcacggtctgattttctctttggattcttccaaaatcagagtcagactgctcccggtgccatgaacggagacgacgcctttgcaaggagacccacggttggtgctcaaataccagagaagatccaaaaggccttcgatgatattgccaaatacttctctaaggaagagtgggaaaagatgaaagcctcggagaaaatcttctatgtgtatatgaagagaaagtatgaggctatgactaaactaggtttcaaggccaccctcccacctttcatgtgtaataaacgggccgaagacttccaggggaatgatttggataatgaccctaaccgtgggaatcaggttgaacgtcctcagatgactttcggcaggctccagggaatctccccgaagatcatgcccaagaagccagcagaggaaggaaatgattcggaggaagtgccagaagcatctggcccacaaaatgatgggaaagagctgtgccccccgggaaaaccaactacctctgagaagattcacgagagatctggtgtncttcagagatactgcaggttcngttccagaccactgcaataaagaaatagggaggcccaagaaaaggaagagagacgcggaacagctcatcggtggagcagtcagaacacacacaacattggtcgattcagtttgtcaacttctatgggtgcagttcatggtacccccaaaacaattacacacaacagggtgattatagtcaataataacttaattgtactt

SEQ ID NO: 59265 - DNA, 2470 bp, Homo sapiens
ataccaggaacatccactgttatccattgtaacagggatttaggcagattatatgattggaaactttagtggtgaaagaatgagtaagttctcttttgattgcttttatattctcaaatgaaaaaagaaatgaagttactggttgagagtggcagaaggggttgattgagcctagaaaacatagaatagtttttaacctcagtaagtaaattgattaagggaggtgttctgggattacatgacagtgtcaggggttttgtgaaaatttaaagagagaccagccatcatggttatgtatgttttttcagtcttgttcagcccaagcactgaataaattggaaagttgcatttatccatggttggggatttggtaaatactatgaaggtaagaaaaacaaggacaagtgcacctgctagaaaacagcggcagacatggtagatattaatccaactatctcaataatcactttaaatgtgaatggcgctaaatataccaactaaaacacaaagactgccagtagattaaaaaaaaaagacccaatgatatgttgtctgtaaaaaaacccattttaaatataaagacacaaatagcataaaaataaaggtataaagaaagatataccatgttaatactaatcaaaagaaaactggagtagcagtattgatatcagataaggcaaacttcagagggagaaaaatgatcagggataaagaggggcattatataataagagggtcaatactccaagaagacattgttaaatccttaatgtgtatgcacctaacaacagagcatcaacgtatgtgaagcaaaaactaatagaactgcaagagaaatagacaagtccactattatagttggagacttcaacactcttctatcagtaattgacacatttagcaggcaaaaaaatcagtaaggatatagctgaactggacaatactgtcaagccactgaatctaattgacatttacagtatacttcattcaacagagtacatattcttctcaagctcacaggaaacatccaccaagatagactacatacttggccttaagatacaccttacaaatttcaaagaatacaaaccatataaagtgtgctctcagaggaaattaaacaaaatcaaaaacagaaacgtagatgggaaatctcaaaataactggagattaaacaaaacacttctagataccagatgggtcaaagaagaagtctgaacagaaattttaaaatgttttgaactaaataaaaatgaaaatacaatgtatcaaaatttataggaagcagtgaaagtagtggttggagataaattataatattgaatgcctatattagaagagattaaaaagatttaaaattcataatctaagtttccatcttaggaaactagagaagaaagatcagtgtaagcctaaagcaagcaaaaggatagaaataaaaattatagtagaaatcaataaaatagaaaacaagaaaccaatagaaaaattcagtgaagtaaaaatgtgctaatttgtgcagcagcaatagaaaaaagaaataaaaacagtactttcacaggtcagtaaaatgtataaacctctagctaagctaactaagaaaaaaaaacacagattgctgataacagaaatgagaaaggggtcatcactactgatcccaaggacattaaaaagataacaaaagaatattatgagcaactctgtacccacagatttgacagcttaggtgaaacagatcaatttcttgaaagacacaaacaaccaaaactcacacagggaaaagagatgatctgaataggcctatatctattatggaaattgataaattatggaagtcaataaacaaccttgcaaacaagaaagcaccagacccagtggttttgttgtcaaatctagcaaacattatggaagaaatggtaccaattctctacattctcttcccaaaaaatagaagtgaagggaatacttcctaactcatttcatgaagttagcatttcctgtatcaaaatcagataaaaacattggaagaaaggaaaactacagaccaatacctctcatgaacgtagatcagcggtctccaacctttttggcaacaggtaccagttttatggaagataatttttccatgggacatggtgggtggggcagatggtttcgggatgaaactgttgcacctcagatcatcaggcattagttagattctcataaggagcttgcaacctagatccctcatatgtgctgttcacaatagggttcacactcctgagaatctaatgtgtcgctgatctgactagaggcagagctcaggtggcaatcctggctcacctgccactcacctcctgctatgtggcctgatactgttactagtcccaggcctgagggttagggatccctgatataaatgcaactattagcaaaatattagcaaattgaatttatgaataaatgtgaatctgtgaatacaccacaa

SEQ ID NO: 59266 - DNA, 2256 bp, Homo sapiens
ataccaggaacatccactgttatccattgtaacagggatttaggcagattatatgattggaaactttagtggtgaaagaatgagtaagttctcttttgattgcttttatattctcaaatgaaaaaagaaatgaagttactggttgagagtggcagaaggggttgattgagcctagaaaacatagaatagtttttaacctcagtaagtaaattgattaagggaggtgttctgggattacatgacagtgtcaggggttttgtgaaaatttaaagagagaccagccatcatggttatgtatgttttttcagtcttgttcagcccaagcactgaataaattggaaagttgcatttatccatggttggggatttggtaaatactatgaaggtaagaaaaacaaggacaagtgcacctgctagaaaacagcggcagacatggtagatattaatccaactatctcaataatcactttaaatgtgaatggcgctaaatataccaactaaaacacaaagactgccagtagattaaaaaaaaaagacccaatgatatgttgtctgtaaaaaaacccattttaaatataaagacacaaatagcataaaaataaaggtataaagaaagatataccatgttaatactaatcaaaagaaaactggagtagcagtattgatatcagataaggcaaacttcagagggagaaaaatgatcagggataaagaggggcattatataataagagggtcaatactccaagaagacattgttaaatccttaatgtgtatgcacctaacaacagagcatcaacgtatgtgaagcaaaaactaatagaactgcaagagaaatagacaagtccactattatagttggagacttcaacactcttctatcagtaattgacacatttagcaggcaaaaaaatcagtaaggatatagctgaactggacaatactgtcaagccactgaatctaattgacatttacagtatacttcattcaacagagtacatattcttctcaagctcacaggaaacatccaccaagatagactacatacttggccttaagatacaccttacaaatttcaaagaatacaaaccatataaagtgtgctctcagaggaaattaaacaaaatcaaaaacagaaacgtagatgggaaatctcaaaataactggagattaaacaaaacacttctagataccagatgggtcaaagaagaagtctgaacagaaattttaaaatgttttgaactaaataaaaatgaaaatacaatgtatcaaaatttataggaagcagtgaaagtagtggttggagataaattataatattgaatgcctatattagaagagattaaaaagatttaaaattcataatctaagtttccatcttaggaaactagagaagaaagatcagtgtaagcctaaagcaagcaaaaggatagaaataaaaattatagtagaaatcaataaaatagaaaacaagaaaccaatagaaaaattcagtgaagtaaaaatgtgctaatttgtgcagcagcaatagaaaaaagaaataaaaacagtactttcacaggtcagtaaaatgtataaacctctagctaagctaactaagaaaaaaaaacacagattgctgataacagaaatgagaaaggggtcatcactactgatcccaaggacattaaaaagataacaaaagaatattatgagcaactctgtacccacagatttgacagcttaggtgaaacagatcaatttcttgaaagacacaaacaaccaaaactcacacagggaaaagagatgatctgaataggcctatatctattatggaaattgataaattatggaagtcaataaacaaccttgcaaacaagaaagcaccagacccagtggttttgttgtcaaatctagcaaacattatggaagaaatggtaccaattctctacattctcttcccaaaaaatagaagtgaagggaatacttcctaactcatttcatgaagttagcatttcctgtatcaaaatcagataaaaacattggaagaaaggaaaactacagaccaatacctctcatgaacgtagatcagcggtctccaacctttttggcaacaggtaccagtgtttgatgaagctaggactgaggagcaagcgagcaagcagcagttcgtggtgaagataggaaaagagtccaggagccagtgcgatttggtgaaggaagctaggagaaggaaggagcgctaacgatttggtggtgaagctaggaataggattg

SEQ ID NO: 59267 - DNA, 1235 bp, Homo sapiens
ataccaggaacatccactgttatccattgtaacagggatttaggcagattatatgattggaaactttagtggtgaaagaatgagtaagttctcttttgattgcttttatattctcaaatgaaaaaagaaatgaagttactggttgagagtggcagaaggggttgattgagcctagaaaacatagaatagtttttaacctcagtaagtaaattgattaagggaggtgttctgggattacatgacagtgtcaggggttttgtgaaaatttaaagagagaccagccatcatggttatgtatgttttttcagtcttgttcagcccaagcactgaataaattggaaagttgcatttatccatggttggggatttggtaaatactatgaaggtaagaaaaacaaggacaagtgcacctgctagaaaacagcggcagacatggtagatattaatccaactatctcaataatcactttaaatgtgaatggcgctaaatataccaactaaaacacaaagactgccagtagattaaaaaaaaaagacccaatgatatgttgtctgtaaaaaaacccattttaaatataaagacacaaatagcataaaaataaaggtataaagaaagatataccatgttaatactaatcaaaagaaaactggagtagcagtattgatatcagataaggcaaacttcagagggagaaaaatgatcagggataaagaggggcattatataataagagggtcaatactccaagaagacattgttaaatccttaatgtgtatgcacctaacaacagagcatcaacgtatgtgaagcaaaaactaatagaactgcaagagaaatagacaagtccactattatagttggagacttcaacactcttctatcagtaattgacacatttagcaggcaaaaaaatcagtaaggatatagctgaactggacaatactgtcaagccactgaatctaattgacatttacagtatacttcattcaacagagtacatattcttctcaagctcacaggaaacatccaccaagatagactacatacttggccttaagatacaccttacaaatttcaaagaatacaaaccatataagggtggccccagggaatcacccatccaaacgaacgtcatgcgaccccggggataacctctgaaccatgggccacagtgccgcattaggcggcgcaacaagacacgccgccacgcggacacagggggaactggggcgcg

SEQ ID NO: 59268 - DNA, 692 bp, Homo sapiens
cgccgcccacactgcagccaccagcgctccagccaacgccgctgccggtggctcccccgctcaccccgggtctgggccacaaggagtcagccctggctcccaccgcagcccctgctctgcccccagccttagccgccgaccaggccccggccccatccccggctccagctcccaccgtggctgagccctcgccgcctgtgtccgcgcccgcacccgcgctgcgcccatcaagacccgcacgcgcaggaacaagggttcccgtgcagcccggggcgcgacccgtaaggatggcttgcatggagatggtcctcgcgaacgagctacagctaccgtgcctgacagcagtggtggagggggtggtggcagcggggcctctcagactggggcagctaacaacccgtgcgcgccactggctgcccttccaggtgcttaactcctgtccctgcaagtgttactgccaccaccagccacgccatcgccgcctgccacgcaacgtctctgcctggctgagcacatccaccaaccacctgggcgagccaccctgggttgccaccatcaagctgtccggctctctggtggccaagctggagcactacgacttgcaggccacccattccaactgagtgtagtcggctcaacaccctccaccttcccctccatgccaataaaataaccaatccagaaaaaaaaaa

SEQ ID NO: 59269 - DNA, 811 bp, Homo sapiens
aaccagaaggcctgggggcgaggaacaagacctcggagtatttcaaggggagacctagttccctgccctgccccgggcccagggcgccgcggtctgaactctgctcggctggaggactcgtctccgagctccgtcagaaatggggaacttgcagtcggagccatccgcgggcgggggctcccgaaaagtgcagccctcggaccgcgcccccgactcccgccggacgtccctggtggagcccgagatgacctcccaggccatgcgcctgactcgtgggctgggtgtctggttccctggcagcgccacacccccgggactcatggtaccccgggagccccaggcctcaccctcgaccctgcccctcaccttagaacggccctctccagtgatgccccctcctgaagaggcggccgcggtctctgcaccacccccggcccccgcggggactctgctgcccggcccgtctaaatggcaaaagcccgcgggcactccagttccccggatccgccgcctgctggaggcgagccatcgcggccagggcgaccctccgagcctccgcccgctgaagccgccgccgccgccccggcaactatccgtgaaggacactgtcccgagggccccatcccaatttccgccgcccctggagacttggaagccgccaccaccattaccttctgaacggcagccggcggaccgcagaatcactcctgctctggccacacccgcctcacccccgacagaaagccaggctgggccccgcaaccagggccagacggccggcagggctcgcggaggggcgcctccccatgcg

SEQ ID NO: 59270 - DNA, 1223 bp, Homo sapiens
aaccagaaggcctgggggcgaggaacaagacctcggagtatttcaaggggagacctagttccctgccctgccccgggcccagggcgccgcggtctgaactctgctcggctggaggactcgtctccgagctccgtcagaaatggggaacttgcagtcggagccatccgcgggcgggggctcccgaaaagtgcagccctcggaccgcgcccccgactcccgccggacgtccctggtggagcccgagatgacctcccaggccatgcgcctgactcgtgggctgggtgtctggttccctggcagcgccacacccccgggactcatggtaccccgggagccccaggcctcaccctcgaccctgcccctcaccttagaacggccctctccagtgatgccccctcctgaagaggcggccgcggtctctgcaccacccccggcccccgcggggactctgctgcccggcccgtctaaatggcaaaagcccgcgggcactccagttccccggatccgccgcctgctggaggcgagccatcgcggccagggcgaccctccgagcctccgcccgctgaagccgccgccgccgccccggcaactatccgtgaaggacactgtcccgagggccccatcccaatttccgccgcccctggagacttggaagccgccaccaccattaccttctgaacggcagccggcggaccgcagaatcactcctgctctggccacacccgcctgtgtccgcgcccgcacccgcgctgcgcccatcaagacccgcacgcgcaggaacaagggttcccgtgcagcccggggcgcgacccgtaaggatggcttgcatggagatggtcctcgcgaacgagctacagctaccgtgcctgacagcagtggtggagggggtggtggcagcggggcctctcagactggggcagctaacaacccgtgcgcgccactggctgcccttccaggtgcttaactcctgtccctgcaagtgttactgccaccaccagccacgccatcgccgcctgccacgcaacgtctctgcctggctgagcacatccaccaaccacctgggcgagccaccctgggttgccaccatcaagctgtccggctctctggtggccaagctggagcactacgacttgcaggccacccattccaactgagtgtagtcggctcaacaccctccaccttcccctccatgccaataaaataaccaatccagaaaaaaaaaa

SEQ ID NO: 59271 - DNA, 387 bp, Homo sapiens
aaccagaaggcctgggggcgaggaacaagacctcggagtatttcaaggggagacctagttccctgccctgccccgggcccagggcgccgcggtctgaactctgctcggctggaggactcggtgcttaactcctgtccctgcaagtgttactgccaccaccagccacgccatcgccgcctgccacgcaacgtctctgcctggctgagcacatccaccaaccacctgggcgagccaccctgggttgccaccatcaagctgtccggctctctggtggccaagctggagcactacgacttgcaggccacccattccaactgagtgtagtcggctcaacaccctccaccttcccctccatgccaataaaataaccaatccagaaaaaaaaaa

SEQ ID NO: 59272 - DNA, 398 bp, Homo sapiens
agactgccctggacctcttgaagcttagctgggacactcgccagccctcagctccctttcctattaagtggccacagccctgccctaaactgcctttgggatattccaatatagccttcagaagcttccctattcatatggggacagggaggccctagaagggctagaggcctggtcccattgctgggctttgctgactctaccctcccccactaggctgagcacatccaccaaccacctgggcgagccaccctgggttgccaccatcaagctgtccggctctctggtggccaagctggagcactacgacttgcaggccacccattccaactgagtgtagtcggctcaacaccctccaccttcccctccatgccaataaaataaccaatccagaaaaa

SEQ ID NO: 59273 - DNA, 1267 bp, Homo sapiens
  misc_feature (6)..(6): n is a, c, g, or t
  misc_feature (8)..(8): n is a, c, g, or t
tatggntntgagtacctgggaaactccccccggctggtgatcacacccctcaccgaccgctgctacaggacactgatgggagctttgaagctgaaccttgggggtgctccagagggtccagctgggactggcaagacagaaaccaccaaagatttggccaaagccttggctaagcagtgtgtggtcttcaactgctccgatggtttggattacaaagctatggggaagttcttcaaggggctggcacaggctggagcatgggcgtgctttgatgagttcaacaggatcgaggtagaagtgctgtctgtggtcgctcagcagatcctcagcatccaacaagccatcattcggaagctaaagacattcatctttgaagggactgagctctctctgaacccaacctgcgctgtgttcatcaccatgaaccccgggtatgctggcagggctgaactgcccgacaatctcaaggccttgttccggacagtggccatgatggtcccagattacgccctcattggagaaatctccctctactccatggggtttctggactccagaagtctcgcccagaagatcgttgcgacctaccgcctgtgctcggaacaactgtcctctcagcatcactatgactacggtatgcgcgctgtcaagtctgtgcttactgccgcaggaaacctgaagctcaagtatccagaggagaatgaaagtgtcctgctgctccgggcattgcttgatgtcaatctggccaagttcttagcgcaagatgtccctctgtttcagggaattatatctgatttatttcctggagttgttcttccaaagccagactatgaagtttttctgaaagtgctgaatgataacatcaaaaagatgaaactccagccagtaccttggtttatagggaaaattatccagatctacgaaatgatgctggtgagacatggctatatgattgtaggagaccccatgggcggcaagacctctgcttataaagtgttggctgcagctctcggcgatttacacgcagccaatcagatggaggagtttgctgtggagtacaagatcatcaaccccaaggctatcacgatggggcagctgtatgggtgctttgaccaagtgagccacgagtggatggatggtgtccttgccaatgctttccgggagcaagcgtcttcactctctgatgatcgcaagtggattatatttgatgggccagtggatgctatttggattgaaaatatgaacactgttctggatgacaataaaa

SEQ ID NO: 59274 - DNA, 1888 bp, Homo sapiens
ggtctttaaacccaaaccccctttaaggcatgttggtctcaaggggatttgggattgaagcacagctttctgttgaggaaacctaggtgtcactttttagaacattaaaaagaaagttgtagggtgggcttttccatttaaaggaatgtgatgatcctaggttctgatgagtgataggtggtctccgtttataccctttcttcttttggcacctgtaagttccggtagtggccatcttacattctcatgtcctgctggaagtgcctagttgcctgcaaagccagctaaggcttattatttcaaaagaagattatttaaaacatgagtgacaggtagtcagaagagaacaaaaggacgcaagatactctatagccaagtcagcttggaggcaggatgggttgctgagtgaagtcgccgctcacttttggattcttatggactgtgagttagtcttccctctacacggagtcacaggaagggtataaatgcatgttcctgaggtgccctcccccaaagaatgtacctgcactcaaaccaggatctgtttttgctgttttaatcataaatagactagttagtagaagacttttgaagaacaaagtaaaacttttttttttcattaaaagatgtcccagaggaaaggccctgtgcagccagtatattctaatgactgcctggaccatgtcctaatatggtggttttaagttgttggccaaaatcctttaaagacatacgaaacatctgccaactttttagcgaacttaacaggtttcactgacgttttcctcaatttttgaatttaggtgggatttgctttcatgtcctgtttcaaaaaccaagtgtctcttgacagcccactggttcttcctgtcctcttgctctagtctgtatcagaaagcagaatgactgtacttttgttttacaaacaaccacctgataggacggacactccacgagataaggaaaggcacgtgcccttgagcttgaatggaagcagcctctggagggggcagccactgcccttcgagggagagcagctcttcagcagtggccagagtgccacgtgactctgcagatgacccctgggagccgggtgatgggcacctgctggggcttttgttttttctttttcactggctggcttgatcctcagtggcaaaaggacccctgagccccttctccgagccctggagcactcctcgggacaccgagtggcctcagggctgggttcagagctcctcccgcagggggagcctcagaagtggaggcagctgctgatgggtgagtttacaacttcttatcctgcctaaggcgagtaggcgtttttattccgtttccagtccttgagctcagcagatcaaaataacagtgaccctgcaaccccacagagcccgcgacacgctcgctttcttccccgccctgcccctttagtccccgctctggaaggccaggcagtttaggtgtaaataggtatcttttatggtttccaaatgaattatttgtgtgagagtaattaaatctgtaagaaaacctgttgagattcttcactatgaattatgacttctacaacatgtattttagcaaaaacacgatgctggcctccactggatagctcagtatgctgattgccagtgatagttctgtacgcgttaccaacagcgtctttattaaccctcttccacatccagtggaaatcattgctaggcggtatttgttggttggctgttagctttgctttatgatttcatgtttcttttaaaggttgttttgcatgttgaatattaaattttttttttctgtgtcttcctctaatctttttctgtaatgggaatttcagggtaaatacagatattatagcaaagcaataatttaatgattgaaacttaat

SEQ ID NO: 59275 - DNA, 1834 bp, Homo sapiens
ggtctttaaacccaaaccccctttaaggcatgttggtctcaaggggatttgggattgaagcacagctttctgttgaggaaacctaggtgtcactttttagaacattaaaaagaaagttgtagggtgggcttttccatttaaaggaatgtgatgatcctaggttctgatgagtgataggtggtctccgtttataccctttcttcttttggcacctgtaagttccggtagtggccatcttacattctcatgtcctgctggaagtgcctagttgcctgcaaagccagctaaggcttattatttcaaaagaagattatttaaaacatgagtgacaggtagtcagaagagaacaaaaggacgcaagatactctatagccaagtcagcttggaggcaggatgggttgctgagtgaagtcgccgctcacttttggattcttatggactgtgagttagtcttccctctacacggagtcacaggaagggtataaatgcatgttcctgaggtgccctcccccaaagaatgtacctgcactcaaaccaggatctgtttttgctgttttaatcataaatagactagttagtagaagacttttgaagaacaaagtaaaacttttttttttcattaaaagatgtcccagaggaaaggccctgtgcagccagtatattctaatgactgcctggaccatgtcctaatatggtggttttaagttgttggccaaaatcctttaaagacatacgaaacatctgccaactttttagcgaacttaacaggtttcactgacgttttcctcaatttttgaatttaggtgggatttgctttcatgtcctgtttcaaaaaccaagtgtctcttgacagcccactggttcttcctgtcctcttgctctagtctgtatcagaaagcagaatgactgtacttttgttttacaaacaaccacctgataggacggacactccacgagataaggaaaggcacgtgcccttgagcttgaatggaagcagcctctggagggggcagccactgcccttcgagggagagcagctcttcagcagtggccagagtgccacgtgactctgcagatgacccctgggagccgggtgatgggcacctgctggggcttttgttttttctttttcactggctggcttgatcctcagtggcaaaaggacccctgagccccttctccgagccctggagcactcctcgggacaccgagtggcctcagggctgggttcagagctcctcccgcagggggagcctcagaagtggaggcagctgctgatgggtgagtttacaacttcttatcctgcctaaggcgagtaggcgtttttattccgtttccagtccttgagctcagcagatcaaaataacagtgaccctgcaaccccacagagcccgcgacacgctcgctttcttccccgccctgcccctttagtccccgctctggaaggccaggcagtttaggtgtaaataggtatcttttatggtttccaaatgaattatttgtgtgagagtaattaaatctgtaagaaaacctgttgagattcttcactatgaattatgacttctacaacatgtattttagcaattctgtacgcgttaccaacagcgtctttattaaccctcttccacatccagtggaaatcattgctaggcggtatttgttggttggctgttagctttgctttatgatttcatgtttcttttaaaggttgttttgcatgttgaatattaaattttttttttctgtgtcttcctctaatctttttctgtaatgggaatttcagggtaaatacagatattatagcaaagcaataatttaatgattgaaacttaat

SEQ ID NO: 59276 - DNA, 380 bp, Homo sapiens
tatgtgtggaatataaaaaagtcaaactcatagaaacggtatagtgctggttaccagcggttgggaggattgggagatgttggtgaagggatacaaaattttataatagactggtggaataagttcaagagatctgttgtacaacatggtgactatagttgataacaatgtattgtgtacttgaaaattagtaaattttaagtattctcaccacaagtggtaaatatgtgaagtaatgcatatgataattagctccatttagctgttccacaatatgtacatatatcaaaacatcgtgctaaacattgtaagtatatacagttttctaaaaaaggattagttgagtcttaactcaggtctctctgactcttcaagttgta

SEQ ID NO: 59277 - DNA, 364 bp, Homo sapiens
atctggaggctgactctagaggatacacccaccgccagggagtactacgttgcccgggctagcctcaaactcctgagttccagggatcctcctacctcagcttcccaaagtggtgagattacaggatcgagccatcgcacctggcccaattattctttctaaaccatttcctcttctgtgttcatgcctttaaaaataaaatttaaaaaaaaaaaaaaaatccttaaaatttctcaggtgttttccatatcattttattatcaagaatatggctaatcagaagtcacagccagcccccgaactacaactacaaaacatgcatattataggctacactgagggatttctgaggttagcagatgca

SEQ ID NO: 59278 - DNA, 1974 bp, Homo sapiens
  misc_feature (776)..(776): n is a, c, g, or t
ggttccgcggggctggcgggcgagcgggcggccgggatcggcggcggcggcggcggcggcggcgcttgacagacaatgagggcggcggggcggcgttgagcggcggcggcggcggcggcggcggcgagcgacgcggggcccgggggcggggcggggcgccagccatggacaatcagtgcaccgtccaggtgaggttagagctggggcatcgcgcccaactgcgcaagaagcccaccacggaggggttcactcacgactggatggtgtttgtccgcggccccgagcaatgtgacatccagcacttcgtggagaaggtggtcttctggctgcacgacagcttccccaagcccagacgcgtgtgcaaggagcccccctacaaagtagaggagtcggggtacgctggcttcatcatgcccatcgaggtgcacttcaaaaacaaggaggagccgaggaaggtctgcttcacctacgacctgttcctgaacctggaaggcaacccgcccgtgaaccacctgcgctgcgagaagctcaccttcaacaaccccaccacggagttccggtacaagctcctgcgggccggcggggtgatggtaatgcccgaaggagcagacacggtgtccaggcccagtcccgactaccccatgttacccacaattccactctctgccttctctgaccccaagaagaccaaaccatcccacggctccaaggacgccaacaaggagagcagcaagacctccaagccacacaaggtgaccaaggagcaccgggagcgnccccgcaaagactccgagagcaagagctcctccaaggagctggagcgtgagcaggccaaaagctccaaggacacctcgcggaagctgggcgagggccggctgcccaaggaggagaaggcgccaccgcccaaggctgccttcaaggaacccaagatggccctgaaagagaccaagctggaaagcacgtcccccaaccctgggcccccacccccacccccacccccaccccgggcttccagcaagcggccggccaccgccgactcgccaaagcccagcgccaagaagcagaagaagagcagctcgaaggggtcccggagtgctccaggcacctcgccccgcacctcctcctcctcctccttctcggacaagaagccggccaaggacaagagcagcaccagaggggagaaggtgaaggccgagagtgagccccgggaggccaaaaaggccctggaggtggaggagtccaactcagaggacgaggcctccttcaagtccgagtctgcccagtcaagcccgtccaactccagctccagctcagactccagctcagactcagacttcgagccatcccagaaccacagccaaggacccctgcgctccatggtggaggacctgcagtccgaggagtccgacgaggacgactcttcgtcaggcgaggaggctgccggcaagaccaacccggggagggactccaggttgagcttcagcgacagcgagagtgacaacagcgccgactcctccctgcccagccgtgagcccccacccccccagaagccacccccgcccaacagcaaggtgtcaggccggaggagccccgagtcctgcagcaagcctgagaagatcctcaagaagggcacctacgacaaggcctacacggatgagctggtggagctacaccggaggctgatggcgctgcgggagcgcaacgtgctgcagcagattgtgaatctgatcgaggagactggccacttcaatgtcaccaacaccaccttcgacttcgacctcttctccctggacgagaccaccgtgcgcaaactgcagagctgcctggaggccgtggccacatgaccctgggccgcgtgccgggcccccaccgccggggtcctgggaggctgcagccaggcctcgcctgccctcctctcccgtctcgcctgcttcatttggatatcagagctatggctcagaaaagcaagcatct

SEQ ID NO: 59279 - DNA, 664 bp, Homo sapiens
ggttccgcggggctggcgggcgagcgggcggccgggatcggcggcggcggcggcggcggcggcgcttgacagacaatgagggcggcggggcggcgttgagcggcggcggcggcggcggcggcggcgagcgacgcggggcccgggggcggggcggggcgccagccatggacaatcagtgcaccgtccaggtgaggttagagctggggcatcgcgcccaactgcgcaagaagcccaccacggaggggttcactcacgactggatggtgtttgtccgcggccccgagcaatgtgacatccagcacttcgtggagaaggtggtcttctggctgcacgacagcttccccaagcccagacgcgtgtgcaaggagcccccctacaaagtagaggagtcggggtacgctggcttcatcatgcccatcgaggtgcacttcaaaaacatttgtgtattgccaagtctgttgtgagcccttccacaagttttgtttagaggagaacgagcgccctctggaggaccagctggaaaattggtgttgtcgtcgttgcaaattctgtcacgtttgtggaaggcaacatcaggctacaaagcagctgctggagtgtaataagtgccgaaacagctatcaccctgagtgcctgggaccaaactaccccaccaaacccacaa

SEQ ID NO: 59280 - DNA, 1627 bp, Homo sapiens
  misc_feature (429)..(429): n is a, c, g, or t
actttgaacatcctcagcactctctccaatggcaatagttctaagcaaaaaattccagcagatggagtccacaggatcagagtggactttaaggaggagccgaggaaggtctgcttcacctacgacctgttcctgaacctggaaggcaacccgcccgtgaaccacctgcgctgcgagaagctcaccttcaacaaccccaccacggagttccggtacaagctcctgcgggccggcggggtgatggtaatgcccgaaggagcagacacggtgtccaggcccagtcccgactaccccatgttacccacaattccactctctgccttctctgaccccaagaagaccaaaccatcccacggctccaaggacgccaacaaggagagcagcaagacctccaagccacacaaggtgaccaaggagcaccgggagcgnccccgcaaagactccgagagcaagagctcctccaaggagctggagcgtgagcaggccaaaagctccaaggacacctcgcggaagctgggcgagggccggctgcccaaggaggagaaggcgccaccgcccaaggctgccttcaaggaacccaagatggccctgaaagagaccaagctggaaagcacgtcccccaaccctgggcccccacccccacccccacccccaccccgggcttccagcaagcggccggccaccgccgactcgccaaagcccagcgccaagaagcagaagaagagcagctcgaaggggtcccggagtgctccaggcacctcgccccgcacctcctcctcctcctccttctcggacaagaagccggccaaggacaagagcagcaccagaggggagaaggtgaaggccgagagtgagccccgggaggccaaaaaggccctggaggtggaggagtccaactcagaggacgaggcctccttcaagtccgagtctgcccagtcaagcccgtccaactccagctccagctcagactccagctcagactcagacttcgagccatcccagaaccacagccaaggacccctgcgctccatggtggaggacctgcagtccgaggagtccgacgaggacgactcttcgtcaggcgaggaggctgccggcaagaccaacccggggagggactccaggttgagcttcagcgacagcgagagtgacaacagcgccgactcctccctgcccagccgtgagcccccacccccccagaagccacccccgcccaacagcaaggtgtcaggccggaggagccccgagtcctgcagcaagcctgagaagatcctcaagaagggcacctacgacaaggcctacacggatgagctggtggagctacaccggaggctgatggcgctgcgggagcgcaacgtgctgcagcagattgtgaatctgatcgaggagactggccacttcaatgtcaccaacaccaccttcgacttcgacctcttctccctggacgagaccaccgtgcgcaaactgcagagctgcctggaggccgtggccacatgaccctgggccgcgtgccgggcccccaccgccggggtcctgggaggctgcagccaggcctcgcctgccctcctctcccgtctcgcctgcttcatttggatatcagagctatggctcagaaaagcaagcatct

SEQ ID NO: 59281 - DNA, 364 bp, Homo sapiens
ctaccccatgttacccacaattccactctctgccttctctgaccccaagaagaccaaaccatcccacggctccaaggttagtgaggcggaaggcccagtcgcgtgggagcgccggggcccagctgtggtgggtctggccccggcgccctccctccactgggctgggccttccgcacctgctcgctcccttggcgtcttcctctttgagctctctgcacacccctcgctgcgcactgccgcttccctaggatttcaggaataagcccgtgatcatgggctctttgccctgttcatcttgaggccagagaccctgcctagtcctctcccgttctgccaagtgatggcagggccccaggactgctcg

SEQ ID NO: 59282 - DNA, 438 bp, Homo sapiens
gatgtggtggtgttcctctagttccagctaccagagaggctaaggcacaagaattacctgagctgtgggaaccagaggttgcagcgagccaagatcatgccactgcgctctgccctgggcaacagagtgagactccatctcaaaataaataaaataaaattccatttgtgagggaaaacttaactatctaaattaacgaatgtaaatttagttgcagtgatagtctcgtgtcaaagaaaagacaaatctcatgtaaaaacaaatagtaagagagaataatttcttggccatctctaacactgatggaaaggctgagcatatgtttaatgaattgtcacagaattccctgttcagatggacactgctttctcaaattaaacttgttattccttaattacagcagtcacaggaaataaagcactatctctcaggcaatat

SEQ ID NO: 59283 - DNA, 265 bp, Homo sapiens
ggcattttcatcagatgttcatggctggaccatgtaaacatgtacaagtcattttttccagctgatgaaatgaaagctaagactgagcctttgtcggttcccctgctgcctcaaaacttgtatttctggtgactgtataaggaatgtggctcctggctgaagttgactctctctgtggctgggcccactgggcatacttgagaagaaagcaaggagaacacatggaaagattttcaaagaaaagttatgaagttcattttcactg

SEQ ID NO: 59284 - DNA, 614 bp, Homo sapiens
caggcgccaaggctctggcagttggccagcacaccactacgcatgtgtgtcaactctagggttgggtgctggggttgcggctttcggttaacaccgcagattggaacaggctgagatctgctggagacaacttaggaaattatcatagtgaaaatactaacatggattgttgatcatctgatgctatgattctttcccaggcaccacacctgttggtgttcagatggagcggcacactagtcatcctaacagaaaagttccagccaaagaggaagctaatgctgtgcctctctgtagagcaaaaccctcccccagctatattaatcttcaagcaagttccccaccagccacttttctgaacatccagacaacaaagctgccctcggttgatcacaagcccaaggaatgcctaggactcctggaatgtatgtatgcaaacctccagcttcagacccagctcgcccaacaacagatggctgttttggaacatttacaggcatctgtgacacaactggctcctgggaggggaagcaataactcttctctcccagccttatctcctaatccattgttaaatcacctgccccaattcagtaaatgaattgtggaacaaa

SEQ ID NO: 59285 - DNA, 513 bp, Homo sapiens
caggcgccaaggctctggcagttggccagcacaccactacgcatgtgtgtcaactctagggttgggtgctggggttgcggctttcggttaacaccgcaggcaccacacctgttggtgttcagatggagcggcacactagtcatcctaacagaaaagttccagccaaagaggaagctaatgctgtgcctctctgtagagcaaaaccctcccccagctatattaatcttcaagcaagttccccaccagccacttttctgaacatccagacaacaaagctgccctcggttgatcacaagcccaaggaatgcctaggactcctggaatgtatgtatgcaaacctccagcttcagacccagctcgcccaacaacagatggctgttttggaacatttacaggcatctgtgacacaactggctcctgggaggggaagcaataactcttctctcccagccttatctcctaatccattgttaaatcacctgccccaattcagtaaatgaattgtggaacaaa

SEQ ID NO: 59286 - DNA, 1414 bp, Homo sapiens
  misc_feature (690)..(690): n is a, c, g, or t
  misc_feature (704)..(704): n is a, c, g, or t
  misc_feature (706)..(706): n is a, c, g, or t
  misc_feature (714)..(714): n is a, c, g, or t
  misc_feature (716)..(716): n is a, c, g, or t
  misc_feature (724)..(725): n is a, c, g, or t
  misc_feature (751)..(752): n is a, c, g, or t
caggcgccaaggctctggcagttggccagcacaccactacgcatgtgtgtcaactctagggttgggtgctggggttgcggctttcggttaacaccgcaggtgaggtcgttaaactgtgtattgcgactcggctcctatcggaccgtgaaggctaagaaaggcttcacagttcccactcttttggtctagccttagcaacaggtggactagagaggcgggactccagccagcacatgggggaaagacctgccggcttggcgcagggtgaagtgggagttgtagtcttaccgggccggactgcgcagcctttttccgggcacactgggagttgtggtttatcgcctctggactaatggctgtatgtggacttttcccttcttaggaaatgctttcagtgaggctgtgagcagtaccggagggtgatggcttgcgtttccttaagttatcctatctaaaatattttcccaagtatttccgccgggcgctgtggctcacgcctgtaatcccagcactttgggaggccgaggcgggtggatcacctgaggtcaggagttcgagaccagcgtggccaacatggcgaaaccccgtctctactaaaaatacaaaaattagccgggcgtggtggcgcgcgcctgtaatcccagctactcaggaggctgaggcaggagaatcgcttgaaccctggaggcngaggttgcagtgancngagatcgngncactgcannccagcctgggtgacagagcgagactnngtctcaaaatataaaaagaaaaaaaataagggatcttccaaaaggaaaaggtgaccagtcgagaaatctgggaaaacccaactggttagtgggaaagagtacaacgccggggacacggagggaacgattacatctaagatcagtgagattggaacaggctgagatctgctggagacaacttaggaaattatcatagtgaaaatactaacatggattgttgatcatctgatgctatgattctttcccaggcaccacacctgttggtgttcagatggagcggcacactagtcatcctaacagaaaagttccagccaaagaggaagctaatgctgtgcctctctgtagagcaaaaccctcccccagctatattaatcttcaagcaagttccccaccagccacttttctgaacatccagacaacaaagctgccctcggttgatcacaagcccaaggaatgcctaggactcctggaatgtatgtatgcaaacctccagcttcagacccagctcgcccaacaacagatggctgttttggaacatttacaggcatctgtgacacaactggctcctgggaggggaagcaataactcttctctcccagccttatctcctaatccattgttaaatcacctgccccaattcagtaaatgaattgtggaacaaa

SEQ ID NO: 59287 - DNA, 873 bp, Homo sapiens
caggcgccaaggctctggcagttggccagcacaccactacgcatgtgtgtcaactctagggttgggtgctggggttgcggctttcggttaacaccgcaggtgaggtcgttaaactgtgtattgcgactcggctcctatcggaccgtgaaggctaagaaaggcttcacagttcccactcttttggtctagccttagcaacaggtggactagagaggcgggactccagccagcacatgggggaaagacctgccggcttggcgcagggtgaagtgggagttgtagtcttaccgggccggactgcgcagcctttttccgggcacactgggagttgtggtttatcgcctctggactaatggctattggaacaggctgagatctgctggagacaacttaggaaattatcatagtgaaaatactaacatggattgttgatcatctgatgctatgattctttcccaggcaccacacctgttggtgttcagatggagcggcacactagtcatcctaacagaaaagttccagccaaagaggaagctaatgctgtgcctctctgtagagcaaaaccctcccccagctatattaatcttcaagcaagttccccaccagccacttttctgaacatccagacaacaaagctgccctcggttgatcacaagcccaaggaatgcctaggactcctggaatgtatgtatgcaaacctccagcttcagacccagctcgcccaacaacagatggctgttttggaacatttacaggcatctgtgacacaactggctcctgggaggggaagcaataactcttctctcccagccttatctcctaatccattgttaaatcacctgccccaattcagtaaatgaattgtggaacaaa

SEQ ID NO: 59288 - DNA, 678 bp, Homo sapiens
caggcgccaaggctctggcagttggccagcacaccactacgcatgtgtgtcaactctagggttgggtgctggggttgcggctttcggttaacaccgcaggtgaggtcgttaaactgtgtattgcgactcggctcctatcggaccgtgaaggctaagaaaggcttcacagttcccactcttttggtctagccttagcaacaggtggactagagaggcgggactccagccagcacatgggggaaagacctgccggcttggcgcagggcaccacacctgttggtgttcagatggagcggcacactagtcatcctaacagaaaagttccagccaaagaggaagctaatgctgtgcctctctgtagagcaaaaccctcccccagctatattaatcttcaagcaagttccccaccagccacttttctgaacatccagacaacaaagctgccctcggttgatcacaagcccaaggaatgcctaggactcctggaatgtatgtatgcaaacctccagcttcagacccagctcgcccaacaacagatggctgttttggaacatttacaggcatctgtgacacaactggctcctgggaggggaagcaataactcttctctcccagccttatctcctaatccattgttaaatcacctgccccaattcagtaaatgaattgtggaacaaa

SEQ ID NO: 59289 - DNA, 772 bp, Homo sapiens
caggcgccaaggctctggcagttggccagcacaccactacgcatgtgtgtcaactctagggttgggtgctggggttgcggctttcggttaacaccgcaggtgaggtcgttaaactgtgtattgcgactcggctcctatcggaccgtgaaggctaagaaaggcttcacagttcccactcttttggtctagccttagcaacaggtggactagagaggcgggactccagccagcacatgggggaaagacctgccggcttggcgcagggtgaagtgggagttgtagtcttaccgggccggactgcgcagcctttttccgggcacactgggagttgtggtttatcgcctctggactaatggctgcaccacacctgttggtgttcagatggagcggcacactagtcatcctaacagaaaagttccagccaaagaggaagctaatgctgtgcctctctgtagagcaaaaccctcccccagctatattaatcttcaagcaagttccccaccagccacttttctgaacatccagacaacaaagctgccctcggttgatcacaagcccaaggaatgcctaggactcctggaatgtatgtatgcaaacctccagcttcagacccagctcgcccaacaacagatggctgttttggaacatttacaggcatctgtgacacaactggctcctgggaggggaagcaataactcttctctcccagccttatctcctaatccattgttaaatcacctgccccaattcagtaaatgaattgtggaacaaa

SEQ ID NO: 59290 - DNA, 867 bp, Homo sapiens
caggcgccaaggctctggcagttggccagcacaccactacgcatgtgtgtcaactctagggttgggtgctggggttgcggctttcggttaacaccgcaggcaccacacctgttggtgttcagatggagcggcacactagtcatcctaacagaaaagttccagccaaagaggaagctaatgctgtgcctctctgtagagcaaaaccctcccccagctatattaatcttcaagcaagttccccaccagccacttttctgaacatccagacaacaaagctgccctcggttgatcacaagcccaaggaatgcctaggactcctggaatgtatgtatgcaaacctccagcttcagacccagctcgcccaacaacagatggctgttttggaacatttacaggcatctgtgacacaactggctcctgggaggggaagcaataactcttctctcccagccttatctcctaatccattgttaaatcacctgccccaattcagtaaatgaattgtggaacaaaaaaaaaaacaaaaaaaaaaaaaagaaaaaaaaaagagaacaaagcaaacaaaaaaacacagcgaaaaagagaaaaaaaaaaaaagggggggggggcccgaccaaaaaactactccggcggggaggccacgaacggagctgcagcagacccccattctgtcggtgacgagcaggggccccacacagagagcgagggccataaaaaacagagcgagcgaacgcgggacgccccatatcacacacgcactgctcggtgggaggcaacacagctgctcgcggcgacgatactatgtagagcgaaagaccacccacccgggccggggggagaacatcgaacgcgcagcaccacaccata

SEQ ID NO: 59291 - DNA, 665 bp, Homo sapiens
attggggccttactatgatgcctaattctacattaaactgatgtcagtcatgtcattcatttcatccagtttacttgtttacataataattctgaatgtgagctagataagcatctgacctgacattttttaaaaaatggctccatgatcttatgttttggttaactagcataactttatctagcttaacttctctaaaccaggtatctatttttaatctgtgtacttctcagctggagacatttgacaacatttgcaggtatttttagttatcacaacagggggagggctgctaccagcacctagaggccagggatggtgacaagcatcttatagcatgcaagatagccctccacacgaaagaatgatcagacccacaatatttatagtgccaaggttgagaaaccctggactagataatcattaagatcttgccttactctaaaggattgtgattatttttttaagttgccataataaagaataaatacatattcagaacatacctggcaatgtagtcataaacatctgttctaaggtatgtttaaccaaggagtgatggtgcaaagttttacatttcttattccccaatagttttcaatccagtatttttgttgcatgataaatattctataaatttcacacacaaatatatggcctttcaa

SEQ ID NO: 59292 - DNA, 320 bp, Homo sapiens
tcttcaatcctcactactatggggactgtgtcagggagtggggcatgggctttggtgtcaaatggtcctggattcaaatcttggctgcttctctacttggccgagggaacttgagtgtccagcttctttatttctctgagcctcagaaccctcctctgtaaaaccaggaccatcacaggcccagccttacaggactgctgggaatttgaggagctcccaaaaactacccaaagtagctcctggtgtatagaaagtgctcagtggatgatgcgatgatgtttttttcccccttgcctgacatcctcattttacaggcaaga

SEQ ID NO: 59293 - DNA, 307 bp, Homo sapiens
acaacagacacccaagtattcctaaatgacatgtttttttgtgtgttctccattttgaatttgttatacgtttagtaattttacctttgtctggaacttttgtctggaacctttttctcctcttctttaacttgtctaattcgaaatgcctccttcacttattacctaagagcctgaaaatatgcaagtggtcgggtttggtaatcttgcaatttgtaagcttctttgccctttcatattttggggtttttcttcctcatatatctctctcaagatttttgctcagtgccaggtactttgggggtat

SEQ ID NO: 59294 - DNA, 406 bp, Homo sapiens
ctttttcttaatatattaatatttaccaaggcaagacagtgatttatggacatttaaattagtttagctttgttctgctgttctaaaacattgtgtactgtctgatagacttttaaaaaacagtgcttttccaggatgatttatgatatgcagtattgtttatagatgcccatggcttaaccttgaaaagtcaattaagtgacacaattaagagagatatgaatagtggtagaaaaagcatgtactctggataagtgggggtaaatctagtatttgttattcctgtcagtaatattgtcattagtattttttagaggtttattttttatggttataaattcatgtcactcttctgcaatggttacatcagtggaatgcagaaattatcatgctttggggattaaaa

SEQ ID NO: 59295 - DNA, 498 bp, Homo sapiens
gaaaattatggataatgaaagaacttaagatttttagaacgagtaagagcaaaatcacagcgaaattaagcagttttagtatgtcacattatcctaaagaggatgaagagcctggattatgtaatggggtagtaagaatgacaaagttatatgatttagtggaagagattgcaagggatagttctatagcttctatttaaataggtcactgataaatacattatgtctttctgttaaatctgtattaggaaattctgttcataattccttctaggaatttctgtgtgttatgttcagttttcagtggaaaagtttcaaataataaaaatactacatacctatactagtttctgcttgttctgtttgtatactttaactttttttagaatataatacaaccttattgctaaaaaccacaactggtaagatatcttgggtaaataagccttactattgcccctaaccttaccttaattttcaatcaaaagactaacaaag

SEQ ID NO: 59296 - DNA, 687 bp, Homo sapiens
tccttgcaaaagttgttcacccacaagagacagattttgtaaaatttaaaatgtagctaattttccatgtgattaggcagtgtaatttaaagaaactcaagattttctacaaataattttttgaggcaagaagatgctaaagtcacttgtactgccactaaactttactaaaagttggtttgaacactttaattgcttttgaatagatgattgaagctgtgaagaggtggcagcagctgacatgttgccatggtagcatttcctccccagctgaggaggctatacagaagaaaggatataggtcagaaagtgtttatactgacaaaacaaccacattttaaaatcaaatgcttttgtaaacatccataagccaaatgagagttgtgaaatctagtttcaggatattaaagacagactgatttatctttaggatgatgtatcaagctgtactgtgagaatggagcattcaaggtcaagaatactctccttcctgcatattggcaattcaattttaaaagattgaaacacgatgaaagtgtttctatcagtttcttctgtgttccttgcaataaggatatatttaattgaaaaattcttcttgaaggtagttcatctctgaataaactactccagggtaaggaagatcaactctatgatcaataaatatctgttggttaattagtcttg

SEQ ID NO: 59297 - DNA, 202 bp, Homo sapiens
tttttacactgcctcctagaagcttgcattttacaacaattggaaaatcagaaaaagaacaaagatgctgcacaacacctggaccacaagaagtttcctcctttccttcagatgtgcacagcgacctttgaacagtagccagtgcatttagagagctctacttcacagtgaaacatggggcctcaggccctgatcacatttt

SEQ ID NO: 59298 - DNA, 1605 bp, Homo sapiens
ctcccggagcagaaccgctccccgccggctgtccgcaacctccgccagcgtcggtccctgggcaggtgtgggtggaatgcatccttgggacatctttgcatagccccatctaggaagaagttctgtgatgtgtgaactgtgagtttactcaaacaagtccaactctttataagacataggtagacgtcaggtctggaatggaagagccaacagcagtagaaggccaggtccagcttccaagcccccaccagggctctctcaggaaggctgtggctgctgccctggcgctggatggggaatccacaatggggcacaggaaaaagaagaggaaagagtcacgcccagaatccatcatcatctaccgctcagacaatgagaaaacagatgaggagcccggagaatcagaaggtggagatcagcctaaagaggaggagggagatgatttcctagactatcctgtggatgatgatatgtggaacctgcctctggacagccgctacgtcaccttaactgggaccatcacacgagggaagaaaaagggtcagatggtggacatccatgtcacattgacagagaaagagctgcaggaactgaccaaacctaaagagtcatcaagggaaacgacgcctgaaggaagaatggcctgccagatgggagctgaccgtgggccccatgtggtcctctggacgctgatctgcctgcctgtggttttcatcctttcttttgttgtctctttctactacggcactatcacctggtacaacatcttcctcgtgtataatgaggaaaggaccttctggcacaagatctcgtattgcccttgcctcgttctcttctatccagtgctcatcatggccatggcttcttccctcggcctctacgctgctgtggtccagctctcgtggtcctgggaagcatggtggcaagctgcccgggacatggagaaaggcttctgtggctggctctgcagcaagctgggtctggaggactgttctccctacagcattgtggagttgcttgaatccgacaatatctcaagcactctctccaacaaggaccccatccaagaagtagaaacctccacggtctaaactcccaacaacttactccctcctctggccccagtagcctatatatcatcttaaaattccagcagattatttctttaaattaccccctactctccgcagttcttctgggaaatcagagtccatactgatcagttttaccatcttgagggttccaggagggcatggagcagacaagcaattgtgccaaagcagttcacccaatggacaaactctttttgattccctgccctaaaatcaccatttatttaggacaatggaactctgctgtgtgtcgttttgggagcctggaagtgttactggtgcctggaactgaggggagtatgtgactaaatgtgtcagggagaataaagaacctcggggtaaccaaatccaccaagataatagacagggatggagtgagacatttaggaagctggactaccacagtgtagcagaaggtaaagatttgtgtgtatcatttagatttagatttagctgcatagaattaaaaccctaaaatatcagtggcttaaac

SEQ ID NO: 59299 - DNA, 992 bp, Homo sapiens
ctcccggagcagaaccgctccccgccggctgtccgcaacctccgccagcgtcggtccctgggcaggtgtgggtgagactgctcgttcgtttctttaaatttcgatgccattggggagggtggaagggaaatgcaaaaaaaaaaaaagaagaagaaagaaacaagcagggtgtgctctatttcaaaaattcaatcctcagggctgaagctctcacgattaattaaaattaaatctccagtgcagctggaaaaagaaaggctgctgctcggcgccctcgctgcgcccgcctgccggggtcggacgtcggcgatgctgtggctccaggtgctgtgtgccgctggctgggaaggggagaaagggcaggcttagctgagggggagaaatgcggctttcagatcctttcatccttcgggagggagcccgggaaagagagtgaaggggaagaggagatgcggttgcagttttccacagaaccaagagaataaacgatttgaaaaaataaactcaggcccacctccgtctcacctcccactccccacccaagaatcaaggggaaagatcatctttaccaggtttgagacctgatccatttcagctgagctgcatagcgagtccagaagaggatctttccttgaagggtgcacgcttcctgcaagatgcatctgtaggtgtttgagatcatgtcctgtagttcattccttgtgcaggagggtgagcccgctgaggatggggaaaatttctcgtctgtgttatggtgcccagtaacagtgatttattattcagatctgctccttatttttcatcttgcttcccgctctgaacccaccagagtgagattacacctggactggcctactgagacttcaccctaagaacttggtcgaatgtgccagttgctgtggtcttaacaatccagatgggatgctatttctaaggctgttgtcagagtgttgcattttccccggacaggtattaaaataatataaaggcaa

SEQ ID NO: 59300 - DNA, 1905 bp, Homo sapiens
ctcccggagcagaaccgctccccgccggctgtccgcaacctccgccagcgtcggtccctgggcaggtgtgggtggaatgcatccttgggacatctttgcatagccccatctaggaagaagttctgtgatgtgtgaactgtgagtttactcaaacaagtccaactctttataagacataggtagacgtcaggtctggaatggaagagccaacagcagtagaaggccaggtccagcttccaagcccccaccagggctctctcaggaaggctgtggctgctgccctggcgctggatggggaatccacaatggggcacaggaaaaagaagaggaaagagtcacgcccagaatccatcatcatctaccgctcagacaatgagaaaacagatgaggagcccggagaatcagaaggtggagatcagcctaaagaggaggagggagatgatttcctagactatcctgtggatgatgatatgtggaacctgcctctggacagccgctacgtcaccttaactgggaccatcacacgagggaagaaaaagggtcagatggtggacatccatgtcacattgacagagaaagagctgcaggaactgaccaaacctaaagagtcatcaagggaaacgacgcctgaaggaagaatggcctgccagatgggagctgaccgtgggccccatgtggtcctctggacgctgatctgcctgcctgtggttttcatcctttcttttgttgtctctttctactacggcactatcacctggtacaacatcttcctcgtgtataatgaggaaaggaccttctggcacaagatctcgtattgcccttgcctcgttctcttctatccagtgctcatcatggccatggcttcttccctcggcctctacgctgctgtggtccagctctcgtggtcctgggaagcatggtggcaagctgcccgggacatggagaaaggcttctgtggctggctctgcagcaagctgggtctggaggactgttctccctacagcattgtggagttgcttgaatccgacaatatctcaagcactctctccaacaaggaccccatccaagaagtagaaacctccacggtctaaactcccaacaacttactccctcctctggccccagtagcctatatatcatcttaaaattccagcagattatttctttaaattaccccctactctccgcagttcttctgggaaatcagagtccatactgatcagttttaccatcttgagggttccaggagggcatggagcagacaagcaattgtgccaaagcagttcacccaatggacaaactctttttgattccctgccctaaaatcaccatttatttaggacaatggaactctgctgtgtgtcgttttgggagcctggaagtgttactggtgcctggaactgaggggagtatgtgactaaatgtgtcagggagaataaagaacctcggggtaaccaaatccaccaagataatagacagggatggagtgagacatttaggaagctggactaccacagtgtagcagaaggtaaagatttgtgtgtatcatttagatttagatttagctgcatagaattaaaaccctaaaatatcagtggcttaaacaagatagaagtgtatttctttcttgtgcagaagaagtctggaggcagaccatcctgggaccctgtgaagtaatccaggtcccaggcttcttctatttctctaccattagtaggatgtgacccttctcacccttatccccaacatcccagtgctgattacatcttcagccatcacatccatgtttctgataaaatagaggaaagggcagagaagcacacacccttcctgttcaaggagacttcccagaagtcccactcgattcttcttatatctcattggcaagacctcagtcacatgatg

SEQ ID NO: 59301 - DNA, 333 bp, Homo sapiens
acccatactggatggagtcttgaaacacgaggggaataagacagagaagaacgcgcccggtcttggggaggtataacacatatgcaataaggtgatgacatatcaccgttagataataatcgcagacaatgaagagtgtgtattcttctcagctcacatacaatctgatagcccagttcactcttccctccaatggtttttactccatcctctttctggtcccaccatcaattaccttggagacagtaggaaatgaaaaagaaaagaggtggaggtaagagagaggaaagacaagtgggaacccagggctcaactagtctgcacctcctcaac

SEQ ID NO: 59302 - DNA, 358 bp, Homo sapiens
ggaaaacatctcaggagattgtctatgaaaattaccccaacctctatagaaaggccaatgtttaaattcaggagatgccaagaactcctgtgaaatgctacgtgagaagaccatctccaagacacatagtcattagattctgcaagaaaaaaatattaaaggtaactagagagaaagatcaggttacctacaaagggaacctcaacaagctagcagtgaaccgttcaggagaaacactacaagccagaagagatcaaaggcctatattcagcattcttaaagaaaggaatttccaaccaagaattttatatccagcaaaattaagctttataagcaagggagaaacacgatcttttta

SEQ ID NO: 59303 - DNA, 233 bp, Homo sapiens
aaactataaaacattgctgaaagaaattaaaggagacataaacgggaacacatcgcatgttcatgtgttgaaaaacaatattgttaagatgtcagtactgctcagagcaattacagatttaatgcaagtcatgtcaatatcccaatgaaattttttgcagatatagaaaaacccattccaaacttcatatggaatcccaagggacattgaatagccaaaacaatgtataagaa

SEQ ID NO: 59304 - DNA, 520 bp, Homo sapiens
acgtgaaggaataaaaaattagaatatcttatttttggagaccctaatgagcatcagtggttgctaacatcacaaaaagacacaaccagatattacgtgccttgtgatggaagtattctgtgactacctgtcaagttattcctcccaccccatcaacaaaatggcaaacttaaatctgaacaggccttaagagctagctatcaattgacaggaaaaacagagacagaagaacatattaaccaataccacagagatgcaattagctaaatccaaaccaaggtacatcattaaaggccaaatggcccagtttcttcaacaaataaaactgcaagaaaaaaaaaaagtggagtctggggagaggggacagcagccccacaatttcatcagcaccccaaacttcttctatctttctgttcctccatcgtccttacagtgagactcccaccattatggtcaagagccagctgctacatctccagatactgtatccgtgtgtattccacgtctaggaaggaagaag

SEQ ID NO: 59305 - DNA, 346 bp, Homo sapiens
tggtcagggttatagcttagctcagcatgggtgcagacagattttcttactttttttttcatatcgcttctcagtatcatacctaagtgaagctgcaaggcatctaaggaacacaaactatttcagttgatctgtgagactgccagttcaagctattatagcaacaccttgagagtaaatggacatgtgtgcgtgtatcaatttttcaaagaatgatcacaaatactacccatattctcaagattaaataaataatctggccaaagtgctgggattacaggcgtgagccaccatgcccggtcctgatgtgatcatttcttgaggcagacattcccttttgttttgg

SEQ ID NO: 59306 - DNA, 387 bp, Homo sapiens
cttgtataaggatttaagactaaggctcagggacagcaaatattctatttgctaaaactaagccacatgcacacaccaagcaagagagccagggaagtggataggcacaggcagtcagtccacagaagaatgaatcaaagtgctgaactttcatagaaaaatctgttaagattcatgggtggtaaagaaaatacaaattaaaataacacaggaatgtcaccagaaaaaccatcaaataggtagcatttaaagatatctataggacttattgtttctagtgttctctcatatatttctggtgaagaataatttattgtagagctttttgaaacaatctgacaatttatattgcaattaattgtacttatgccatctgaccaaacaatg

SEQ ID NO: 59307 - DNA, 3574 bp, Homo sapiens
gaaaggtcacagcgcggcagcgggtctggctggcggcagcggcgggagggagccgagagacccgagtgcacgtgtggagaagcggcggcacaagcgcggcggcgggagacactcccgcccccaccagactcaagccctcactcgactctcgcggccttcgttgctcgcacagctccctgcccaggctaggaggccggcttgcggggttgagtggcccgagctaagggtgcggagacctaagggcggcgactacgacggcgttgatatcggtggtaacgacggcctcagcaggcggggaagatgaaaggtagccggatcgagctgggagatgtgacaccacacaatattaaacagttgaaaagattgaatcaggtcatctttccagtcagctacaatgacaagttctacaaggatgtgctggaggttggcgagctagcaaaacttgcctatttcaatgatattgctgtaggtgcagtatgctgtagggtggatcattcacagaatcagaagagactttacatcatgacactaggatgtctggcaccttaccgaaggctaggaataggaactaaaatgttaaatcatgtcttaaacatctgtgaaaaagatggtacttttgacaacatttatctgcatgtccagatcagcaatgagtcggcaattgacttctacaggaagtttggctttgagattattgagacaaagaagaactactataagaggatagagcccgcagatgctcatgtgctgcagaaaaacctcaaagttccttctggtcagaatgcagatgtgcaaaagacagacaactgaacaaattacaaatgaactttcttgcacttgcttgtcgccaaataaaagagaggcccattgattcctcccccaccccaacacttttcttttaaagcttttctccctccttgttcttgtttttctttcttcctttccttttctctgagagttttaatactttcaaggactttaaaaaaataatcatgtttgaattgttttctcttatttttgtgaggtggtttgaaggaaggacaaggtagatctgtttagttttgcagttgaagttagatggtcctaaacatttaattgtcaaataatttcaaatttaatgtcctgctttcacattgaagggcagagcctacaaaacattgtatatttcaaaagacaaaaagaagcagcagcagtatcttgttctctaattcatagacaagttgagtgtgtttgtggtactttgggtttttaaacactttgggatactaatccctagacattgccttcactccacctttagtccttctgagcactctctcgggagttggaacattgttatccttgtaagaaatactaagcttatgttgatttttaagtaattatatcttctcttcttgctggtgggtggggcagtttggtttagtgttatactttggtctaagtatttgagttaaactgcttttttgctaatgagtgggctggttgttagcaggtttgtttttcctgctgttgattgttactagtggcattaacttttagaatttgggctggtgagattaattttttttaatatcccagctagagatatggcctttaactgacctaaagaggtgtgttgtgatttaattttttcccgttcctttttcttcagtaaacccaacaatagtctaaccttaaaaattgagttgatgtccttataggtcactacccctaaataaacctgaagcaggtgttttctcttggacatactaaaaaatacctaaaaggaagcttagatgggctgtgacacaaaaaattcaattactgtcatctaatgccagctgttaaaagtgtggccactgagcatttgattttataggaaaaaatagtatttttgagaataacatagctgtgctattgcacatctgttggaggacatcccagatttgcttatactcagtgcctgtgatattgagtttaaggatttgaggcaggggtaattattaaacatattgcttctattcttggaaaaatagaagtgtaaaatgttaataatacaaatgtcactgtgacctcctccactgagaggactggtttatgccagatcattttccggcacacacggagtggctttgacagattgataactttgtaagatgggagacatctgaaatattcatgttttccttttgtagtcccatctccactatttagaaatgttctcagactttaaaataatgcacagggcttgagctttctgtcatttgactttaaaaggaagtttcattcatatttatcctcttatgtaaaattgcggtataaagtctcatttccaaatatgttaaatgacaaaattattttataaaatgtttatgcacactttataaccttaagtttttatttgagaatgtgaaagtacaaagtgcagtagacttcaacaatcttgagtgccaagaataatacagaaaaagaagacagttgatgaatgagtttatagggttctaatcttaagatggtaaaaatgtagaaagaccttgctggttttttgggggtattcgtttcttaaacaatccaaatctaagcttagaagaaaagtttagcgttaagcacctttatcttcatgaataagcttcagcttgctcttggcaagagaagagtgcttgagttacagaaggcataagtagtttgaagaatgcagcagcctttttgtaaacttcccagatatcaaaatagactttgatatataaatggttttctgagatgacactgcctctatttctataaccatttcacctggactatctaatcagtcctatgaatgtatccctaaatgtggttattgaaaacctaatagctgcctcatgacaagtacatgttatttaaggaggaaaaaatattaaattttgaattgagtgtgtaggctccctatcattatatatagagtttctttttccacggtagtcagtgacttaacctgaattgtaaatgtttgtaaagggttaattgtcctacatcaaacttagttaaataattccatccacttatggaggaggaggagaatgtggaagaggtaaaaagctgggcacaagttcatatgcctatgagtcagtaaagactgaagtaatgtcctatgttgagctggttattttgatatatgataataattatctttgaagtagaacaattctgttaactggaaaatcacaggatatatccatcatatttttcaggacagatagtttttactgtggggcaaataggttaaaattacactatgttagttgcatttaggttttaaagcaaagaatctgtagagaaatctatgcaatatatagtttgtccagattagctttcatttggggaatgaagttctgaaatatctaaagcagtttactcatcaattgaaaagtcctccaaaaagagaactattgggaaaccatggtgtggtggtggaaaagaaaagctccctcagttttttggagggaataacttaaaaaaatacttaaatggctaagtttacttggtgcagttaagaattaaacttgtcaattttaacattgctgttacatctgaaataaacttatgtgatgttctg

SEQ ID NO: 59308 - DNA, 3700 bp, Homo sapiens
  misc_feature (3577)..(3578): n is a, c, g, or t
gaaaggtcacagcgcggcagcgggtctggctggcggcagcggcgggagggagccgagagacccgagtgcacgtgtggagaagcggcggcacaagcgcggcggcgggagacactcccgcccccaccagactcaagccctcactcgactctcgcggccttcgttgctcgcacagctccctgcccaggctaggaggccggcttgcggggttgagtggcccgagctaagggtgcggagacctaagggcggcgactacgacggcgttgatatcggtggtaacgacggcctcagcaggcggggaagatgaaaggtagccggatcgagctgggagatgtgacaccacacaatattaaacagttgaaaagattgaatcaggtcatctttccagtcagctacaatgacaagttctacaaggatgtgctggaggttggcgagctagcaaaacttgcctatttcaatgatattgctgtaggtgcagtatgctgtagggtggatcattcacagaatcagaagagactttacatcatgacactaggatgtctggcaccttaccgaaggctaggaataggaactaaaatgttaaatcatgtcttaaacatctgtgaaaaagatggtacttttgacaacatttatctgcatgtccagatcagcaatgagtcggcaattgacttctacaggaagtttggctttgagattattgagacaaagaagaactactataagaggatagagcccgcagatgctcatgtgctgcagaaaaacctcaaagttccttctggtcagaatgcagatgtgcaaaagacagacaactgaacaaattacaaatgaactttcttgcacttgcttgtcgccaaataaaagagaggcccattgattcctcccccaccccaacacttttcttttaaagcttttctccctccttgttcttgtttttctttcttcctttccttttctctgagagttttaatactttcaaggactttaaaaaaataatcatgtttgaattgttttctcttatttttgtgaggtggtttgaaggaaggacaaggtagatctgtttagttttgcagttgaagttagatggtcctaaacatttaattgtcaaataatttcaaatttaatgtcctgctttcacattgaagggcagagcctacaaaacattgtatatttcaaaagacaaaaagaagcagcagcagtatcttgttctctaattcatagacaagttgagtgtgtttgtggtactttgggtttttaaacactttgggatactaatccctagacattgccttcactccacctttagtccttctgagcactctctcgggagttggaacattgttatccttgtaagaaatactaagcttatgttgatttttaagtaattatatcttctcttcttgctggtgggtggggcagtttggtttagtgttatactttggtctaagtatttgagttaaactgcttttttgctaatgagtgggctggttgttagcaggtttgtttttcctgctgttgattgttactagtggcattaacttttagaatttgggctggtgagattaattttttttaatatcccagctagagatatggcctttaactgacctaaagaggtgtgttgtgatttaattttttcccgttcctttttcttcagtaaacccaacaatagtctaaccttaaaaattgagttgatgtccttataggtcactacccctaaataaacctgaagcaggtgttttctcttggacatactaaaaaatacctaaaaggaagcttagatgggctgtgacacaaaaaattcaattactgtcatctaatgccagctgttaaaagtgtggccactgagcatttgattttataggaaaaaatagtatttttgagaataacatagctgtgctattgcacatctgttggaggacatcccagatttgcttatactcagtgcctgtgatattgagtttaaggatttgaggcaggggtaattattaaacatattgcttctattcttggaaaaatagaagtgtaaaatgttaataatacaaatgtcactgtgacctcctccactgagaggactggtttatgccagatcattttccggcacacacggagtggctttgacagattgataactttgtaagatgggagacatctgaaatattcatgttttccttttgtagtcccatctccactatttagaaatgttctcagactttaaaataatgcacagggcttgagctttctgtcatttgactttaaaaggaagtttcattcatatttatcctcttatgtaaaattgcggtataaagtctcatttccaaatatgttaaatgacaaaattattttataaaatgtttatgcacactttataaccttaagtttttatttgagaatgtgaaagtacaaagtgcagtagacttcaacaatcttgagtgccaagaataatacagaaaaagaagacagttgatgaatgagtttatagggttctaatcttaagatggtaaaaatgtagaaagaccttgctggttttttgggggtattcgtttcttaaacaatccaaatctaagcttagaagaaaagtttagcgttaagcacctttatcttcatgaataagcttcagcttgctcttggcaagagaagagtgcttgagttacagaaggcataagtagtttgaagaatgcagcagcctttttgtaaacttcccagatatcaaaatagactttgatatataaatggttttctgagatgacactgcctctatttctataaccatttcacctggactatctaatcagtcctatgaatgtatccctaaatgtggttattgaaaacctaatagctgcctcatgacaagtacatgttatttaaggaggaaaaaatattaaattttgaattgagtgtgtaggctccctatcattatatatagagtttctttttccacggtagtcagtgacttaacctgaattgtaaatgtttgtaaagggttaattgtcctacatcaaacttagttaaataattccatccacttatggaggaggaggagaatgtggaagaggtaaaaagctgggcacaagttcatatgcctatgagtcagtaaagactgaagtaatgtcctatgttgagctggttattttgatatatgataataattatctttgaagtagaacaattctgttaactggaaaatcacaggatatatccatcatatttttcaggacagatagtttttactgtggggcaaataggttaaaattacactatgttagttgcatttaggttttaaagcaaagaatctgtagagaaatctatgcaatatatagtttgtccagattagctttcatttggggaatgaagttctgaaatatctaaagcagtttactcatcaattgaaaagtcctccaaaaagagaactattgggaaaccatggtgtggtggtggaaaagaaaagctccctcagttttttggagggaataacttaaaaaaatacttaaatggctaagtttacttggtgcagttaagaattaaacttgtcaattttaacattgctgttacatctgaaataaacttatgtgatgttctgaannaaaaaaaaaaataaaaaaaaaattggggggggcccggggcccgaaaaaatttttaaaacacatggggggggggggggggccccagtgggtaagtgagacagggggcaaagggggtcccgagg

SEQ ID NO: 59309 - DNA, 3742 bp, Homo sapiens
gaaaggtcacagcgcggcagcgggtctggctggcggcagcggcgggagggagccgagagacccgagtgcacgtgtggagaagcggcggcacaagcgcggcggcgggagacactcccgcccccaccagactcaagccctcactcgactctcgcggccttcgttgctcgcacagctccctgcccaggctaggaggccggcttgcggggttgagtggcccgagctaagggtgcggagacctaagggcggcgactacgacggcgttgatatcggtggtaacgacggcctcagcaggcggggaagatgaaaggtagccggatcgagctgggagatgtgacaccacacaatattaaacagttgaaaagattgaatcaggtcatctttccagtcagctacaatgacaagttctacaaggatgtgctggaggttggcgagctagcaaaacttgcctatttcaatgatattgctgtaggtgcagtatgctgtagggtggatcattcacagaatcagaagagactttacatcatgacactaggatgtctggcaccttaccgaaggctaggaataggaactaaaatgttaaatcatgtcttaaacatctgtgaaaaagatggtacttttgacaacatttatctgcatgtccagatcagcaatgagtcggcaattgacttctacaggaagtttggctttgagattattgagacaaagaagaactactataagaggatagagcccgcagatgctcatgtgctgcagaaaaacctcaaagttccttctggtcagaatgcagatgtgcaaaagacagacaactgaacaaattacaaatgaactttcttgcacttgcttgtcgccaaataaaagagaggcccattgattcctcccccaccccaacacttttcttttaaagcttttctccctccttgttcttgtttttctttcttcctttccttttctctgagagttttaatactttcaaggactttaaaaaaataatcatgtttgaattgttttctcttatttttgtgaggtggtttgaaggaaggacaaggtagatctgtttagttttgcagttgaagttagatggtcctaaacatttaattgtcaaataatttcaaatttaatgtcctgctttcacattgaagggcagagcctacaaaacattgtatatttcaaaagacaaaaagaagcagcagcagtatcttgttctctaattcatagacaagttgagtgtgtttgtggtactttgggtttttaaacactttgggatactaatccctagacattgccttcactccacctttagtccttctgagcactctctcgggagttggaacattgttatccttgtaagaaatactaagcttatgttgatttttaagtaattatatcttctcttcttgctggtgggtggggcagtttggtttagtgttatactttggtctaagtatttgagttaaactgcttttttgctaatgagtgggctggttgttagcaggtttgtttttcctgctgttgattgttactagtggcattaacttttagaatttgggctggtgagattaattttttttaatatcccagctagagatatggcctttaactgacctaaagaggtgtgttgtgatttaattttttcccgttcctttttcttcagtaaacccaacaatagtctaaccttaaaaattgagttgatgtccttataggtcactacccctaaataaacctgaagcaggtgttttctcttggacatactaaaaaatacctaaaaggaagcttagatgggctgtgacacaaaaaattcaattactgtcatctaatgccagctgttaaaagtgtggccactgagcatttgattttataggaaaaaatagtatttttgagaataacatagctgtgctattgcacatctgttggaggacatcccagatttgcttatactcagtgcctgtgatattgagtttaaggatttgaggcaggggtaattattaaacatattgcttctattcttggaaaaatagaagtgtaaaatgttaataatacaaatgtcactgtgacctcctccactgagaggactggtttatgccagatcattttccggcacacacggagtggctttgacagattgataactttgtaagatgggagacatctgaaatattcatgttttccttttgtagtcccatctccactatttagaaatgttctcagactttaaaataatgcacagggcttgagctttctgtcatttgactttaaaaggaagtttcattcatatttatcctcttatgtaaaattgcggtataaagtctcatttccaaatatgttaaatgacaaaattattttataaaatgtttatgcacactttataaccttaagtttttatttgagaatgtgaaagtacaaagtgcagtagacttcaacaatcttgagtgccaagaataatacagaaaaagaagacagttgatgaatgagtttatagggttctaatcttaagatggtaaaaatgtagaaagaccttgctggttttttgggggtattcgtttcttaaacaatccaaatctaagcttagaagaaaagtttagcgttaagcacctttatcttcatgaataagcttcagcttgctcttggcaagagaagagtgcttgagttacagaaggcataagtagtttgaagaatgcagcagcctttttgtaaacttcccagatatcaaaatagactttgatatataaatggttttctgagatgacactgcctctatttctataaccatttcacctggactatctaatcagtcctatgaatgtatccctaaatgtggttattgaaaacctaatagctgcctcatgacaagtacatgttatttaaggaggaaaaaatattaaattttgaattgagtgtgtaggctccctatcattatatatagagtttctttttccacggtagtcagtgacttaacctgaattgtaaatgtttgtaaagggttaattgtcctacatcaaacttagttaaataattccatccacttatggaggaggaggagaatgtggaagaggtaaaaagctgggcacaagttcatatgcctatgagtcagtaaagactgaagtaatgtcctatgttgagctggttattttgatatatgataataattatctttgaagtagaacaattctgttaactggaaaatcacaggatatatccatcatatttttcaggacagatagtttttactgtggggcaaataggttaaaattacactatgttagttgcatttaggttttaaagcaaagaatctgtagagaaatctatgcaatatatagtttgtccagattagctttcatttggggaatgaagttctgaaatatctaaagcagtttactcatcaattgaaaagtcctccaaaaagagaactattgggaaaccatggtgtggtggtggaaaagaaaagctccctcagttttttggagggaataacttaaaaaaatacttaaatggctaagtttacttggtgcagttaagaattaaacttgtcaattttaacattgctgttacatctgaaataaacttatgtgatgttctggtagtgatctgtgatatctgtaaatgtcaaaactgtattgttgaattctgcagccagcaaccgtacatactcattgtgtagtgtttcccttactgcttttatttactttcacatttaagatctaattttaaaatcattaaaataggccaagtgtaattaaggcatcct

SEQ ID NO: 59310 - DNA, 3604 bp, Homo sapiens
  misc_feature (3579)..(3579): n is a, c, g, or t
  misc_feature (3584)..(3584): n is a, c, g, or t
  misc_feature (3586)..(3586): n is a, c, g, or t
  misc_feature (3598)..(3598): n is a, c, g, or t
gaaaggtcacagcgcggcagcgggtctggctggcggcagcggcgggagggagccgagagacccgagtgcacgtgtggagaagcggcggcacaagcgcggcggcgggagacactcccgcccccaccagactcaagccctcactcgactctcgcggccttcgttgctcgcacagctccctgcccaggctaggaggccggcttgcggggttgagtggcccgagctaagggtgcggagacctaagggcggcgactacgacggcgttgatatcggtggtaacgacggcctcagcaggcggggaagatgaaaggtagccggatcgagctgggagatgtgacaccacacaatattaaacagttgaaaagattgaatcaggtcatctttccagtcagctacaatgacaagttctacaaggatgtgctggaggttggcgagctagcaaaacttgcctatttcaatgatattgctgtaggtgcagtatgctgtagggtggatcattcacagaatcagaagagactttacatcatgacactaggatgtctggcaccttaccgaaggctaggaataggaactaaaatgttaaatcatgtcttaaacatctgtgaaaaagatggtacttttgacaacatttatctgcatgtccagatcagcaatgagtcggcaattgacttctacaggaagtttggctttgagattattgagacaaagaagaactactataagaggatagagcccgcagatgctcatgtgctgcagaaaaacctcaaagttccttctggtcagaatgcagatgtgcaaaagacagacaactgaacaaattacaaatgaactttcttgcacttgcttgtcgccaaataaaagagaggcccattgattcctcccccaccccaacacttttcttttaaagcttttctccctccttgttcttgtttttctttcttcctttccttttctctgagagttttaatactttcaaggactttaaaaaaataatcatgtttgaattgttttctcttatttttgtgaggtggtttgaaggaaggacaaggtagatctgtttagttttgcagttgaagttagatggtcctaaacatttaattgtcaaataatttcaaatttaatgtcctgctttcacattgaagggcagagcctacaaaacattgtatatttcaaaagacaaaaagaagcagcagcagtatcttgttctctaattcatagacaagttgagtgtgtttgtggtactttgggtttttaaacactttgggatactaatccctagacattgccttcactccacctttagtccttctgagcactctctcgggagttggaacattgttatccttgtaagaaatactaagcttatgttgatttttaagtaattatatcttctcttcttgctggtgggtggggcagtttggtttagtgttatactttggtctaagtatttgagttaaactgcttttttgctaatgagtgggctggttgttagcaggtttgtttttcctgctgttgattgttactagtggcattaacttttagaatttgggctggtgagattaattttttttaatatcccagctagagatatggcctttaactgacctaaagaggtgtgttgtgatttaattttttcccgttcctttttcttcagtaaacccaacaatagtctaaccttaaaaattgagttgatgtccttataggtcactacccctaaataaacctgaagcaggtgttttctcttggacatactaaaaaatacctaaaaggaagcttagatgggctgtgacacaaaaaattcaattactgtcatctaatgccagctgttaaaagtgtggccactgagcatttgattttataggaaaaaatagtatttttgagaataacatagctgtgctattgcacatctgttggaggacatcccagatttgcttatactcagtgcctgtgatattgagtttaaggatttgaggcaggggtaattattaaacatattgcttctattcttggaaaaatagaagtgtaaaatgttaataatacaaatgtcactgtgacctcctccactgagaggactggtttatgccagatcattttccggcacacacggagtggctttgacagattgataactttgtaagatgggagacatctgaaatattcatgttttccttttgtagtcccatctccactatttagaaatgttctcagactttaaaataatgcacagggcttgagctttctgtcatttgactttaaaaggaagtttcattcatatttatcctcttatgtaaaattgcggtataaagtctcatttccaaatatgttaaatgacaaaattattttataaaatgtttatgcacactttataaccttaagtttttatttgagaatgtgaaagtacaaagtgcagtagacttcaacaatcttgagtgccaagaataatacagaaaaagaagacagttgatgaatgagtttatagggttctaatcttaagatggtaaaaatgtagaaagaccttgctggttttttgggggtattcgtttcttaaacaatccaaatctaagcttagaagaaaagtttagcgttaagcacctttatcttcatgaataagcttcagcttgctcttggcaagagaagagtgcttgagttacagaaggcataagtagtttgaagaatgcagcagcctttttgtaaacttcccagatatcaaaatagactttgatatataaatggttttctgagatgacactgcctctatttctataaccatttcacctggactatctaatcagtcctatgaatgtatccctaaatgtggttattgaaaacctaatagctgcctcatgacaagtacatgttatttaaggaggaaaaaatattaaattttgaattgagtgtgtaggctccctatcattatatatagagtttctttttccacggtagtcagtgacttaacctgaattgtaaatgtttgtaaagggttaattgtcctacatcaaacttagttaaataattccatccacttatggaggaggaggagaatgtggaagaggtaaaaagctgggcacaagttcatatgcctatgagtcagtaaagactgaagtaatgtcctatgttgagctggttattttgatatatgataataattatctttgaagtagaacaattctgttaactggaaaatcacaggatatatccatcatatttttcaggacagatagtttttactgtggggcaaataggttaaaattacactatgttagttgcatttaggttttaaagcaaagaatctgtagagaaatctatgcaatatatagtttgtccagattagctttcatttggggaatgaagttctgaaatatctaaagcagtttactcatcaattgaaaagtcctccaaaaagagaactattgggaaaccatggtgtggtggtggaaaagaaaagctccctcagttttttggagggaataacttaaaaaaatacttaaatggctaagtttacttggtgcagttaagaattaaacttgtcaattttaacattgctgttacatctgaaataaacttatgtgatgttctgtctgnccagnancaactcgaggcnggccct

SEQ ID NO: 59311 - DNA, 2377 bp, Homo sapiens
gaaaggtcacagcgcggcagcgggtctggctggcggcagcggcgggagggagccgagagacccgagtgcacgtgtggagaagcggcggcacaagcgcggcggcgggagacactcccgcccccaccagactcaagccctcactcgactctcgcggccttcgttgctcgcacagctccctgcccaggctaggaggccggcttgcggggttgagtggcccgagctaagggtgcggagacctaagggcggcgactacgacggcgttgatatcggtggtaacgacggcctcagcaggcggggaagatgaaaggtagccggatcgagctgggagatgtgacaccacacaatattaaacagttgaaaagattgaatcaggtcatctttccagtcagctacaatgacaagttctacaaggatgtgctggaggttggcgagctagcaaaacttgcctatttcaatgatattgctgtaggtgcagtatgctgtagggtggatcattcacagaatcagaagagactttacatcatgacactaggatgtctggcaccttaccgaaggctaggaataggaactaaaatgttaaatcatgtcttaaacatctgtgaaaaagatggtacttttgacaacatttatctgcatgtccagatcagcaatgagtcggcaattgacttctacaggaagtttggctttgagattattgagacaaagaagaactactataagaggatagagcccgcagatgctcatgtgctgcagaaaaacctcaaagttccttctggtcagaatgcagatgtgcaaaagacagacaactgaacaaattacaaatgaactttcttgcacttgcttgtcgccaaataaaagagaggcccattgattcctcccccaccccaacacttttcttttaaagcttttctccctccttgttcttgtttttctttcttcctttccttttctctgagagttttaatactttcaaggactttaaaaaaataatcatgtttgaattgttttctcttatttttgtgaggtggtttgaaggaaggacaaggtagatctgtttagttttgcagttgaagttagatggtcctaaacatttaattgtcaaataatttcaaatttaatgtcctgctttcacattgaagggcagagcctacaaaacattgtatatttcaaaagacaaaaagaagcagcagcagtatcttgttctctaattcatagacaagttgagtgtgtttgtggtactttgggtttttaaacactttgggatactaatccctagacattgccttcactccacctttagtccttctgagcactctctcgggagttggaacattgttatccttgtaagaaatactaagcttatgttgatttttaagtaattatatcttctcttcttgctggtgggtggggcagtttggtttagtgttatactttggtctaagtatttgagttaaactgcttttttgctaatgagtgggctggttgttagcaggtttgtttttcctgctgttgattgttactagtggcattaacttttagaatttgggctggtgagattaattttttttaatatcccagctagagatatggcctttaactgacctaaagaggtgtgttgtgatttaattttttcccgttcctttttcttcagtaaacccaacaatagtctaaccttaaaaattgagttgatgtccttataggtcactacccctaaataaacctgaagcaggtgttttctcttggacatactaaaaaatacctaaaaggaagcttagatgggctgtgacacaaaaaattcaattactgtcatctaatgccagctgttaaaagtgtggccactgagcatttgattttataggaaaaaatagtatttttgagaataacatagctgtgctattgcacatctgttggaggacatcccagatttgcttatactcagtgcctgtgatattgagtttaaggatttgaggcaggggtaattattaaacatattgcttctattcttggaaaaatagaagtgtaaaatgttaataatacaaatgtcactgtgacctcctccactgagaggactggtttatgccagatcattttccggcacacacggagtggctttgacagattgataactttgtaagatgggagacatctgaaatattcatgttttccttttgtagtcccatctccactatttagaaatgttctcagactttaaaataatgcacagggcttgagctttctgtcatttgactttaaaaggaagtttcattcatattctcaaataaaaacttaaggttataaagtgtgcataaacattttataaaataattttgtcatttaacatatttggaaatgagactttataccgcaattttacata

SEQ ID NO: 59312 - DNA, 565 bp, Homo sapiens
  misc_feature (36)..(36): n is a, c, g, or t
cctgcacggtgcgagctctagaggagtctcccgtcntgtgactacccagtgggcacaagttcatatgcctatgagtcagtaaagactgaagtaatgtcctatgttgagctggttattttgatatatgataataattatctttgaagtagaacaattctgttaactggaaaatcacaggatatatccatcatatttttcaggacagatagtttttactgtggggcaaataggttaaaattacactatgttagttgcatttaggttttaaagcaaagaatctgtagagaaatctatgcaatatatagtttgtccagattagctttcatttggggaatgaagttctgaaatatctaaagcagtttactcatcaattgaaaagtcctccaaaaagagaactattgggaaaccatggtgtggtggtggaaaagaaaagctccctcagttttttggagggaataacttaaaaaaatacttaaatggctaagtttacttggtgcagttaagaattaaacttgtcaattttaacattgctgttacatctgaaataaacttatgtgatgttctg

SEQ ID NO: 59313 - DNA, 1325 bp, Homo sapiens
gaaaggtcacagcgcggcagcgggtctggctggcggcagcggcgggagggagccgagagacccgagtgcacgtgtggagaagcggcggcacaagcgcggcggcgggagacactcccgcccccaccagactcaagccctcactcgactctcgcggccttcgttgctcgcacagctccctgcccaggctaggaggccggcttgcggggttgagtggcccgagctaagggtgcggagacctaagggcggcgactacgacggcgttgatatcggtggtaacgacggcctcagcaggcggggaagatgaaaggtagccggatcgagctgggagatgtgacaccacacaatattaaacagttgaaaagattgaatcaggtcatctttccagtcagctacaatgacaagttctacaaggatgtgctggaggttggcgagctagcaaaacttgcctatttcaatgatattgctgtaggtgcagtatgctgtagggtggatcattcacagaatcagaagagactttacatcatgacactaggatgtctggcaccttaccgaaggctaggaataggaactaaaatgttaaatcatgtcttaaacatctgtgaaaaagatggtacttttgacaacatttatctgcatgtccagatcagcaatgagtcggcaattgacttctacaggaagtttggctttgagattattgagacaaagaagaactactataagaggatagagcccgcagatgctcatgtgctgcagaaaaacctcaaagttccttctggtcagaatgcagatgtgcaaaagacagacaactgaacaaattacaaatgaactttcttgcacttgcttgtcgccaaataaaagagaggcccattgattcctcccccaccccaacacttttcttttaaagcttttctccctccttgttcttgtttttctttcttcctttccttttctctgagagttttaatactttcaaggactttaaaaaaataatcatgtttgaattgttttctcttatttttgtgaggtggtttgaaggaaggacaaggtagatctgtttagttttgcagttgaagttagatggtcctaaacatttaattgtcaaataatttcaaatttaatgtcctgctttcacattgaagggcagagcctacaaaacattgtatatttcaaaagacaaaaagaagcagcagcagtatcttgttctctaattcatagacaagttgagtgtgtttgtggtactttgggaggctgaggtggacggatcgcttgaggtcgggagttcagaaccagcttggccaacatggtgaaacactgtctttcaatga

SEQ ID NO: 59314 - DNA, 927 bp, Homo sapiens
gaaaggtcacagcgcggcagcgggtctggctggcggcagcggcgggagggagccgagagacccgagtgcacgtgtggagaagcggcggcacaagcgcggcggcgggagacactcccgcccccaccagactcaagccctcactcgactctcgcggccttcgttgctcgcacagctccctgcccaggctaggaggccggcttgcggggttgagtggcccgagctaagggtgcggagacctaagggcggcgactacgacggcgttgatatcggtggtaacgacggcctcagcaggcggggaagatgaaaggtagccggatcgagctgggagatgtgacaccacacaatattaaacagttgaaaagattgaatcaggtcatctttccagtcagctacaatgacaagttctacaaggatgtgctggaggttggcgagctagcaaaacttgcctatttcaatgatattgctgtaggtgcagtatgctgtagggtggatcattcacagaatcagaagagactttacatcatgacactaggatgtctggcaccttaccgaaggctaggaataggaactaaaatgttaaatcatgtcttaaacatctgtgaaaaagatggtacttttgacaacatttatctgcatgtccagatcagcaatgagtcggcaattgacttctacaggaagtttggctttgagattattgagacaaagaagaactactataagaggatagagcccgcagatgctcatgtgctgcagaaaaacctcaaagttccttctggtcagaatgcagatgtgcaaaagacagacaactgaacaaattacaaatgaactttcttgcacttgcttgtcgccaaaagaaaacaacgcgtcgccccgctaggctctggcccatacgtccgacaacgtgtcgcgaaaaagagaacacaacca

SEQ ID NO: 59315 - DNA, 607 bp, Homo sapiens
gagaggataaagtagaattaaccaagagccaataggaaagggatcctaggagtatcctttaaacactagtggattaataagtcaccaagagttagggttgatatagaggaatgaaatcccagacagtagtgcttgttcctcagaggtaggtgttacaaacagagggttcagctctcctcttatttaagggtttgccgaggcatcacagtaaaattgacttctttttgagagaggtaaagctctgacttccagcttgaaatttagcctctgacttgtctggcttctctcattctctccaagtagatatctgccttagaacattaatgaaagccaaattccaaaacagcagtgcctaacattgctctgtgtgcaaacaagtctgcctgagcaggcatgaacatgaaatgtacctgaaggccagagagaacagtgcagaatgtgcaggagggctttgcaaatctgaggtggctctatggaaagacactaagtatgtcaagactaaaactagaggtgtgtgtgtttgaagagattatttctgcttactagtttctgcctgtcttatgcttgtttttaatttatctcattcatttatttaaattgcctttaa

SEQ ID NO: 59316 - DNA, 2234 bp, Homo sapiens
ggcgcagctgcaccagttttccgagagcagcgcatttccccgccgggcggttgatgcgggagcgccatgacacaggcgcctgcgcagagccgcgcgttggcctcctgttccgcttaaaggggcggtgcagaggcggcaggaagatggagttggggagttgcctggagggcgggagggaggcggcggaggaagagggcgagcctgaggtgaaaaagcggcgacttctgtgtgtggagtttgcctcggtcgcaagctgcgatgccgcagtggctcagtgcttcctggccgagaacgactgggagatggaaagggctctgaactcctacttcgagcctccggtggaggagagcgccttggaacgccgacctgaaaccatctctgagcccaagacctagtaagtgatgaggggagcgggagccagtccgcacggaggcagtttgataccaggtagccctgcgcgtcctgggacctgccgtggagctgggcggacgatgctgaggcagatctccaagctgcgtagccagaggagcagggcttgcgttgctgctgctgcgcggagttgcgccccagcagcggatctaacactgcaccagactgtcgcttcgaacgtgatttggggtccagggaggaaaagatggaaatgtaatgtttaactcaaatgaaaggaaataagtaagcgagaggtttgaaacaaatgaacgaaggctaaaccttctatcgaaaaatggcaacttggaagtctccttgcttcctgtattgtttatttattctaggccctaggctgaccggccagaataacaggtttgttgttgttgttatttttttttaatgcacacctactcctgttatttcagtgcccctctccagttcctgcacttaaaaagtgtagctgccttacaaggccctctactatttggctccataacttagaacctgcctttccaggttccaggcctatcaaacttttacttttttccaacgggtcattttctcctgtctttgaaacttcgtaaagatctttattacctgtgcctggaatttttttcttttcccttccttgctaatatttgtcttaaagccccaagctgagacatgatttatctctaggaagcttttcctgatgtcctaagtctgggtaagagtccccttttaggtactcttatagcatcctgcatgacccctgttacaataccttagtccgtattataattgctgttcattattttatgtctcctactagactgcacatctagtaaggagtatctgttttgtacattgttaatttcccaaagtctgacacaacatttgacacataataagctcccaataaatatttactgaatgtaaaaattctcccagctatatgtacaacctgtaaaattgactgttcatagtggagactttattttccctttggtcttttcagctacactggcttacagatgtgataagatattttctttaggttcctttctctgtcttgcctcttgttggggaattgtttactcacccacagtgatttgtctctggctcccgttttactaaccagagcaagttggactaggaggtgtttgcctagctcaaactggccagtcagatcctctccttggtttcagaattaggaccaagagagtcaagtctgagtcttcctatggagctggaactgtaacatgttaacttagcacctgtgaggattcatacatatctttttttgtgtacagagaagctgagaacagaggtctgcagagagacaatgaagcagagggaagttgaagtgtaggattgagagaaagcccttaactgcccttccttaaacatggctgtatttctgtaccaggctctgtgacatgtttgtttccttataaattctcctgttttggtcaaaccaacctgagttaatgtctgttggttgcaacagactatattgtaaccaataaatagtaacaaaataagtggatttcctgtaataggccctcagaaaagatgcggatcaagctgatcaatggtgtcatggctattaggattctcttaccccggaatggtaaattggcaaaaacaagcaaaggtgttgattaggctgtggtctcttgtctctcagaactcaggtcaagtatgaatgagagtgaggttttaaagtttagtttgctcaagagagaaaaatggggaaggggcaaacttcagcgtgtttctaaggcctgtgacctgattagatttttgatgttggctttagcaaa

SEQ ID NO: 59317 - DNA, 2102 bp, Homo sapiens
ggcgcagctgcaccagttttccgagagcagcgcatttccccgccgggcggttgatgcgggagcgccatgacacaggcgcctgcgcagagccgcgcgttggcctcctgttccgcttaaaggggcggtgcagaggcggcaggaagatggagttggggagttgcctggagggcgggagggaggcggcggaggaagagggcgagcctgaggtgaaaaagcggcgacttctgtgtgtggagtttgcctcggtcgcaagctgcgatgccgcagtggctcagtgcttcctggccgagaacgactgggagatggaaagggctctgaactcctacttcgagcctccggtggaggagagcgccttggaacgccgacctgaaaccatctctgagcccaagacctatgttgacctaaccaatgaagaaacaactgattccaccacttctaaaatcagcccatctgaagatactcagcaagaaaatggcagcatgttctctctcattacctggaatattgatggattagatctaaacaatctgtcagagagggctcgaggggtgtgttcctacttagctttgtacagcccagatgtgatatttctacaggaagttattcccccatattatagctacctaaagaagagatcaagtaattatgagattattacaggtcatgaagaaggatatttcacagctataatgttgaagaaatcaagagtgaaattaaaaagccaagagattattccttttccaagtaccaaaatgatgagaaaccttttatgtgtgcatgtgaatgtgtcaggaaatgagctttgccttatgacatcccatttggagagcaccagagggcatgctgcggaacgaatgaatcagttaaaaatggttttaaagaaaatgcaagaggctccagagtcagctacagttatatttgcaggagatacaaatctaagggatcgagaggttaccagatgtggtggtttacccaacaacattgtggatgtctgggagtttttgggcaaacctaaacattgccagtatacatgggatacacaaatgaactctaatcttggaataactgctgcttgtaaacttcgttttgatcgaatatttttcagagcagcagcagaagagggacacattattccccgaagtttggaccttcttggattagaaaaactggactgtggtagatttcctagtgatcactggggtcttctgtgcaacttagatataatattgtaaaatgcttttcaagtgtgggttttgccctgattgttgcaaatacaatttccaccttctggaaaggtaggtttgctgtggaggaaataatgtactagatcattgtcacagaaaaaccaactatgatttatggttgtgttttcagaattcaacattaaagattaatgtttatttaaacgaacacattcctgcattcaggatgtgaggccatttaataaaaagggcacaaagcctgtcagagttttcaacggtgcttatagctgccagctggattccaaacaggtaccccattgtctctgagctaatgtttatatttttccattcaggcaccgaaatagttaatatttaaaataagtcttcaaaagaaaacataagagattattgagttcttgggactggatcctttatttcataagttcagatcatcttaaatgaaaatgccatgattatctgcagttaagtagatgacagctattctacatcagacttgatttttgtcagctaattacataattggtaagctataattgaaaccttatggcttaaaattccttaactcctttttgattcatgtttgtagtcatgttgtcaacagaggcaaagttaagcttgatgatggttaaaatcggtttgatagcaccatgggacatttttctaacaaaaataaatgcatgaagagacatagccttttagttttgctaattgtgaaatggaaatgctttacaggaagtaaatgcaaattacttttaagtgtgctttaaagaaaaatattttccccacaagagaaatttaaataaagaattttatttgtttatggtttgttttagtatgtttttgtgtccatgatgagattaaattttttatctgcttcct

SEQ ID NO: 59318 - DNA, 2136 bp, Homo sapiens
ggcgcagctgcaccagttttccgagagcagcgcatttccccgccgggcggttgatgcgggagcgccatgacacaggcgcctgcgcagagccgcgcgttggcctcctgttccgcttaaaggggcggtgcagaggcggcaggaagatggagttggggagttgcctggagggcgggagggaggcggcggaggaagagggcgagcctgaggtgaaaaagcggcgacttctgtgtgtggagtttgcctcggtcgcaagctgcgatgccgcagtggctcagtgcttcctggccgagaacgactgggagatggaaagggctctgaactcctacttcgagcctccggtggaggagagcgccttggaacgccgacctgaaaccatctctgagcccaagacctatgttgacctaaccaatgaagaaacaactgattccaccacttctaaaatcagcccatctgaagatactcagcaagaaaatggcagcatgttctctctcattacctggaatattgatggattagatctaaacaatctgtcagagagggctcgaggggtgtgttcctacttagctttgtacagcccagatgtgatatttctacaggaagttattcccccatattatagctacctaaagaagagatcaagtaattatgagattattacaggtcatgaagaaggatatttcacagctataatgttgaagaaatcaagagtgaaattaaaaagccaagagattattccttttccaagtaccaaaatgatgagaaaccttttatgtgtgcatgtgaatgtgtcaggaaatgagctttgccttatgacatcccatttggagagcaccagagggcatgctgcggaacgaatgaatcagttaaaaatggttttaaagaaaatgcaagaggctccagagtcagctacagttatatttgcaggagatacaaatctaagggatcgagaggttaccagatgtggtggtttacccaacaacattgtggatgtctgggagtttttgggcaaacctaaacattgccagtatacatgggatacacaaatgaactctaatcttggaataactgctgcttgtaaacttcgttttgatcgaatatttttcagagcagcagcagaagagggacacattattccccgaagtttggaccttcttggattagaaaaactggactgtggtagatttcctagtgatcactggggtcttctgtgcaacttagatataatattgtaaaatgcttttcaagtgtgggttttgccctgattgttgcaaatacaatttccaccttctggaaaggtaggtttgctgtggaggaaataatgtactagatcattgtcacagaaaaaccaactatgatttatggttgtgttttcagaattcaacattaaagattaatgtttatttaaacgaacacattcctgcattcaggatgtgaggccatttaataaaaagggcacaaagcctgtcagagttttcaacggtgcttatagctgccagctggattccaaacaggtaccccattgtctctgagctaatgtttatatttttccattcaggcaccgaaatagttaatatttaaaataagtcttcaaaagaaaacataagagattattgagttcttgggactggatcctttatttcataagttcagatcatcttaaatgaaaatgccatgattatctgcagttaagtagatgacagctattctacatcagacttgatttttgtcagctaattacataattggtaagctataattgaaaccttatggcttaaaattccttaactcctttttgattcatgtttgtagtcatgttgtcaacagaggcaaagttaagcttgatgatggttaaaatcggtttgatagcaccatgggacatttttctaacaaaaataaatgcatgaagagacatacaaaaaaacaaaaaaaaaaaaaaaacaacaacaaaaaagaacaaaaaaaacgacacaaagggggggggcgacacaaaaagaatccccgcgggggggcccaaagaataacgggcacaccgacaggtttggtggagaaaaagggggcccccaacaaggagcgggcgaatatataaacaaaaagacacgggggcgcaggaaacacaacggggcagcgggaaaaacg

SEQ ID NO: 59319 - DNA, 2086 bp, Homo sapiens
agtcatgggatctagagatgaagaaactgcattctcatgctgattcggttcctgtcggggtgtcttcaaactggttggtgtcagctttctgctggaattcagcgtctgaaaaacatcttaagcaatgcttaaacaaaagccttatgattctgatgtcagagatcctacccataggagcaatggggatgcaagtcatcagtatatagggctatgggatgactttccgtacaaagaagtgggccaaagtgcagcgtgattaatgctcaattatatttctgtctagaacctggcatgcaattcttgttaaccctgtaaggacagtgtcacttttagggctcttttaaaatttgtctgtaaaatgagggctacaaatacaaaataattcttaatcaatttatagattatttgcaaagccatgttttattctgatcttgccagtgttgacctaaccaatgaagaaacaactgattccaccacttctaaaatcagcccatctgaagatactcagcaagaaaatggcagcatgttctctctcattacctggaatattgatggattagatctaaacaatctgtcagagagggctcgaggggtgtgttcctacttagctttgtacagcccagatgtgatatttctacaggaagttattcccccatattatagctacctaaagaagagatcaagtaattatgagattattacaggtcatgaagaaggatatttcacagctataatgttgaagaaatcaagagtgaaattaaaaagccaagagattattccttttccaagtaccaaaatgatgagaaaccttttatgtgtgcatgtgaatgtgtcaggaaatgagctttgccttatgacatcccatttggagagcaccagagggcatgctgcggaacgaatgaatcagttaaaaatggttttaaagaaaatgcaagaggctccagagtcagctacagttatatttgcaggagatacaaatctaagggatcgagaggttaccagatgtggtggtttacccaacaacattgtggatgtctgggagtttttgggcaaacctaaacattgccagtatacatgggatacacaaatgaactctaatcttggaataactgctgcttgtaaacttcgttttgatcgaatatttttcagagcagcagcagaagagggacacattattccccgaagtttggaccttcttggattagaaaaactggactgtggtagatttcctagtgatcactggggtcttctgtgcaacttagatataatattgtaaaatgcttttcaagtgtgggttttgccctgattgttgcaaatacaatttccaccttctggaaaggtaggtttgctgtggaggaaataatgtactagatcattgtcacagaaaaaccaactatgatttatggttgtgttttcagaattcaacattaaagattaatgtttatttaaacgaacacattcctgcattcaggatgtgaggccatttaataaaaagggcacaaagcctgtcagagttttcaacggtgcttatagctgccagctggattccaaacaggtaccccattgtctctgagctaatgtttatatttttccattcaggcaccgaaatagttaatatttaaaataagtcttcaaaagaaaacataagagattattgagttcttgggactggatcctttatttcataagttcagatcatcttaaatgaaaatgccatgattatctgcagttaagtagatgacagctattctacatcagacttgatttttgtcagctaattacataattggtaagctataattgaaaccttatggcttaaaattccttaactcctttttgattcatgtttgtagtcatgttgtcaacagaggcaaagttaagcttgatgatggttaaaatcggtttgatagcaccatgggacatttttctaacaaaaataaatgcatgaagagacatagccttttagttttgctaattgtgaaatggaaatgctttacaggaagtaaatgcaaattacttttaagtgtgctttaaagaaaaatattttccccacaagagaaatttaaataaagaattttatttgttt

SEQ ID NO: 59320 - DNA, 1988 bp, Homo sapiens
ggcgcagctgcaccagttttccgagagcagcgcatttccccgccgggcggttgatgcgggagcgccatgacacaggcgcctgcgcagagccgcgcgttggcctcctgttccgcttaaaggggcggtgcagaggcggcaggaagatggagttggggagttgcctggagggcgggagggaggcggcggaggaagagggcgagcctgaggtgaaaaagcggcgacttctgtgtgtggagtttgcctcggtcgcaagctgcgatgccgcagtggctcagtgcttcctggccgagaacgactgggagatggaaagggctctgaactcctacttcgagcctccggtggaggagagcgccttggaacgccgacctgaaaccatctctgagcccaagacctatgttgacctaaccaatgaagaaacaactgattccaccacttctaaaatcagcccatctgaagatactcagcaagaaaatctgtcagagagggctcgaggggtgtgttcctacttagctttgtacagcccagatgtgatatttctacaggaagttattcccccatattatagctacctaaagaagagatcaagtaattatgagattattacaggtcatgaagaaggatatttcacagctataatgttgaagaaatcaagagtgaaattaaaaagccaagagattattccttttccaagtaccaaaatgatgagaaaccttttatgtgtgcatgtgaatgtgtcaggaaatgagctttgccttatgacatcccatttggagagcaccagagggcatgctgcggaacgaatgaatcagttaaaaatggttttaaagaaaatgcaagaggctccagagtcagctacagttatatttgcaggagatacaaatctaagggatcgagaggttaccagatgtggtggtttacccaacaacattgtggatgtctgggagtttttgggcaaacctaaacattgccagtatacatgggatacacaaatgaactctaatcttggaataactgctgcttgtaaacttcgttttgatcgaatatttttcagagcagcagcagaagagggacacattattccccgaagtttggaccttcttggattagaaaaactggactgtggtagatttcctagtgatcactggggtcttctgtgcaacttagatataatattgtaaaatgcttttcaagtgtgggttttgccctgattgttgcaaatacaatttccaccttctggaaaggtaggtttgctgtggaggaaataatgtactagatcattgtcacagaaaaaccaactatgatttatggttgtgttttcagaattcaacattaaagattaatgtttatttaaacgaacacattcctgcattcaggatgtgaggccatttaataaaaagggcacaaagcctgtcagagttttcaacggtgcttatagctgccagctggattccaaacaggtaccccattgtctctgagctaatgtttatatttttccattcaggcaccgaaatagttaatatttaaaataagtcttcaaaagaaaacataagagattattgagttcttgggactggatcctttatttcataagttcagatcatcttaaatgaaaatgccatgattatctgcagttaagtagatgacagctattctacatcagacttgatttttgtcagctaattacataattggtaagctataattgaaaccttatggcttaaaattccttaactcctttttgattcatgtttgtagtcatgttgtcaacagaggcaaagttaagcttgatgatggttaaaatcggtttgatagcaccatgggacatttttctaacaaaaataaatgcatgaagagacatagccttttagttttgctaattgtgaaatggaaatgctttacaggaagtaaatgcaaattacttttaagtgtgctttaaagaaaaatattttccccacaagagaaatttaaataaagaattttatttgttt

SEQ ID NO: 59321 - DNA, 1639 bp, Homo sapiens
ggcgcagctgcaccagttttccgagagcagcgcatttccccgccgggcggttgatgcgggagcgccatgacacaggcgcctgcgcagagccgcgcgttggcctcctgttccgcttaaaggggcggtgcagaggcggcaggaagatggagttggggagttgcctggagggcgggagggaggcggcggaggaagagggcgagcctgaggtgaaaaagcggcgacttctgtgtgtggagtttgcctcggtcgcaagctgcgatgccgcagtggctcagtgcttcctggccgagaacgactgggagatggaaagggctctgaactcctacttcgagcctccggtggaggagagcgccttggaacgccgacctgaaaccatctctgagcccaagacctatgttgacctaaccaatgaagaaacaactgattccaccacttctaaaatcagcccatctgaagatactcagcaagaaaatggcagcatgttctctctcattacctggaatattgatggattagatctaaacaatctgtcagagagggctcgaggggtgtgttcctacttagctttgtacagcccagatgtgatatttctacaggaagttattcccccatattatagctacctaaagaagagatcaagtaattatgagattattacaggtcatgaagaaggatatttcacagctataatgttgaagaaatcaagagtgaaattaaaaagccaagagattattccttttccaagtaccaaaatgatgagaaaccttttatgtgtgcatgtgaatgtgtcaggaaatgagctttgccttatgacatcccatttggagagcaccagagggcatgctgcggaacgaatgaatcagttaaaaatggttttaaagaaaatgcaagaggctccagagtcagctacagttatatttgcaggagatacaaatctaagggatcgagaggttaccagatgtggtggtttacccaacaacattgtggatgtctgggagtttttgggcaaacctaaacattgccagtatacatgggatacacaaatgaactctaatcttggaataactgctgcttgtaaacttcgttttgatcgaatatttttcagagcagcagcagaagagggacacattattccccgaagtttggaccttcttggattagaaaaactggactgtggtagatttcctagtgatcactggggtcttctgtgcaacttagatataatattgtaaaatgcttttcaagtgtgggttttgccctgattgttgcaaatacaatttccaccttctggaaaggtaggtttgctgtggaggaaataatgtactagatcattgtcacagaaaaaccaactatgatttatggttgtgttttcagaattcaacattaaagattaatgtttatttaaacgaacacattcctgcattcaggatgtgaggccatttaataaaaagggcacaaagcctgtcagagttttcaacggtgcttatagctgccagctggattccaaacaggtaccccattgtctctgagctaatgtttatatttttccattcaggcaccgaaatagttaatatttatcttataagttagatcatcttaatgaaatgcctcgattttttcatttcttgatgacagtttt

SEQ ID NO: 59322 - DNA, 974 bp, Homo sapiens
ggcgcagctgcaccagttttccgagagcagcgcatttccccgccgggcggttgatgcgggagcgccatgacacaggcgcctgcgcagagccgcgcgttggcctcctgttccgcttaaaggggcggtgcagaggcggcaggaagatggagttggggagttgcctggagggcgggagggaggcggcggaggaagagggcgagcctgaggtgaaaaagcggcgacttctgtgtgtggagtttgcctcggtcgcaagctgcgatgccgcagtggctcagtgcttcctggccgagaacgactgggagatggaaagggctctgaactcctacttcgagcctccggtggaggagagcgccttggaacgccgacctgaaaccatctctgagcccaagacctatgttgacctaaccaatgaagaaacaactgattccaccacttctaaaatcagcccatctgaagatactcagcaagaaaatggcagcatgttctctctcattacctggaatattgatggattagatctaaacaatctgtcagagagggctcgaggggtgtgttcctacttagctttgtacagcccagatgtgatatttctacaggaagttattcccccatattatagctacctaaagaagagatcaagtaattatgagattattacaggtcatgaagaaggatatttcacagctataatgttgaagaaatcaagagtgaaattaaaaagccaagagattattccttttccaagtaccaaaatgatgagaaaccttttatgtgtgcatgtgaatgtgtcaggaaatgagctttgccttatgacatcccatttggagagcaccagagggcatgctgcggaacgaatgaatcagttaaaaatggttttaaagaaaatgcaagaggctccagagtcagctacagttatatttgcaggagatacaaatctaagggatcgagagatagtgacaaagtcagtttgatgt

SEQ ID NO: 59323 - DNA, 947 bp, Homo sapiens
ctactttggaggctgaagcaggagaattgtttgagtccatgaagtggaggctacagtgaactgagatcatgccattgtactccagcctgggcaacaagagcaaaactccatctaaaaaaaaaagaaggccctcaccagatgtggctgcttgacttgggaattcccaccctctagaaatacaatttccaccttctggaaaggtaggtttgctgtggaggaaataatgtactagatcattgtcacagaaaaaccaactatgatttatggttgtgttttcagaattcaacattaaagattaatgtttatttaaacgaacacattcctgcattcaggatgtgaggccatttaataaaaagggcacaaagcctgtcagagttttcaacggtgcttatagctgccagctggattccaaacaggtaccccattgtctctgagctaatgtttatatttttccattcaggcaccgaaatagttaatatttaaaataagtcttcaaaagaaaacataagagattattgagttcttgggactggatcctttatttcataagttcagatcatcttaaatgaaaatgccatgattatctgcagttaagtagatgacagctattctacatcagacttgatttttgtcagctaattacataattggtaagctataattgaaaccttatggcttaaaattccttaactcctttttgattcatgtttgtagtcatgttgtcaacagaggcaaagttaagcttgatgatggttaaaatcggtttgatagcaccatgggacatttttctaacaaaaataaatgcatgaagagacatagccttttagttttgctaattgtgaaatggaaatgctttacaggaagtaaatgcaaattacttttaagtgtgctttaaagaaaaatattttccccacaagagaaatttaaataaagaattttatttgttt

SEQ ID NO: 59324 - DNA, 2042 bp, Homo sapiens
ggcgcagctgcaccagttttccgagagcagcgcatttccccgccgggcggttgatgcgggagcgccatgacacaggcgcctgcgcagagccgcgcgttggcctcctgttccgcttaaaggggcggtgcagaggcggcaggaagatggagttggggagttgcctggagggcgggagggaggcggcggaggaagagggcgagcctgaggtgaaaaagcggcgacttctgtgtgtggagtttgcctcggtcgcaagctgcgatgccgcagtggctcagtgcttcctggccgagaacgactgggagatggaaagggctctgaactcctacttcgagcctccggtggaggagagcgccttggaacgccgacctgaaaccatctctgagcccaagacctatgttgacctaaccaatgaagaaacaactgattccaccacttctaaaatcagcccatctgaagatactcagcaagaaaatggcagcatgttctctctcattacctggaatattgatggattagatctaaacaatctgtcagagagggctcgaggggtgtgttcctacttagctttgtacagcccagatgtgatatttctacaggaagttattcccccatattatagctacctaaagaagagatcaagtaattatgagattattacaggtcatgaagaaggatatttcacagctataatgttgaagaaatcaagagtgaaattaaaaagccaagagattattccttttccaagtaccaaaatgatgagaaaccttttatgtgtgcatgtgaatgtgtcaggaaatgagctttgccttatgacatcccatttggagagcaccagagggcatgctgcggaacgaatgaatcagttaaaaatggttttaaagaaaatgcaagaggctccagagtcagctacagttatatttgcaggagatacaaatctaagggatcgagaggttaccagatgtggtggtttacccaacaacattgtggatgtctgggagtttttgggcaaacctaaacattgccagtatacatgggatacacaaatgaactctaatcttggaataactgctgcttgtaaacttcgttttgatcgaatatttttcagagcagcagcagaagagggacacattattccccgaagtttggaccttcttggattagaaaaactggactgtggtagatttcctagtgatcactggggtcttctgtgcaacttagatataatattgtaaaatgcttttcaagtgtgggttttgccctgattgttgcaaatacaatttccaccttctggaaaggtaggtttgctgtggaggaaataatgtactagatcattgtcacagaaaaaccaactatgatttatggttgtgttttcagaattcaacattaaagattaatgtttatttaaacgaacacattcctgcattcaggatgtgaggccatttaataaaaagggcacaaagcctgtcagagttttcaacggtgcttatagctgccagctggattccaaacaggtaccccattgtctctgagctaatgtttatatttttccattcaggcaccgaaatagttaatatttaaaataagtcttcaaaagaaaacataagagattattgagttcttgggactggatcctttatttcataagttcagatcatcttaaatgaaaatgccatgattatctgcagttaagtagatgacagctattctacatcagacttgatttttgtcagctaattacataattggtaagctataattgaaaccttatggcttaaaattccttaactcctttttgattcatgtttgtagtcatgttgtcaacagaggcaaagttaagcttgatgatggttaaaatcggtttgatagcaccatgggacatttttctaacaaaaataaatgcatgaagagacatagccttttagttttgctaattgtgaaatggaaatgctttacaggaagtaaatgcaaattacttttaagtgtgctttaaagaaaaatattttccccacaagagaaatttaaataaagaattttatttgttt

SEQ ID NO: 59325 - DNA, 681 bp, Homo sapiens
ggcgcagctgcaccagttttccgagagcagcgcatttccccgccgggcggttgatgcgggagcgccatgacacaggcgcctgcgcagagccgcgcgttggcctcctgttccgcttaaaggggcggtgcagaggcggcaggaagatggagttggggagttgcctggagggcgggagggaggcggcggaggaagagggcgagcctgaggtgaaaaagcggcgacttctgtgtgtggagtttgcctcggtcgcaagctgcgatgccgcagtggctcagtgcttcctggccgagaacgactgggagatggaaagggctcctgaactcctacttcgaagcctaccgtgtaggacggacgagctgcctatgcgaactgcctgacctagaagaccaatactactaggaggcccaatgacctaagtaaacgtagatagatggtggatgctggtgatgccatggtcctgccactggcatgggccatgtttttggataagccagtgtaaggcgcctagcggtctgtacctatggtgaacccataggcccggttgtgaagcccttgtgtgcctggtgcaaccggaaatgggcctggacgggcccgagaaactacttcgcaagagggccctaggtctggtaaggctccagggaagcgcatgcccaggggggcttattgcctggttatggccta

SEQ ID NO: 59326 - DNA, 2097 bp, Homo sapiens
  misc_feature (2069)..(2069): n is a, c, g, or t
  misc_feature (2075)..(2075): n is a, c, g, or t
  misc_feature (2080)..(2080): n is a, c, g, or t
ggcgcagctgcaccagttttccgagagcagcgcatttccccgccgggcggttgatgcgggagcgccatgacacaggcgcctgcgcagagccgcgcgttggcctcctgttccgcttaaaggggcggtgcagaggcggcaggaagatggagttggggagttgcctggagggcgggagggaggcggcggaggaagagggcgagcctgaggtgaaaaagcggcgacttctgtgtgtggagtttgcctcggtcgcaagctgcgatgccgcagtggctcagtgcttcctggccgagaacgactgggagatggaaagggctctgaactcctacttcgagcctccggtggaggagagcgccttggaacgccgacctgaaaccatctctgagcccaagacctatgttgacctaaccaatgaagaaacaactgattccaccacttctaaaatcagcccatctgaagatactcagcaagaaaatggcagcatgttctctctcattacctggaatattgatggattagatctaaacaatctgtcagagagggctcgaggggtgtgttcctacttagctttgtacagcccagatgtgatatttctacaggaagttattcccccatattatagctacctaaagaagagatcaagtaattatgagattattacaggtcatgaagaaggatatttcacagctataatgttgaagaaatcaagagtgaaattaaaaagccaagagattattccttttccaagtaccaaaatgatgagaaaccttttatgtgtgcatgtgaatgtgtcaggaaatgagctttgccttatgacatcccatttggagagcaccagagggcatgctgcggaacgaatgaatcagttaaaaatggttttaaagaaaatgcaagaggctccagagtcagctacagttatatttgcaggagatacaaatctaagggatcgagaggttaccagatgtggtggtttacccaacaacattgtggatgtctgggagtttttgggcaaacctaaacattgccagtatacatgggatacacaaatgaactctaatcttggaataactgctgcttgtaaacttcgttttgatcgaatatttttcagagcagcagcagaagagggacacattattccccgaagtttggaccttcttggattagaaaaactggactgtggtagatttcctagtgatcactggggtcttctgtgcaacttagatataatattgtaaaatgcttttcaagtgtgggttttgccctgattgttgcaaatacaatttccaccttctggaaaggtaggtttgctgtggaggaaataatgtactagatcattgtcacagaaaaaccaactatgatttatggttgtgttttcagaattcaacattaaagattaatgtttatttaaacgaacacattcctgcattcaggatgtgaggccatttaataaaaagggcacaaagcctgtcagagttttcaacggtgcttatagctgccagctggattccaaacaggtaccccattgtctctgagctaatgtttatatttttccattcaggcaccgaaatagttaatatttaaaataagtcttcaaaagaaaacataagagattattgagttcttgggactggatcctttatttcataagttcagatcatcttaaatgaaaatgccatgattatctgcagttaagtagatgacagctattctacatcagacttgatttttgtcagctaattacataattggtaagctataattgaaaccttatggcttaaaattccttaactcctttttgattcatgtttgtagtcatgttgtcaacagaggcaaagttaagcttgatgatggttaaaatcggtttgatagcaccatgggacatttttctaacaaaaataaatgcatgaagagacatagccttttagttttgctaattgtgaaatggaaatgctttacaggaagtaaatgcaaattacttttaagtgtgctttaaagaaaaatattttccccacaagagaaatttaaataaagaattttatttgtttctcggccgctcgtgccgaattcgatanaagctntcganccgcgacctgagggggg

SEQ ID NO: 59327 - DNA, 1722 bp, Homo sapiens
gtggagcgcacaaacctcatcccttgtgcctttgtttttcagagggctctgaactcctacttcgagcctccggtggaggagagcgccttggaacgccgacctgaaaccatctctgagcccaagacctatgttgacctaaccaatgaagaaacaactgattccaccacttctaaaatcagcccatctgaagatactcagcaagaaaatctgtcagagagggctcgaggggtgtgttcctacttagctttgtacagcccagatgtgatatttctacaggaagttattcccccatattatagctacctaaagaagagatcaagtaattatgagattattacaggtcatgaagaaggatatttcacagctataatgttgaagaaatcaagagtgaaattaaaaagccaagagattattccttttccaagtaccaaaatgatgagaaaccttttatgtgtgcatgtgaatgtgtcaggaaatgagctttgccttatgacatcccatttggagagcaccagagggcatgctgcggaacgaatgaatcagttaaaaatggttttaaagaaaatgcaagaggctccagagtcagctacagttatatttgcaggagatacaaatctaagggatcgagaggttaccagatgtggtggtttacccaacaacattgtggatgtctgggagtttttgggcaaacctaaacattgccagtatacatgggatacacaaatgaactctaatcttggaataactgctgcttgtaaacttcgttttgatcgaatatttttcagagcagcagcagaagagggacacattattccccgaagtttggaccttcttggattagaaaaactggactgtggtagatttcctagtgatcactggggtcttctgtgcaacttagatataatattgtaaaatgcttttcaagtgtgggttttgccctgattgttgcaaatacaatttccaccttctggaaaggtaggtttgctgtggaggaaataatgtactagatcattgtcacagaaaaaccaactatgatttatggttgtgttttcagaattcaacattaaagattaatgtttatttaaacgaacacattcctgcattcaggatgtgaggccatttaataaaaagggcacaaagcctgtcagagttttcaacggtgcttatagctgccagctggattccaaacaggtaccccattgtctctgagctaatgtttatatttttccattcaggcaccgaaatagttaatatttaaaataagtcttcaaaagaaaacataagagattattgagttcttgggactggatcctttatttcataagttcagatcatcttaaatgaaaatgccatgattatctgcagttaagtagatgacagctattctacatcagacttgatttttgtcagctaattacataattggtaagctataattgaaaccttatggcttaaaattccttaactcctttttgattcatgtttgtagtcatgttgtcaacagaggcaaagttaagcttgatgatggttaaaatcggtttgatagcaccatgggacatttttctaacaaaaataaatgcatgaagagacatagccttttagttttgctaattgtgaaatggaaatgctttacaggaagtaaatgcaaattacttttaagtgtgctttaaagaaaaatattttccccacaagagaaatttaaataaagaattttatttgttt

SEQ ID NO: 59328 - DNA, 2362 bp, Homo sapiens
ggcgcagctgcaccagttttccgagagcagcgcatttccccgccgggcggttgatgcgggagcgccatgacacaggcgcctgcgcagagccgcgcgttggcctcctgttccgcttaaaggggcggtgcagaggcggcaggaagatggagttggggagttgcctggagggcgggagggaggcggcggaggaagagggcgagcctgaggtgaaaaagcggcgacttctgtgtgtggagtttgcctcggtcgcaagctgcgatgccgcagtggctcagtgcttcctggccgagaacgactgggagatggaaagggctctgaactcctacttcgagcctccggtggaggagagcgccttggaacgccgacctgaaaccatctctgagcccaagacctatgttgacctaaccaatgaagaaacaactgattccaccacttctaaaatcagcccatctgaagatactcagcaagaaaatggcagcatgttctctctcattacctggaatattgatggattagatctaaacaatctgtcagagagggctcgaggggtgtgttcctacttagctttgtacagcccagatgtgatatttctacaggaagttattcccccatattatagctacctaaagaagagatcaagtaattatgagattattacaggtcatgaagaaggatatttcacagctataatgttgaagaaatcaagagtgaaattaaaaagccaagagattattccttttccaagtaccaaaatgatgagaaaccttttatgtgtgcatcctagggggctttgaaacagtctgttcagcatgcctttggtgtattgaggagggagccgctgatggcctggggacactggggaaaggttcacagtggaggtgacatctgggggtaggtcgtgcttgctaaaccgtcgtctttggggacagggttactgctttaatacttcttttgatccggagggataggcatagtgctgattttacagtttcagtttagtaaatatataccatttgacagaacaatctgctgattttattattaaagttcagtattaatagtcagtggacagttttaatgactgtttgtcctgctgcaggtgaatgtgtcaggaaatgagctttgccttatgacatcccatttggagagcaccagagggcatgctgcggaacgaatgaatcagttaaaaatggttttaaagaaaatgcaagaggctccagagtcagctacagttatatttgcaggagatacaaatctaagggatcgagaggttaccagatgtggtggtttacccaacaacattgtggatgtctgggagtttttgggcaaacctaaacattgccagtatacatgggatacacaaatgaactctaatcttggaataactgctgcttgtaaacttcgttttgatcgaatatttttcagagcagcagcagaagagggacacattattccccgaagtttggaccttcttggattagaaaaactggactgtggtagatttcctagtgatcactggggtcttctgtgcaacttagatataatattgtaaaatgcttttcaagtgtgggttttgccctgattgttgcaaatacaatttccaccttctggaaaggtaggtttgctgtggaggaaataatgtactagatcattgtcacagaaaaaccaactatgatttatggttgtgttttcagaattcaacattaaagattaatgtttatttaaacgaacacattcctgcattcaggatgtgaggccatttaataaaaagggcacaaagcctgtcagagttttcaacggtgcttatagctgccagctggattccaaacaggtaccccattgtctctgagctaatgtttatatttttccattcaggcaccgaaatagttaatatttaaaataagtcttcaaaagaaaacataagagattattgagttcttgggactggatcctttatttcataagttcagatcatcttaaatgaaaatgccatgattatctgcagttaagtagatgacagctattctacatcagacttgatttttgtcagctaattacataattggtaagctataattgaaaccttatggcttaaaattccttaactcctttttgattcatgtttgtagtcatgttgtcaacagaggcaaagttaagcttgatgatggttaaaatcggtttgatagcaccatgggacatttttctaacaaaaataaatgcatgaagagacatagccttttagttttgctaattgtgaaatggaaatgctttacaggaagtaaatgcaaattacttttaagtgtgctttaaagaaaaatattttccccacaagagaaatttaaataaagaattttatttgttt

SEQ ID NO: 59329 - DNA, 2154 bp, Homo sapiens
ggcgcagctgcaccagttttccgagagcagcgcatttccccgccgggcggttgatgcgggagcgccatgacacaggcgcctgcgcagagccgcgcgttggcctcctgttccgcttaaaggggcggtgcagaggcggcaggaagatggagttggggagttgcctggagggcgggagggaggcggcggaggaagagggcgagcctgaggtgaaaaagcggcgacttctgtgtgtggagtttgcctcggtcgcaagctgcgatgccgcagtggctcagtgcttcctggccgagaacgactgggagatggaaagggctctgaactcctacttcgagcctccggtggaggagagcgccttggaacgccgacctgaaaccatctctgagcccaagacctatgttgacctaaccaatgaagaaacaactgattccaccacttctaaaatcagcccatctgaagatactcagcaagaaaatggcagcatgttctctctcattacctggaatattgatggattagatctaaacaatctgtcagagagggctcgaggggtgtgttcctacttagctttgtacagcccagatgtgatatttctacaggaagttattcccccatattatagctacctaaagaagagatcaagtaattatgagattattacaggtcatgaagaaggatatttcacagctataatgttgaagaaatcaagagtgaaattaaaaagccaagagattattccttttccaagtaccaaaatgatgagaaaccttttatgtgtgcatcctagggggctttgaaacagtctgttcagcatgcctttggtgtattgaggagggagccgctgatggcctggggacactggggaaaggttcacagtggaggtgacatctgggggtgaatgtgtcaggaaatgagctttgccttatgacatcccatttggagagcaccagagggcatgctgcggaacgaatgaatcagttaaaaatggttttaaagaaaatgcaagaggctccagagtcagctacagttatatttgcaggagatacaaatctaagggatcgagaggttaccagatgtggtggtttacccaacaacattgtggatgtctgggagtttttgggcaaacctaaacattgccagtatacatgggatacacaaatgaactctaatcttggaataactgctgcttgtaaacttcgttttgatcgaatatttttcagagcagcagcagaagagggacacattattccccgaagtttggaccttcttggattagaaaaactggactgtggtagatttcctagtgatcactggggtcttctgtgcaacttagatataatattgtaaaatgcttttcaagtgtgggttttgccctgattgttgcaaatacaatttccaccttctggaaaggtaggtttgctgtggaggaaataatgtactagatcattgtcacagaaaaaccaactatgatttatggttgtgttttcagaattcaacattaaagattaatgtttatttaaacgaacacattcctgcattcaggatgtgaggccatttaataaaaagggcacaaagcctgtcagagttttcaacggtgcttatagctgccagctggattccaaacaggtaccccattgtctctgagctaatgtttatatttttccattcaggcaccgaaatagttaatatttaaaataagtcttcaaaagaaaacataagagattattgagttcttgggactggatcctttatttcataagttcagatcatcttaaatgaaaatgccatgattatctgcagttaagtagatgacagctattctacatcagacttgatttttgtcagctaattacataattggtaagctataattgaaaccttatggcttaaaattccttaactcctttttgattcatgtttgtagtcatgttgtcaacagaggcaaagttaagcttgatgatggttaaaatcggtttgatagcaccatgggacatttttctaacaaaaataaatgcatgaagagacatagccttttagttttgctaattgtgaaatggaaatgctttacaggaagtaaatgcaaattacttttaagtgtgctttaaagaaaaatattttccccacaagagaaatttaaataaagaattttatttgttt

SEQ ID NO: 59330 - DNA, 579 bp, Homo sapiens
atgtacaagatgagcctggaacatcttgtgctagcaggcaaggaagcccaaagacgaatttgttaaaagaatacaggagtcaatgttaaaggttcccaggtggtcaagtatgaaaatatttgatcatcagtagaagaacaatttcggtggaatgaaaaatattgaatgttttaaaatgtactcatttatgagaaccagaaactgaaagtgtcccccagagttagtagtctctattggaggtacacaccacaccagttctttactgtgaaaattaacaattaaaggaaagtgttaagtatttattttgctttttctatacaaattgtgtttcaggacaaccaaatcatttaaagaaaattcttgaagaatgttggctaataaatatggaaggcataatagacttaaaatattactgtttttccaccccaataagataattgaatcaaacaacagaatcagaagataaagactaatgtaaattaatacagccactgtggagaacagtttagaggttactcaaaaaactaaaaatagagccactatatgatccagcaatcccattgctaggtatatacccta

SEQ ID NO: 59331 - DNA, 926 bp, Homo sapiens
ccgggataccgagcgcgtccgtagtggcggctggcgctagggaactgcagggtctagggtgttgttggagtggcagttggtccgaatttctcccgaagcccgcggaggagcggcgcgccgcgattcaccagcctggtcccttctgcggagagcgatgccgcttcccgacaccatgttctgcgctcagcagatccacattcccccggagctgccggacatcctgaagcaattcaccaaggctgccatccgcacccagccggccgacgtgctgcggtggtccgcgggctatttttcagctctgtcgagaggagatccacttcctgtaaaggacagaatggaaatgcccacggcaacccagaaaacagacacaggcctgactcaaggactcctgaaagttttgcacaagcagtgtcaccacaagcggtatgtggaattaacagatcttgagcagaagtggaagaacttgtgcctgccgaaggaaaaattcaaagcgctcttacaactggatccttgtgaaaacaaaatcaagtggataaactttttagcgcttggatgcagcatgcttggtgggtccttgaacactgcgctgaagcacctgtgcgagatcctcacggacgatccggagggcgggcccgctcgcatccccttcaagacgttttcctacgtttaccgctacttggccagattagactcagatgtgtctcccttggagacggaatcctaccttgcctctctaaaggaaaatatagacgccaggaagaacggcatgataggtctttcagatttcttctttccaaagaggaaacttttagaaagcattgaaaactctgaagatgtaggccattaatacagagaagaatacattttaatgtcaaaatagtgctctttaaaattctggcaccaaatacaacttaccctgaatcaca

SEQ ID NO: 59332 - DNA, 1139 bp, Homo sapiens
ccgggataccgagcgcgtccgtagtggcggctggcgctagggaactgcagggtctagggtgttgttggagtggcagttggtccgaatttctcccgaagcccgcggaggagcggcgcgccgcgattcaccagcctggtcccttctgcggagagcgatgccgcttcccgacaccatgttctgcgctcagcagatccacattcccccggagctgccggacatcctgaagcaattcaccaaggctgccatccgcacccagccggccgacgtgctgcggtggtccgcgggctatttttcagctctgtcgagaggagatccacttcctgtaaaggacagaatggaaatgcccacggcaacccagaaaacagacacaggcctgactcaaggactcctgaaagttttgcacaagcagtgtcaccacaagcggtatgtggaattaacagatcttgagcagaagtggaagaacttgtgcctgccgaaggaaaaattcaaagcgctcttacaactggatccttgtgaaaacaaaatcaagtggataaactttttagcgcttggatgcagcatgcttggtgggtccttgaacactgcgctgaagcacctgtgcgagatcctcacggacgatccggagggcgggcccgctcgcatccccttcaagacgttttcctacgtttaccgctacttggccagattagactcagatgtgtctcccttggagacggaatcctaccttgcctctctaaaggaaaatatagacgccaggaagaacggcatgataggtctttcagatttcttctttccaaagaggaaacttttagaaagcattgaaaactctgaagatgtaggccattaatacagagaagaatacattttaatgtcaaaatagtgctctttaaaattctggcaccaaatacaacttaccctgaatcacaaaaaaaaaaaaaaaaaaaaaaaaaaacaaaaaaagggggggggcggtaaaaagatatcccccgggggggcccaattaaggggtaccacggtttttttggtaccagcggggcgccataaagagaaccggattataggatagaacaggggccgggtatcaaaggttgtacgagaaacacggtaaccgggaacctggggaaggacctaaatcgggg

SEQ ID NO: 59333 - DNA, 1049 bp, Homo sapiens
ccgggataccgagcgcgtccgtagtggcggctggcgctagggaactgcagggtctagggtgttgttggagtggcagttggtccgaatttctcccgaagcccgcggaggagcgggtaagagccccgcgaatccggccccaacctcgggaacgggatgggaggcggccctggccgcaagccccgcgctgctagcgggtccaccgcgtcgtagccgacagccgcccttcttcctcgcagcgcgccgcgattcaccagcctggtcccttctgcggagagcgatgccgcttcccgacaccatgttctgcgctcagcagatccacattcccccggagctgccggacatcctgaagcaattcaccaaggctgccatccgcacccagccggccgacgtgctgcggtggtccgcgggctatttttcagctctgtcgagaggagatccacttcctgtaaaggacagaatggaaatgcccacggcaacccagaaaacagacacaggcctgactcaaggactcctgaaagttttgcacaagcagtgtcaccacaagcggtatgtggaattaacagatcttgagcagaagtggaagaacttgtgcctgccgaaggaaaaattcaaagcgctcttacaactggatccttgtgaaaacaaaatcaagtggataaactttttagcgcttggatgcagcatgcttggtgggtccttgaacactgcgctgaagcacctgtgcgagatcctcacggacgatccggagggcgggcccgctcgcatccccttcaagacgttttcctacgtttaccgctacttggccagattagactcagatgtgtctcccttggagacggaatcctaccttgcctctctaaaggaaaatatagacgccaggaagaacggcatgataggtctttcagatttcttctttccaaagaggaaacttttagaaagcattgaaaactctgaagatgtaggccattaatacagagaagaatacattttaatgtcaaaatagtgctctttaaaattctggcaccaaatacaacttaccctgaatcaca

SEQ ID NO: 59334 - DNA, 1856 bp, Homo sapiens
  misc_feature (53)..(53): n is a, c, g, or t
  misc_feature (163)..(163): n is a, c, g, or t
gacttggagctaacgttggaatatattgtccagtgttctgatcacctgtaacntttttaaacaagattaatgaatcctccctttaaagacaagatgcagagtaaaaaggaacaaagctcttgggtcctgcggaagttctcatttgttcattccctaaaccatnattgggtgctgactctgcaccctgcactacctatggggaggcagagagagcagcccagggctggtggggtgggcagaggtggtggtgacaaccgcagggtccggggagctgtggtgctgcagagtaagcctggttaacagcaagaaagggccttctaggtgcaagggcaggaaagggcccaggtcctccaggctccagccccaagggagatggggtccctgaggtcttcccggcacttccccttgggaccactgccccccaagtgctggttatggtttgtccctgagccccacacctctcatctcgaattgcccacagtacagtttattgagcacctgctctgtgccaggcattggcgcaggtgccggggatgtagtcagtgaacaggtcacgccctgacccctggagttttgccctgtggagcagacagacatcagacaagcagattttaagacagtaggtcatgttcagtgccaagaggacagtaagccagggatagggaccaatgggggctggtcccagggccgccttctggcacagcacacacccctgctcgcctcagcctcctgagaagccccctggcctgtcatcaccacccagagtcttgtcccctcctcccaccctttccaaccggccatgatgccacctaggatgcaggccacagcaccaggagctggcgctcaagtgatccgccagcctccgcctcccttcctgtgccagtggagcctgcgttctgtgccctgccccacctgtcccagccgtcctcgtctccttgtcccttccacatcgtttcctctccttccttcaaactcacatcccctctgcccaccatgggctgagcctctggactccatggtccctctttttcctccttcctctgtcatccactgtcactccaaccctcctgtcctcgtggaagaccgcagctcccaagccatcccttctgtccgccttattcttgacaccatcctggctggtgtctgcagtcacatggacgacacagtactttgtccccagctctcctcctggtgcccacagcctctgcttctgcaccgccatccgggtcatgctgggccccttctcctgcccgatccgcgcacctcttctcttcttttgtgctctctgatgcggctactccgcctgacagagccacctgggacatgggtggttccatctcattccaaatccatgtcccaagcctccaaagaactgggaccctgtgcagcagccacttctcccaccactttcctgagatcacaagtcatcaaaaaagaaaaacctatgcatatagcacccatcttttcacctagaaataaagctacatttattatacgttttggtgcactttgcacaagaaaatagaatgctttatttttggaagtaagaattactgatgagcaaccataaatagtttttaaaagtagaccttttaaattatatcgcattttataaaaatgttactaagtatatgatgagaaattaccaataaatatctttatctgtttccaatttagagacgccaggaagaacggcatgataggtctttcagatttcttctttccaaagaggaaacttttagaaagcattgaaaactctgaagatgtaggccattaatacagagaagaatacattttaatgtcaaaatagtgctctttaaaattctggcaccaaatacaacttaccctgaatcaca

SEQ ID NO: 59335 - DNA, 1262 bp, Homo sapiens
ccgggataccgagcgcgtccgtagtggcggctggcgctagggaactgcagggtctagggtgttgttggagtggcagttggtccgaatttctcccgaagcccgcggaggagcgggtaagagccccgcgaatccggccccaacctcgggaacgggatgggaggcggccctggccgcaagccccgcgctgctagcgggtccaccgcgtcgtagccgacagccgcccttcttcctcgcagcgcgccgcgattcaccagcctggtcccttctgcggagagcgatgccgcttcccgacaccatgttctgcgctcagcagatccacattcccccggagctgccggacatcctgaagcaattcaccaaggctgccatccgcacccagccggccgacgtgctgcggtggtccgcgggctatttttcagctctgtcgagaggagatccacttcctgtaaaggacagaatggaaatgcccacggcaacccagaaaacagacacaggcctgactcaaggactcctgaaagttttgcacaagcagtgtcaccacaagcggtatgtggaattaacagatcttgagcagaagtggaagaacttgtgcctgccgaaggaaaaattcaaagcgctcttacaactggatccttgtgaaaacaaaatcaagtggataaactttttagcgcttggatgcagcatgcttggtgggtccttgaacactgcgctgaagcacctgtgcgagatcctcacggacgatccggagggcgggcccgctcgcatccccttcaagacgttttcctacgtttaccgctacttggccagattagactcagatgtgtctcccttggagacggaatcctaccttgcctctctaaaggaaaatatagacgccaggaagaacggcatgataggtctttcagatttcttctttccaaagaggaaacttttagaaagcattgaaaactctgaagatgtaggccattaatacagagaagaatacattttaatgtcaaaatagtgctctttaaaattctggcaccaaatacaacttaccctgaatcacaaaaaaaaaaaaaaaaaaaaaaaaaaacaaaaaaagggggggggcggtaaaaagatatcccccgggggggcccaattaaggggtaccacggtttttttggtaccagcggggcgccataaagagaaccggattataggatagaacaggggccgggtatcaaaggttgtacgagaaacacggtaaccgggaacctggggaaggacctaaatcgggg

SEQ ID NO: 59336 - DNA, 993 bp, Homo sapiens
ggggggcgctggcgtgcaaaggcccggtagcgtgtgtagcaggtgtccagcggaggtctgtagaccgcacacgccagcccattcttcgcgcggcgaggcgcgcctggtgatttctagcgagcacgtggtgcgcttgctgcgcgagagcgagtgccgctttgcgcgacgaccgagtgttcgtgcgctcagtagatcgcagcattcctcgccggagctgcacggacagtacgctggaatgccaagttgcgatcacagggactgcgcatccgcgactcgcagccgggctggacggtgcgtagcgcgctggtacgcggcgggcgtaattttgtgcatggcgtctggtcgatggagcgaggatccagcttcgctgctaaatggacgagagatgtgaagatgccctacggccatagccagcaacaacagactccaggttctgcatctcaggggactcctgaagggttctggcactaagctagtgtcaccacaagcggtatgtggaattaacagatcttgagcagaagtggaagaacttgtgcctgccgaaggaaaaattcaaagcgctcttacaactggatccttgtgaaaacaaaatcaagtggataaactttttagcgcttggatgcagcatgcttggtgggtccttgaacactgcgctgaagcacctgtgcgagatcctcacggacgatccggagggcgggcccgctcgcatccccttcaagacgttttcctacgtttaccgctacttggccagattagactcagatgtgtctcccttggagacggaatcctaccttgcctctctaaaggaaaatatagacgccaggaagaacggcatgataggtctttcagatttcttctttccaaagaggaaacttttagaaagcattgaaaactctgaagatgtaggccattaatacagagaagaatacattttaatgtcaaaatagtgctctttaaaattctggcaccaaatacaacttaccctgaatcaca

SEQ ID NO: 59337 - DNA, 436 bp, Homo sapiens
tgcactttgcacaagaaaatagaatgctttatttttggaagtaagaattactgatgagcaaccataaatagtttttaaaagtagaccttttaaattatatcgcattttataaaaatgttactaagtatatgatgagaaattaccaataaatatctttatctgtttccaatttagagacgccaggaagaacggcatgataggtctttcagatttcttctttccaaagaggaaacttttagaaagcattgaaaactctgaagatgtaggccattaatacagagaagaatacattttaatgtcaaaatagtgctctttaaaattctggcaccaaatacaacttaccctgaatcacacacctctgtagtgtgagtgtttctctaaatgggaatttagtgtgactgcttcgtggggcctgattcatgattgcttttcactg

SEQ ID NO: 59338 - DNA, 453 bp, Homo sapiens
ggccaggcttgtctcaaactcctgacctcaagtgatctgcccacctcggcccgccaaagtgctgggattttataggcatgagccaccacacctggccctgatattggtttttattacaaaaagaagacagacaattgtatcttcattatggattaaactctttattaagtatcttttttgtctcatttttttttttgccttgaattcagtggagtctgatatgaataatgctgtccttgcctgtatgtttgtttgaatgtgtctggcatgtattttattacaaatctcttagtttttattttttagggttacttttgtcaaatgtttttgttatgatcagctttagaaattgaactcttcccttatgccctggaacagtatagataacatataaattacattttccttagagaatgaaagagcttaaacagaaaaccatctgaggcccagtgc

SEQ ID NO: 59339 - DNA, 238 bp, Homo sapiens
atgcattaagaaaagacagccaaatgacagactgataaaatattttcattacaaaattggttgagaactaccgtgtgacgtaaatgaagtttctattacacatgtactaacagagacttttcattacatattctaggatatatttaaaatatatgtatattttgatattaagggaatatattttgttgtcattttacaatgtgtaactacatatatattacaaaaatggccaacccaa

SEQ ID NO: 59340 - DNA, 518 bp, Homo sapiens
cttttcctgtcatgaggggaacttacctgattttattgaattatttggtgccattgagttccttattgtttccctctgacctagatttctgggtgtgcgccagtaacacgactgtgattgttgctgctttataacattgtctgtggtcagtccaaacaagagtttaaaataattgaatgaaatggattttaaacaatggtccccccaccctcaccccgtggcactcggccaaaggaagaggaaaagttctctgttaaagaaaatgaatcagagaagaggcccagaccgtgcctccgaaaattctcattgtagggactaagtcctctcactctgaactcacacccgtctgttcgcagcctgacctcatatcctggtctggatgtgcggcctcaccggggtgtcgtgcgcacgtgtggttgtcctgtgggtgccagctctgacttcctccccagacacccactgcctcagccttaatcacaggacgcgcgttgagtagaaatgagaccagttagtattgg

SEQ ID NO: 59341 - DNA, 632 bp, Homo sapiens
agagcaggccggtttctccagagtccccataattagaatattggtttatcagtgtgagtgcaactcttcattgatcatctcctccgcaccaggcacaggcctggaaccttacattatttcatttcaaccttgacagtcctgcaaggtacatattgttatccccactttacagatgaaaaaatttgggttcagagaggttaaaaaaacttactcaaggccaggcgcatggtggctcacgcctgtaatcccagcagtttgggaggctgaggccaccacacccggccaaattcagaatgttctaaatccaaagtctagtctctctctactgcaccatgatgcctttaaaaagaatctaggggctgggcacagtggcttacgcttgtaacccagcactttgggaggagttcacttgagctcaggagttcgagaccagcctaggcaacatagtgagacccccgtctctactaaaaatgaaagcaaattagctgggtatggtggtccatgtctgtactgtggtctaagctactcgggaagttgaagcaggaggatcacttgagcccagaaggtcaaggctgtagtgagccatgattgtgccactgcattccagcctgggcaacacagtgagaccctgt

SEQ ID NO: 59342 - DNA, 460 bp, Homo sapiens
tttgctcatggccttttgctctgttttcaaagccagcagcatagcatcttcaaatctctctctgactttgaccctcccgctgactttgatcctcctccttcccactttcactgcgaggctgcttgtgattacattgagcccacccagaatgcccagggaaacttccctatctcaatatccttagcttaatcacatctgtaaagtcctctgtgccgtgtaaagtgacatagtcacacattctagggattacaatgtagacatccttgggaaggcattattctgcctatcatagaaaacatacattttgaactttgaaaacagatatcctggattttctcagaagctaactaccatatacatcaaagaagattttattttcttttattgccgataattaatcctcatttcagaaatcacattactgactgtagcatggctcactatgtttgagctgtccaaa

SEQ ID NO: 59343 - DNA, 621 bp, Homo sapiens
caagagaaaggaaccctcttgtctacttttaatcctctttgaattacttacaatatctgatgccttgtaatgccatgtaaatagttgttatactgtattgttttatttgtattatgtttattgttgcatttttattttttaaagatttgcagaatattttcgatctgcgattgtttgaatctgcagatgcagagggcttactgtgtatgtcttcttaacctcctcctagttgtctttcagctccatatttacttatttttaaaattacctacagtaaaatttactttttttgtggacacttctgagttttgacagaaagtagatttgtgtaaacagcatcacaaagtacagaacaggtctgtccctccccaaaaaatttttttgtggccccctttagggtcaaccctactctcttaccatcagcccctggcaaccaaccagtgactgcactttatcctatagttttgccttttccagtatgttatgtaaatggaactgagttgagcttctttcgcttgatacagtgtatttagatgcatccattttattgtgtgtatcaatagtgcattcctttttattgtggaataattaataaacattgattaaaagaccactatatga

SEQ ID NO: 59344 - DNA, 412 bp, Homo sapiens
gtccctttgcccttcctttgtcttctgccatgattgtgaggcttccctagccacgtggaactgagtctattaaacctctttcctttataacttacccagtcttgggtatgtctttattaacaacataagattggactaatacagtagaggaaatgtaagtgtgcttatttcctcatccttcttagtagcaagtcaataaatactctcctaagtcaaattgtcattaaaaataactatccaaatctcttgttggtttatttaatcttctttattaactttagagtgttctttcgggaattaatcatggtttaaaaaatatcaaacattcaacaactctaattttactttaatgtctttttttctaatatatctaataaaattgcattaaatttttaagttgaaattgcatgta

SEQ ID NO: 59345 - DNA, 716 bp, Homo sapiens
gctttcaagacctgatgctttgttttgaacaggttgatacatctaggagtgaaatacatcaccgctttccctgctcccgccgccattaaaattgtgtttggcatctgaccaccaagatacagatatttcctagactgttttgcagctaggtacttagaagtttttctaagttatttaaacttctcaccacacaaaatctggatttgtatctgtcacgtagtaattgcttgataaatcatttctctttcctctggagaaaaatatctgctttctttaaaataaatgttccatccatgcagctaagcagctaaggacacgaacagccactgatacaggccaactcatcagtagattattgagatttcatactaggacctttcattggctgaacaaagacaaagacagaaatcaaggaaggtcaaagaagcagtcagttttctggcacccaaagttgttggagaagggtacagagtcggtaaataagtcatatgacagacaggcagtattttcttattttaataacaagtttaaaaatcccacttcttgtacttaccttctgtctgacgtcatcagtattttaaaatgccaactgggatcaagttcaacactgcattactgaagaatccagattatctacatttcaagtgccaaatgaaagaaagaacccagaaaataaaacaatatgatgataacagtaaaattttttaaaatgaaat

SEQ ID NO: 59346 - DNA, 516 bp, Homo sapiens
ctcatttatatagatgtttctcagtttaatattagacatttaagttgtttatgattttcactatttaaaatcaggttaggctgtggcatgggtgaaagtggccactttggcggtgcctcgtcctcacagctaatgggaagcaagcgtgttctagaaagccagagtctccagcgacccctcttaccaccatcatggcagtcccaggttgcaacaaggacagtgtcagagcaggctgtaaaaaatatggcttcctggtcacctgacttttgaatgctgcaactttctccaagtagaccccaaagggacatagttttggatgtcagcagtgcaaacagtgaagattgatgaataaaatgaagaatgaataaattgcaagcattactggaaaaaaagaataaatgaagaggagaagaaaaagcaaagagaaaagcaatttttttaaaaaaggaaaaggtcttattcatccagttccactgaaaaggacatttcaaaagaaacaaaaatatcagaacaaag

SEQ ID NO: 59347 - DNA, 1822 bp, Homo sapiens
cggccgcaaacgtttctttttcagactgcatccctagaagaaaatggaaaggtatacggaaactggacttttggaaccattgtttttacagtcttagtattcactgtaaccctgaagcttgccttggatacccgattctggacgtggataaatcactttgtgatttggggttctttagccttctatgtatttttctcattcttctggggaggaattatttggccttttctcaagcaacagagaatgtattttgtatttgcccaaatgctgtcttctgtatccacatggttggctataattcttctaatatttatcagcctgttccctgagattcttctgatagtattaaagaatgtaagaagaagaagtgccaggagaaatctgagctgtagaagggcatctgactcattatccgccagaccttcagtcagacctcttcttttacgaacattctcagacgaatctaatgtattgtaacagaatccgaatcttgaactgcctatgttattgtcctacaagcatactgacagtggttacagctaaaaaagaaagcatgaagaaacaactacaaaaagttatcatctcaggatacttgatatgcaacacactaaaccactctcatgtctagagttcacaataaatgttcattaaaataccaaatgattctcttaagcatttaccattattgtaagtagcctttatggccaaagctgtaagttaagaattatatgaaagttgaaagcaagaatacttagaattctggctttagttagagtaatataactcaaatgggtgctcttttaacccatgaactttgtgaatggatttaaatacaatagtatgaagtagaagttatgcaatgagaatgaatagattttgctaatactactttttttgcctggcagaagaaatagactatttggatcacatttctcattcctcctaaatgatcatcttaattttttttcccaagtacataaggaatacttgaaaatacagaataactaaatagtatcaatgcatcagacagaatagttaatcccttctgtttacccatgtgctactaatgtcttggtagaatattcttgccaaaaaaataccttgaacgcttatgtggaaagtgttaacttacgggtatttttgtgggaatagaaaaaaattgtttattttttattcttctgaattaaaccccacttatgggtgtaagcctactagacttgaaaataaagtataaaacatttccaatcacttagtagcccctcaaagtagttagaaaataaacagatttttccagtgttgattttactgggatctgcagtaaggtggtttaaaccatagttatataaaaataaaggtcattctgaatatcagccttttataattttatgtgaagaggaagaaatatagcttattttaaacttttgacggtttttatttgaaagagattgcatttatgcatatatgcagtgctttttcttaaacttggccaatttggaaagggggaaggagccaccccaaaacggtggttcagcttgtagagccatgactctgtgaagatgaatgttgtctcttaacttggacagggaaatggtctaactctaaaccatgtaactgaccttagtaaagtccttgactaactgaactagaaggaaggtttagccttctaattagttcacttgaaacataaatgtgaaatgtcttcattcaatgttaaacacatacttttttggatataaatgaccatatttatttgactgctagtttttttgttttttttttgtctttctggcatgcctgtactattattaatgtttatattgta

SEQ ID NO: 59348 - DNA, 1794 bp, Homo sapiens
cacaccacctgagtcaatttagtcacacaggactaaaatctaaatgagcaagatgttgttattagttagtattcactgtaaccctgaagcttgccttggatacccgattctggacgtggataaatcactttgtgatttggggttctttagccttctatgtatttttctcattcttctggggaggaattatttggccttttctcaagcaacagagaatgtattttgtatttgcccaaatgctgtcttctgtatccacatggttggctataattcttctaatatttatcagcctgttccctgagattcttctgatagtattaaagaatgtaagaagaagaagtgccaggagaaatctgagctgtagaagggcatctgactcattatccgccagaccttcagtcagacctcttcttttacgaacattctcagacgaatctaatgtattgtaacagaatccgaatcttgaactgcctatgttattgtcctacaagcatactgacagtggttacagctaaaaaagaaagcatgaagaaacaactacaaaaagttatcatctcaggatacttgatatgcaacacactaaaccactctcatgtctagagttcacaataaatgttcattaaaataccaaatgattctcttaagcatttaccattattgtaagtagcctttatggccaaagctgtaagttaagaattatatgaaagttgaaagcaagaatacttagaattctggctttagttagagtaatataactcaaatgggtgctcttttaacccatgaactttgtgaatggatttaaatacaatagtatgaagtagaagttatgcaatgagaatgaatagattttgctaatactactttttttgcctggcagaagaaatagactatttggatcacatttctcattcctcctaaatgatcatcttaattttttttcccaagtacataaggaatacttgaaaatacagaataactaaatagtatcaatgcatcagacagaatagttaatcccttctgtttacccatgtgctactaatgtcttggtagaatattcttgccaaaaaaataccttgaacgcttatgtggaaagtgttaacttacgggtatttttgtgggaatagaaaaaaattgtttattttttattcttctgaattaaaccccacttatgggtgtaagcctactagacttgaaaataaagtataaaacatttccaatcacttagtagcccctcaaagtagttagaaaataaacagatttttccagtgttgattttactgggatctgcagtaaggtggtttaaaccatagttatataaaaataaaggtcattctgaatatcagccttttataattttatgtgaagaggaagaaatatagcttattttaaacttttgacggtttttatttgaaagagattgcatttatgcatatatgcagtgctttttcttaaacttggccaatttggaaagggggaaggagccaccccaaaacggtggttcagcttgtagagccatgactctgtgaagatgaatgttgtctcttaacttggacagggaaatggtctaactctaaaccatgtaactgaccttagtaaagtccttgactaactgaactagaaggaaggtttagccttctaattagttcacttgaaacataaatgtgaaatgtcttcattcaatgttaaacacatacttttttggatataaatgaccatatttatttgactgctagtttttttgttttttttttgtctttctggcatgcctgtactattattaatgtttatattgta

SEQ ID NO: 59349 - DNA, 1625 bp, Homo sapiens
caacttaaggctaggtacgaggctgggtgttgaatcccttactcatccctgcacagatgaggaaaccaaggcatggagcagttcccagagtcgaatctagatctcatctgtcatccgggtcttatcctttgctctgtttttctcttcaggctctggaaaatcagatctgtgacttaatcttcctctccctggccctcacccacttagtttctttttcattcctgctccctgccttaactcctcctcccactgcccctgatcccaggcccaggcttttacaacctggtgctcagcttccccatcagtgaaaaggggtggctagagtaactaacctcagcaggccgtccagtcctgatagtctgtggatttcggatccttctcaggaagcttcatgtctaatggagactataattataactcctgttctgcatagagcatttgcatcaaaggctttccatacccctccctcccctggtcctcataagatccttgaagcaggttcctattcctcattggcaacatggcaaacagatcacaggagtcaaagggccttgctcaaggtccccagcttcagccccaggccctaagccagcgtcagaacagtcaatctgcatttttcatcagtcattctatagtgacatcatcccagactgccttctgtattcccctgtgtacagtctccttctgtttctaggtttagaagttcagaggtgactgtgtttctccatttccacagccaaatgggggaagaggtgaggctaggggagtgctgtgctgattctccagccatggtcagacaggtcacccaggagcctcgaggaaagccctggagggaatcacatgtgtactttttcatgaagctttttgcaaagcacatctgcgatacactagtttattgaactaatgtccaggagtagacgtgattggtggccaagttatttggggacacctaaacagatcagtgacctgaatgacttctcagaacctttaatatgccaatgtgtgtggcaaacttacaagaagggagctaagtatccagcctctcccaaacctctttgaacaaagcttctgtccctcccacacctctcacctcacaggcacatcaggctgcagaatgcgctttagaaagcattgttttagtccaggcacaagttgtcacgcctgtaatcccagcactttgggaggccgaggtgggtggatcacaaggttgggagattgagaccatcctggctaacacagtgaaaccctgtctctactaaaaaaatacaaaaaattagcttggcgtggtggtgggcgcctgtagtcccagcagcttgggaggctgaggctggagaatggtgtgaacccaggaggcggagcttgcagtgagccaagatcgcgccactgcactccagcccgggtgacagagcaagactccgtctcaaaaaaaagaaaagaaaaaagaaagcattgttttaattgagaggggcagggctggagaaggagcaagttgtggggagccaggcttccctcacgcagcctgtggtggatgtgggaaggagatcaacttctcctcactctgggacagacgatgtatggaaactaaaaagaacatgcggcaccttatttatgtgacttttgtgttt

SEQ ID NO: 59350 - DNA, 2100 bp, Homo sapiens
acggcgggcggccgccccagctcaggctcaagacagcgcttccaggttcagtttcagggtctcgccggcagccccagccggcgggcgcggagcgggcagcggggcccggatcgcaggctcctctgggggccccggagttgggaagcggcgtccgggagcccccggaggaggatgggctgcagacacagcaggctgagcagctgcaaacccccgaaaaagaagcgccaagaaccagaaccagaacagccacccagaccagagccccatgaattaggtcccctcaatggggacacagctataactgtccagctctgtgcatcagaggaggctgagcggcaccagaaggatataaccagaattctccagcaacatgaggaggaaaagaagaaatgggcacaacaggtggagaaggaaagggagctagagcttcgagacagactggatgagcagcaaagggtcctgggcacaggggcaagcttggtggttgtgagtccattcatctatcagagctggaacctcatccctgcacagatgaggaaaccaaggcatggagcagttcccagagtcgaatctagatctcatctgtcatccgggtcttatcctttgctctgtttttctcttcaggctctggaaaatcagatctgtgacttaatcttcctctccctggccctcacccacttagtttctttttcattcctgctccctgccttaactcctcctcccactgcccctgatcccaggcccaggcttttacaacctggtgctcagcttccccatcagtgaaaaggggtggctagagtaactaacctcagcaggccgtccagtcctgatagtctgtggatttcggatccttctcaggaagcttcatgtctaatggagactataattataactcctgttctgcatagagcatttgcatcaaaggctttccatacccctccctcccctggtcctcataagatccttgaagcaggttcctattcctcattggcaacatggcaaacagatcacaggagtcaaagggccttgctcaaggtccccagcttcagccccaggccctaagccagcgtcagaacagtcaatctgcatttttcatcagtcattctatagtgacatcatcccagactgccttctgtattcccctgtgtacagtctccttctgtttctaggtttagaagttcagaggtgactgtgtttctccatttccacagccaaatgggggaagaggtgaggctaggggagtgctgtgctgattctccagccatggtcagacaggtcacccaggagcctcgaggaaagccctggagggaatcacatgtgtactttttcatgaagctttttgcaaagcacatctgcgatacactagtttattgaactaatgtccaggagtagacgtgattggtggccaagttatttggggacacctaaacagatcagtgacctgaatgacttctcagaacctttaatatgccaatgtgtgtggcaaacttacaagaagggagctaagtatccagcctctcccaaacctctttgaacaaagcttctgtccctcccacacctctcacctcacaggcacatcaggctgcagaatgcgctttagaaagcattgttttagtccaggcacaagttgtcacgcctgtaatcccagcactttgggaggccgaggtgggtggatcacaaggttgggagattgagaccatcctggctaacacagtgaaaccctgtctctactaaaaaaatacaaaaaattagcttggcgtggtggtgggcgcctgtagtcccagcagcttgggaggctgaggctggagaatggtgtgaacccaggaggcggagcttgcagtgagccaagatcgcgccactgcactccagcccgggtgacagagcaagactccgtctcaaaaaaaagaaaagaaaaaagaaagcattgttttaattgagaggggcagggctggagaaggagcaagttgtggggagccaggcttccctcacgcagcctgtggtggatgtgggaaggagatcaacttctcctcactctgggacagacgatgtatggaaactaaaaagaacatgcggcaccttatttatgtgacttttgtgttt

SEQ ID NO: 59351 - DNA, 586 bp, Homo sapiens
acggcgggcggccgccccagctcaggctcaagacagcgcttccaggttcagtttcagggtctcgccggcagccccagccggcgggcgcggagcgggcagcggggcccggatcgcaggctcctctgggggccccggagttgggaagcggcgtccgggagcccccggaggaggatgggctgcagacacagcaggctgagcagctgcaaacccccgaaaaaggtaaagggcgccggcggagaagtttgctttcagaggagaggggagtgcggaatcgctccgccgcagaggactcggcgccccgggctctctctggtcggcccgggataccggacggagaacctggagaggccagctcagagacgagggaggctctgctgggaggcgccctttaccccggcccgagccgcaccaagcagccgagtttacaaacacggcacccgggccagggaaaggcagctgattcccgctgcctcgggtggggagatgtcgtgtgtctgtggcaggtgccctctgctttcggtctggggctgttcgctgtgtggccatggacaagtgacttgacctctctgggccttcggcttcctcc

SEQ ID NO: 59352 - DNA, 3467 bp, Homo sapiens
acggcgggcggccgccccagctcaggctcaagacagcgcttccaggttcagtttcagggtctcgccggcagccccagccggcgggcgcggagcgggcagcggggcccggatcgcaggctcctctgggggccccggagttgggaagcggcgtccgggagcccccggaggaggatgggctgcagacacagcaggctgagcagctgcaaacccccgaaaaagaagcgccaagaaccagaaccagaacagccacccagaccagagccccatgaattaggtcccctcaatggggacacagctataactgtccagctctgtgcatcagaggaggctgagcggcaccagaaggatataaccagaattctccagcaacatgaggaggaaaagaagaaatgggcacaacaggtggagaaggaaagggagctagagcttcgagacagactggatgagcagcaaagggtcctggaaggaaagaatgaagaggccctgcaagtcctccgggcctcatatgaacaggagaaagaagcgcttacccactctttccgggaggccagttctacccagcaggagaccatagacagactgacctcacagctggaggctttccaggccaaaatgaagagggtggaggagtccattctgagccgaaactataagaaacatatccaggattatgggagccccagccagttctgggagcaggagctggagagcttacactttgtcatcgagatgaagaatgagcgtattcatgagctggacaggcggctgatcctcatggaaacagtgaaagagaaaaatctgatattggaggaaaaaattacgaccctgcaacaggaaaatgaggacctccatgtccgaagccgcaaccaggtggtcctgtcaaggcagctgtcagaagacctgcttctcacgcgtgaggccctggagaaggaggtgcagctgcggcgacagctccagcaggagaaggaggagctgttgtaccgggtccttggggccaatgcctcgcctgccttccctctggcccctgtcactcccactgaggtctctttcctcgccacatagggtgcagggcctgggcccaccacgacgcctgaagtcacagctccttccaaggtttttctggagaagacagcaggagcctctcagttcttttccaggaaggaacgagggtgggagcgagatggagatcctgggtgtgtgcccagtgagccctggggccttgagttacatggaatcacccacagggttttggaggccccgagaagcgtcttcccttgagttggccaagggaataagcaagaggagacatttcctccctgccccagcactctgtcccaatccgagaagttccgaggctttcccaggggcagtctgtgtcacgctggccatttgacataaaggagacagcccctggtcccagcttgtcagctctgctgccgacttgctgacttatcaacttcctctaggtgtttccactccaccctggcctgctcagagcctcagtttacccctgcattaaaatggtggggggactggtcaaaggactcttatgtcactgcagtgtcccattctaggattgtctgaaggccagagtaggggttggggggagtgtggacaaaccccgcaaatcagagtggggaaggtgagtggtagagagggggtctctgaaggcccttggggctgacagggccaggcagcctccccagctgaggcatcattcctgggccagagtcgtgtccaccaagggacagtagccagagctcctcttcctttaccaggcaaggtgcatcccctcagccctcctggcccttcagtcttggtgccacctgggcacaggggcaagcttggtggttgtgagtccattcatctatcagagctggaacctcatccctgcacagatgaggaaaccaaggcatggagcagttcccagagtcgaatctagatctcatctgtcatccgggtcttatcctttgctctgtttttctcttcaggctctggaaaatcagatctgtgacttaatcttcctctccctggccctcacccacttagtttctttttcattcctgctccctgccttaactcctcctcccactgcccctgatcccaggcccaggcttttacaacctggtgctcagcttccccatcagtgaaaaggggtggctagagtaactaacctcagcaggccgtccagtcctgatagtctgtggatttcggatccttctcaggaagcttcatgtctaatggagactataattataactcctgttctgcatagagcatttgcatcaaaggctttccatacccctccctcccctggtcctcataagatccttgaagcaggttcctattcctcattggcaacatggcaaacagatcacaggagtcaaagggccttgctcaaggtccccagcttcagccccaggccctaagccagcgtcagaacagtcaatctgcatttttcatcagtcattctatagtgacatcatcccagactgccttctgtattcccctgtgtacagtctccttctgtttctaggtttagaagttcagaggtgactgtgtttctccatttccacagccaaatgggggaagaggtgaggctaggggagtgctgtgctgattctccagccatggtcagacaggtcacccaggagcctcgaggaaagccctggagggaatcacatgtgtactttttcatgaagctttttgcaaagcacatctgcgatacactagtttattgaactaatgtccaggagtagacgtgattggtggccaagttatttggggacacctaaacagatcagtgacctgaatgacttctcagaacctttaatatgccaatgtgtgtggcaaacttacaagaagggagctaagtatccagcctctcccaaacctctttgaacaaagcttctgtccctcccacacctctcacctcacaggcacatcaggctgcagaatgcgctttagaaagcattgttttagtccaggcacaagttgtcacgcctgtaatcccagcactttgggaggccgaggtgggtggatcacaaggttgggagattgagaccatcctggctaacacagtgaaaccctgtctctactaaaaaaatacaaaaaattagcttggcgtggtggtgggcgcctgtagtcccagcagcttgggaggctgaggctggagaatggtgtgaacccaggaggcggagcttgcagtgagccaagatcgcgccactgcactccagcccgggtgacagagcaagactccgtctcaaaaaaaagaaaagaaaaaagaaagcattgttttaattgagaggggcagggctggagaaggagcaagttgtggggagccaggcttccctcacgcagcctgtggtggatgtgggaaggagatcaacttctcctcactctgggacagacgatgtatggaaactaaaaagaacatgcggcaccttatttatgtgacttttgtgttt

SEQ ID NO: 59353 - DNA, 3438 bp, Homo sapiens
acggcgggcggccgccccagctcaggctcaagacagcgcttccaggttcagtttcagggtctcgccggcagccccagccggcgggcgcggagcgggcagcggggcccggatcgcaggctcctctgggggccccggagttgggaagcggcgtccgggagcccccggaggaggatgggctgcagacacagcaggctgagcagctgcaaacccccgaaaaagaagcgccaagaaccagaaccagaacagccacccagaccagagccccatgaattaggtcccctcaatggggacacagctataactgtccagctctgtgcatcagaggaggctgagcggcaccagaaggatataaccagaattctccagcaacatgaggaggaaaagaagaaatgggcacaacaggtggagaaggaaagggagctagagcttcgagacagactggatgagcagcaaagggtcctggaaggaaagaatgaagaggccctgcaagtcctccgggcctcatatgaacaggagaaagaagcgcttacccactctttccgggaggccagttctacccagcaggagaccatagacagactgacctcacagctggaggctttccaggccaaaatgaagagggtggaggagtccattctgagccgaaactataagaaacatatccaggattatgggagccccagccagttctgggagcaggagctggagagcttacactttgtcatcgagatgaagaatgagcgtattcatgagctggaaagagaaaaatctgatattggaggaaaaaattacgaccctgcaacaggaaaatgaggacctccatgtccgaagccgcaaccaggtggtcctgtcaaggcagctgtcagaagacctgcttctcacgcgtgaggccctggagaaggaggtgcagctgcggcgacagctccagcaggagaaggaggagctgttgtaccgggtccttggggccaatgcctcgcctgccttccctctggcccctgtcactcccactgaggtctctttcctcgccacatagggtgcagggcctgggcccaccacgacgcctgaagtcacagctccttccaaggtttttctggagaagacagcaggagcctctcagttcttttccaggaaggaacgagggtgggagcgagatggagatcctgggtgtgtgcccagtgagccctggggccttgagttacatggaatcacccacagggttttggaggccccgagaagcgtcttcccttgagttggccaagggaataagcaagaggagacatttcctccctgccccagcactctgtcccaatccgagaagttccgaggctttcccaggggcagtctgtgtcacgctggccatttgacataaaggagacagcccctggtcccagcttgtcagctctgctgccgacttgctgacttatcaacttcctctaggtgtttccactccaccctggcctgctcagagcctcagtttacccctgcattaaaatggtggggggactggtcaaaggactcttatgtcactgcagtgtcccattctaggattgtctgaaggccagagtaggggttggggggagtgtggacaaaccccgcaaatcagagtggggaaggtgagtggtagagagggggtctctgaaggcccttggggctgacagggccaggcagcctccccagctgaggcatcattcctgggccagagtcgtgtccaccaagggacagtagccagagctcctcttcctttaccaggcaaggtgcatcccctcagccctcctggcccttcagtcttggtgccacctgggcacaggggcaagcttggtggttgtgagtccattcatctatcagagctggaacctcatccctgcacagatgaggaaaccaaggcatggagcagttcccagagtcgaatctagatctcatctgtcatccgggtcttatcctttgctctgtttttctcttcaggctctggaaaatcagatctgtgacttaatcttcctctccctggccctcacccacttagtttctttttcattcctgctccctgccttaactcctcctcccactgcccctgatcccaggcccaggcttttacaacctggtgctcagcttccccatcagtgaaaaggggtggctagagtaactaacctcagcaggccgtccagtcctgatagtctgtggatttcggatccttctcaggaagcttcatgtctaatggagactataattataactcctgttctgcatagagcatttgcatcaaaggctttccatacccctccctcccctggtcctcataagatccttgaagcaggttcctattcctcattggcaacatggcaaacagatcacaggagtcaaagggccttgctcaaggtccccagcttcagccccaggccctaagccagcgtcagaacagtcaatctgcatttttcatcagtcattctatagtgacatcatcccagactgccttctgtattcccctgtgtacagtctccttctgtttctaggtttagaagttcagaggtgactgtgtttctccatttccacagccaaatgggggaagaggtgaggctaggggagtgctgtgctgattctccagccatggtcagacaggtcacccaggagcctcgaggaaagccctggagggaatcacatgtgtactttttcatgaagctttttgcaaagcacatctgcgatacactagtttattgaactaatgtccaggagtagacgtgattggtggccaagttatttggggacacctaaacagatcagtgacctgaatgacttctcagaacctttaatatgccaatgtgtgtggcaaacttacaagaagggagctaagtatccagcctctcccaaacctctttgaacaaagcttctgtccctcccacacctctcacctcacaggcacatcaggctgcagaatgcgctttagaaagcattgttttagtccaggcacaagttgtcacgcctgtaatcccagcactttgggaggccgaggtgggtggatcacaaggttgggagattgagaccatcctggctaacacagtgaaaccctgtctctactaaaaaaatacaaaaaattagcttggcgtggtggtgggcgcctgtagtcccagcagcttgggaggctgaggctggagaatggtgtgaacccaggaggcggagcttgcagtgagccaagatcgcgccactgcactccagcccgggtgacagagcaagactccgtctcaaaaaaaagaaaagaaaaaagaaagcattgttttaattgagaggggcagggctggagaaggagcaagttgtggggagccaggcttccctcacgcagcctgtggtggatgtgggaaggagatcaacttctcctcactctgggacagacgatgtatggaaactaaaaagaacatgcggcaccttatttatgtgacttttgtgttt

SEQ ID NO: 59354 - DNA, 3182 bp, Homo sapiens
tcgtggtgctgctgctgtgaagatatcattcaggaatacaaaaatatagccttctaagttaaaagcaaggtcagacgcagctgctatgaaagccccgagaagaaatgggcacaacaggtggagaaggaaagggagctagagcttcgagacagactggatgagcagcaaagggtcctggaaggaaagaatgaagaggccctgcaagtcctccgggcctcatatgaacaggagaaagaagcgcttacccactctttccgggaggccagttctacccagcaggagaccatagacagactgacctcacagctggaggctttccaggccaaaatgaagagggtggaggagtccattctgagccgaaactataagaaacatatccaggattatgggagccccagccagttctgggagcaggagctggagagcttacactttgtcatcgagatgaagaatgagcgtattcatgagctggacaggcggctgatcctcatggaaacagtgaaagagaaaaatctgatattggaggaaaaaattacgaccctgcaacaggaaaatgaggacctccatgtccgaagccgcaaccaggtggtcctgtcaaggcagctgtcagaagacctgcttctcacgcgtgaggccctggagaaggaggtgcagctgcggcgacagctccagcaggagaaggaggagctgttgtaccgggtccttggggccaatgcctcgcctgccttccctctggcccctgtcactcccactgaggtctctttcctcgccacatagggtgcagggcctgggcccaccacgacgcctgaagtcacagctccttccaaggtttttctggagaagacagcaggagcctctcagttcttttccaggaaggaacgagggtgggagcgagatggagatcctgggtgtgtgcccagtgagccctggggccttgagttacatggaatcacccacagggttttggaggccccgagaagcgtcttcccttgagttggccaagggaataagcaagaggagacatttcctccctgccccagcactctgtcccaatccgagaagttccgaggctttcccaggggcagtctgtgtcacgctggccatttgacataaaggagacagcccctggtcccagcttgtcagctctgctgccgacttgctgacttatcaacttcctctaggtgtttccactccaccctggcctgctcagagcctcagtttacccctgcattaaaatggtggggggactggtcaaaggactcttatgtcactgcagtgtcccattctaggattgtctgaaggccagagtaggggttggggggagtgtggacaaaccccgcaaatcagagtggggaaggtgagtggtagagagggggtctctgaaggcccttggggctgacagggccaggcagcctccccagctgaggcatcattcctgggccagagtcgtgtccaccaagggacagtagccagagctcctcttcctttaccaggcaaggtgcatcccctcagccctcctggcccttcagtcttggtgccacctgggcacaggggcaagcttggtggttgtgagtccattcatctatcagagctggaacctcatccctgcacagatgaggaaaccaaggcatggagcagttcccagagtcgaatctagatctcatctgtcatccgggtcttatcctttgctctgtttttctcttcaggctctggaaaatcagatctgtgacttaatcttcctctccctggccctcacccacttagtttctttttcattcctgctccctgccttaactcctcctcccactgcccctgatcccaggcccaggcttttacaacctggtgctcagcttccccatcagtgaaaaggggtggctagagtaactaacctcagcaggccgtccagtcctgatagtctgtggatttcggatccttctcaggaagcttcatgtctaatggagactataattataactcctgttctgcatagagcatttgcatcaaaggctttccatacccctccctcccctggtcctcataagatccttgaagcaggttcctattcctcattggcaacatggcaaacagatcacaggagtcaaagggccttgctcaaggtccccagcttcagccccaggccctaagccagcgtcagaacagtcaatctgcatttttcatcagtcattctatagtgacatcatcccagactgccttctgtattcccctgtgtacagtctccttctgtttctaggtttagaagttcagaggtgactgtgtttctccatttccacagccaaatgggggaagaggtgaggctaggggagtgctgtgctgattctccagccatggtcagacaggtcacccaggagcctcgaggaaagccctggagggaatcacatgtgtactttttcatgaagctttttgcaaagcacatctgcgatacactagtttattgaactaatgtccaggagtagacgtgattggtggccaagttatttggggacacctaaacagatcagtgacctgaatgacttctcagaacctttaatatgccaatgtgtgtggcaaacttacaagaagggagctaagtatccagcctctcccaaacctctttgaacaaagcttctgtccctcccacacctctcacctcacaggcacatcaggctgcagaatgcgctttagaaagcattgttttagtccaggcacaagttgtcacgcctgtaatcccagcactttgggaggccgaggtgggtggatcacaaggttgggagattgagaccatcctggctaacacagtgaaaccctgtctctactaaaaaaatacaaaaaattagcttggcgtggtggtgggcgcctgtagtcccagcagcttgggaggctgaggctggagaatggtgtgaacccaggaggcggagcttgcagtgagccaagatcgcgccactgcactccagcccgggtgacagagcaagactccgtctcaaaaaaaagaaaagaaaaaagaaagcattgttttaattgagaggggcagggctggagaaggagcaagttgtggggagccaggcttccctcacgcagcctgtggtggatgtgggaaggagatcaacttctcctcactctgggacagacgatgtatggaaactaaaaagaacatgcggcaccttatttatgtgacttttgtgttt

SEQ ID NO: 59355 - DNA, 2815 bp, Homo sapiens
agcactttgggaggctaaggcgggcagatcacctgaggtcaggagttcaagatcagcttggtcaacatggtaaaaccctgtctctactaaaaatacaaaaattagacaggcggctgatcctcatggaaacagtgaaagagaaaaatctgatattggaggaaaaaattacgaccctgcaacaggaaaatgaggacctccatgtccgaagccgcaaccaggtggtcctgtcaaggcagctgtcagaagacctgcttctcacgcgtgaggccctggagaaggaggtgcagctgcggcgacagctccagcaggagaaggaggagctgttgtaccgggtccttggggccaatgcctcgcctgccttccctctggcccctgtcactcccactgaggtctctttcctcgccacatagggtgcagggcctgggcccaccacgacgcctgaagtcacagctccttccaaggtttttctggagaagacagcaggagcctctcagttcttttccaggaaggaacgagggtgggagcgagatggagatcctgggtgtgtgcccagtgagccctggggccttgagttacatggaatcacccacagggttttggaggccccgagaagcgtcttcccttgagttggccaagggaataagcaagaggagacatttcctccctgccccagcactctgtcccaatccgagaagttccgaggctttcccaggggcagtctgtgtcacgctggccatttgacataaaggagacagcccctggtcccagcttgtcagctctgctgccgacttgctgacttatcaacttcctctaggtgtttccactccaccctggcctgctcagagcctcagtttacccctgcattaaaatggtggggggactggtcaaaggactcttatgtcactgcagtgtcccattctaggattgtctgaaggccagagtaggggttggggggagtgtggacaaaccccgcaaatcagagtggggaaggtgagtggtagagagggggtctctgaaggcccttggggctgacagggccaggcagcctccccagctgaggcatcattcctgggccagagtcgtgtccaccaagggacagtagccagagctcctcttcctttaccaggcaaggtgcatcccctcagccctcctggcccttcagtcttggtgccacctgggcacaggggcaagcttggtggttgtgagtccattcatctatcagagctggaacctcatccctgcacagatgaggaaaccaaggcatggagcagttcccagagtcgaatctagatctcatctgtcatccgggtcttatcctttgctctgtttttctcttcaggctctggaaaatcagatctgtgacttaatcttcctctccctggccctcacccacttagtttctttttcattcctgctccctgccttaactcctcctcccactgcccctgatcccaggcccaggcttttacaacctggtgctcagcttccccatcagtgaaaaggggtggctagagtaactaacctcagcaggccgtccagtcctgatagtctgtggatttcggatccttctcaggaagcttcatgtctaatggagactataattataactcctgttctgcatagagcatttgcatcaaaggctttccatacccctccctcccctggtcctcataagatccttgaagcaggttcctattcctcattggcaacatggcaaacagatcacaggagtcaaagggccttgctcaaggtccccagcttcagccccaggccctaagccagcgtcagaacagtcaatctgcatttttcatcagtcattctatagtgacatcatcccagactgccttctgtattcccctgtgtacagtctccttctgtttctaggtttagaagttcagaggtgactgtgtttctccatttccacagccaaatgggggaagaggtgaggctaggggagtgctgtgctgattctccagccatggtcagacaggtcacccaggagcctcgaggaaagccctggagggaatcacatgtgtactttttcatgaagctttttgcaaagcacatctgcgatacactagtttattgaactaatgtccaggagtagacgtgattggtggccaagttatttggggacacctaaacagatcagtgacctgaatgacttctcagaacctttaatatgccaatgtgtgtggcaaacttacaagaagggagctaagtatccagcctctcccaaacctctttgaacaaagcttctgtccctcccacacctctcacctcacaggcacatcaggctgcagaatgcgctttagaaagcattgttttagtccaggcacaagttgtcacgcctgtaatcccagcactttgggaggccgaggtgggtggatcacaaggttgggagattgagaccatcctggctaacacagtgaaaccctgtctctactaaaaaaatacaaaaaattagcttggcgtggtggtgggcgcctgtagtcccagcagcttgggaggctgaggctggagaatggtgtgaacccaggaggcggagcttgcagtgagccaagatcgcgccactgcactccagcccgggtgacagagcaagactccgtctcaaaaaaaagaaaagaaaaaagaaagcattgttttaattgagaggggcagggctggagaaggagcaagttgtggggagccaggcttccctcacgcagcctgtggtggatgtgggaaggagatcaacttctcctcactctgggacagacgatgtatggaaactaaaaagaacatgcggcaccttatttatgtgacttttgtgttt

SEQ ID NO: 59356 - DNA, 3413 bp, Homo sapiens
acggcgggcggccgccccagctcaggctcaagacagcgcttccaggttcagtttcagggtctcgccggcagccccagccggcgggcgcggagcgggcagcggggcccggatcgcaggctcctctgggggccccggagttgggaagcggcgtccgggagcccccggaggaggatgggctgcagacacagcaggctgagcagctgcaaacccccgaaaaagaagcgccaagaaccagaaccagaacagccacccagaccagagccccatgaattaggtcccctcaatggggacacagctataactgtccagctctgtgcatcagaggaggctgagcggcaccagaaggatataaccagaattctccagcaacatgaggaggaaaagaagaaatgggcacaacaggtggagaaggaaagggagctagagcttcgagacagactggatgagcagcaaagggtcctggaaggaaagaatgaagaggccctgcaagtcctccgggcctcatatgaacaggagaaagaagcgcttacccactctttccgggaggccagttctacccagcaggagaccatagacagactgacctcacagctggaggctttccaggccaaaatgaagagggtggaggagtccattctgagccgaaactataagaaacatatccaggattatgggagccccagccagttctgggagcaggagctggagagcttacactttgtcatcgagatgaagaatgagcgtattcatgagctggacaggcggctgatcctcatggaaacagtgaaagagaaaaatctgatattggaggaaaaaattacgaccctgcaacaggaaaatgaggacctccatgtccgaagccgcaaccaggtggtcctgtcaaggcagctgtcagaagacctgcttctcacgcgtgaggccctggagaaggaggtgcagctgcggcgacagctccagcaggagaaggaggagctgttgtaccgggtccttggggccaatgcctcgcctgccttccctctggcccctgtcactcccactgaggtctctttcctcgccacatagggtgcagggcctgggcccaccacgacgcctgaagtcacagctccttccaaggtttttctggagaagacagcaggagcctctcagttcttttccaggaaggaacgagggtgggagcgagatggagatcctgggtgtgtgcccagtgagccctggggccttgagttacatggaatcacccacagggttttggaggccccgagaagcgtcttcccttgagttggccaagggaataagcaagaggagacatttcctccctgccccagcactctgtcccaatccgagaagttccgaggctttcccaggggcagtctgtgtcacgctggccatttgacataaaggagacagcccctggtcccagcttgtcagctctgctgccgacttgctgacttatcaacttcctctaggtgtttccactccaccctggcctgctcagagcctcagtttacccctgcattaaaatggtggggggactggtcaaaggactcttatgtcactgcagtgtcccattctaggattgtctgaaggccagagtaggggttggggggagtgtggacaaaccccgcaaatcagagtggggaaggtgagtggtagagagggggtctctgaaggcccttggggctgacagggccaggcagcctccccagctgaggcatcattcctgggccagagtcgtgtccaccaagggacagtagccagagctcctcttcctttaccaggcaaggtgcatcccctcagccctcctggcccttcagtcttggtgccacctgggcacaggggcaagcttggtggttgtgagtccattcatctatcagagctggaacctcatccctgcacagatgaggaaaccaaggcatggagcagttcccagagtcgaatctagatctcatctgtcatccgggtcttatcctttgctctgtttttctcttcaggctctggaaaatcagatctgtgacttaatcttcctctccctggccctcacccacttagtttctttttcattcctgctccctgccttaactcctcctcccactgcccctgatcccaggcccaggcttttacaacctggtgctcagcttccccatcatctgtggatttcggatccttctcaggaagcttcatgtctaatggagactataattataactcctgttctgcatagagcatttgcatcaaaggctttccatacccctccctcccctggtcctcataagatccttgaagcaggttcctattcctcattggcaacatggcaaacagatcacaggagtcaaagggccttgctcaaggtccccagcttcagccccaggccctaagccagcgtcagaacagtcaatctgcatttttcatcagtcattctatagtgacatcatcccagactgccttctgtattcccctgtgtacagtctccttctgtttctaggtttagaagttcagaggtgactgtgtttctccatttccacagccaaatgggggaagaggtgaggctaggggagtgctgtgctgattctccagccatggtcagacaggtcacccaggagcctcgaggaaagccctggagggaatcacatgtgtactttttcatgaagctttttgcaaagcacatctgcgatacactagtttattgaactaatgtccaggagtagacgtgattggtggccaagttatttggggacacctaaacagatcagtgacctgaatgacttctcagaacctttaatatgccaatgtgtgtggcaaacttacaagaagggagctaagtatccagcctctcccaaacctctttgaacaaagcttctgtccctcccacacctctcacctcacaggcacatcaggctgcagaatgcgctttagaaagcattgttttagtccaggcacaagttgtcacgcctgtaatcccagcactttgggaggccgaggtgggtggatcacaaggttgggagattgagaccatcctggctaacacagtgaaaccctgtctctactaaaaaaatacaaaaaattagcttggcgtggtggtgggcgcctgtagtcccagcagcttgggaggctgaggctggagaatggtgtgaacccaggaggcggagcttgcagtgagccaagatcgcgccactgcactccagcccgggtgacagagcaagactccgtctcaaaaaaaagaaaagaaaaaagaaagcattgttttaattgagaggggcagggctggagaaggagcaagttgtggggagccaggcttccctcacgcagcctgtggtggatgtgggaaggagatcaacttctcctcactctgggacagacgatgtatggaaactaaaaagaacatgcggcaccttatttatgtgacttttgtgttt

SEQ ID NO: 59357 - DNA, 788 bp, Homo sapiens
acggcgggcggccgccccagctcaggctcaagacagcgcttccaggttcagtttcagggtctcgccggcagccccagccggcgggcgcggagcgggcagcggggcccggatcgcaggctcctctgggggccccggagttgggaagcggcgtccgggagcccccggaggaggatgggctgcagacacagcaggctgagcagctgcaaacccccgaaaaagaagcgccaagaaccagaaccagaacagccacccagaccagagccccatgaattaggtcccctcaatggggacacagctataactgtccagctctgtgcatcagaggaggctgagcggcaccagaaggatataaccagaattctccagcaacatgaggaggaaaagaagaaatgggcacaacaggtaagtccaggtgcccccaccccctgtctttctcctgctcagctaactttggtgaatcccagagtgagtgcctaccttaggtttttgttgcctgttgtaaagagtccccttactcattttacccaggaagggagtcctttatctgttgaacacatatttttatcagggcactgtgtgctgggcacattggttaaaacaagcagagctggcagctgctttcacgaagctgagagtctatttgggaagagtaaaagctgttgatgccactagattaattgcctttctgggcccacctcatggttgggtgggaccacggaactcgttctggctgatgcgttatagaaagaagaaccagtgtcacttctagggcaagcatttagttgcca

SEQ ID NO: 59358 - DNA, 641 bp, Homo sapiens
acggcgggcggccgccccagctcaggctcaagacagcgcttccaggttcagtttcagggtctcgccggcagccccagccggcgggcgcggagcgggcagcggggcccggatcgcaggctcctctgggggccccggagttgggaagcggcgtccgggagcccccggaggaggatgggctgcagacacagcaggctgagcagctgcaaacccccgaaaaagaagcgccaagaaccagaaccagaacagccacccagaccagagccccatgaattaggtcccctcaatggggacacagctataactgtccagctctgtgcatcagaggaggctgagcggcaccagaaggatataaccagaattctccagcaacatgaggaggaaaagaagaaatgggcacaacaggtggagaaggaaagggagctagagcttcgagacagactggatgagcagcaaagggtcctggaaggaaagaatgaagaggccctgcaaggtaagggtagagatgttccactggccaaggtggtggggggtgcttccttctggccccacctgcccagttcacctgggcactcccactgttccctccctgtctgtctgatccacaagcaattgactcaaatctacaggatccttggccctag

SEQ ID NO: 59359 - DNA, 561 bp, Homo sapiens
actcagaggcttagctcgcctctttagggtccatggtggcagcagagaggcagaagtgggagtccagagccaggaacagtgaaggatggttcctggcccctctgagtgacagctggtggcagcactccttgctggggggcactgttcaacatccctctgccgtcgggtgaccccctagcccttctgactcctctcccagcttttcccagctttccccactgagcttctccagtccatgctcttctggacgtggactctctgaggcagaactgagcttttccaggcctcttatggaatcctgcagatccagtggctgcagcttcaatcccagtgctgcaatcacacatccattctgccctgggggaccctggagcctacttgtgcgctttgcatttcattgattgacgcctcccttcaacaagcatttactgagcgcctactatgtactaatgctagatgttagatgtacaaagaagacagttttcatcctctaggaactcataggctaatggtgagacacacagacaaacatcattataataaaatatgctaagagaaaaa

SEQ ID NO: 59360 - DNA, 698 bp, Homo sapiens
actctcagtatcctgccaagagtcctccctgaccaccagaagttccacctcaccatcaagaaaggccctggtccaggatgtgcaaggtgtgatgaaatcacagggctggggaaggtcagctcggggtcacaagaagcctgatgggcaggaaagagcatgaaagccccagccagcctcacatgtgcggctgggaggactcacagaaaccctctgtacccagtcatgggccaaagacaccgtcatgcaagggggtgaaggctccacactcgtcccggccccgggcgtggaagcaggacctcgagcagtctctggcagcagcctatgtgccggtcgttgtggactctaaggggcagaatccggacaagctcaggttcaatttctacacctcccagtactccaactccctgaaccccttctacactttgcagaagcctacctgtggctacctgtaccgccgggacactgaccacacccgcaagcgctttgatgtgcctcctgccaacttggtcttgtggcgctcctaggcctgagccaaacggaagcccccgacccttcaccctcacccctgtgacctcaggtccccaaggggaagggctgctcactgcaggaggagtgacctatattcgggctaagacagctgtgccatgcccacctattgacaatgataaagggaggtctctcttctcagcagcaaaaaa

SEQ ID NO: 59361 - DNA, 1343 bp, Homo sapiens
actctcagtatcctgccaagagtcctccctgaccaccagaagttccacctcaccatcaagaaaggccctggtccaggatgtgcaaggtgtgatgaaatcacagggctggggaaggtcagctcggggtcacaagaagcctgatgggcaggaaagagcatgaaagccccagccagcctcacatgtgcggctgggaggactcacagaaaccctctgtacccagtcatgggccaaagacaccgtcatgcaagggggtgaaggctccacactcgtcccggccccgggcgtggaagcaggacctcgagcagtctctggcagcagcctatgtgccggtcgttgtggactctaaggggcagaatccggacaagctcagggtacagtctcccctggggctgcaaggatttagtggagactcttaacaccagttctctggcatctgtgagtttgagtgtgggccatcatcttcttccttctgctctctccctctccacatttcccggtaccatctgatccatcaggcccttctttgctcaggcctgaaggactcaggcctgtgagagaggacggccccgttgtcggccaagacacctttgggcgaggagcagcgaacagggcctgtccatctcagacgtcagccccctgaaggcctgagcaatgggcaacgtgatggagggaaagtcagtggaggagctgagcagcaccgagtgccaccagtggtacaagaagttcatgactgagtgcccctctggccaactcaccctctatgagttccgccagttcttcggcctcaagaacctgagcccgtcggccagccagtacgtggaacagatgtttgagacttttgacttcaacaaggacggctacattgatttcatggagtacgtggcagcgctcagcttggtcctcaaggggaaggtggaacagaagctccgctggtacttcaagctctatgatgtagatggcaacggctgcattgaccgcgatgagctgctcaccatcatccaggccattcgcgccattaacccctgcagcgataccaccatgactgcagaggagttcaccgatacagtgttctccaagattgacgtcaacggggatggggaactctccctggaagagtttatagagggcgtccagaaggaccagatgctcctggacacactgacacgaagcctggaccttacccgcatcgtgcgcaggctccagaatggcgagcaagacgaggagggggctgacgaggccgctgaggcagccggctgagtgcaccgcccggctgcttctgcactagcgggtggggtggtatggtggtgcctgttggtgtgttcttgtcttaaccctagatagaa

SEQ ID NO: 59362 - DNA, 1235 bp, Homo sapiens
actctcagtatcctgccaagagtcctccctgaccaccagaagttccacctcaccatcaagaaaggccctggtccaggatgtgcaaggactcacagaaaccctctgtacccagtcatgggccaaagacaccgtcatgcaagggggtgaaggctccacactcgtcccggccccgggcgtggaagcaggacctcgagcagtctctggcagcagcctatgtgccggtcgttgtggactctaaggggcagaatccggacaagctcagggtacagtctcccctggggctgcaaggatttagtggagactcttaacaccagttctctggcatctgtgagtttgagtgtgggccatcatcttcttccttctgctctctccctctccacatttcccggtaccatctgatccatcaggcccttctttgctcaggcctgaaggactcaggcctgtgagagaggacggccccgttgtcggccaagacacctttgggcgaggagcagcgaacagggcctgtccatctcagacgtcagccccctgaaggcctgagcaatgggcaacgtgatggagggaaagtcagtggaggagctgagcagcaccgagtgccaccagtggtacaagaagttcatgactgagtgcccctctggccaactcaccctctatgagttccgccagttcttcggcctcaagaacctgagcccgtcggccagccagtacgtggaacagatgtttgagacttttgacttcaacaaggacggctacattgatttcatggagtacgtggcagcgctcagcttggtcctcaaggggaaggtggaacagaagctccgctggtacttcaagctctatgatgtagatggcaacggctgcattgaccgcgatgagctgctcaccatcatccaggccattcgcgccattaacccctgcagcgataccaccatgactgcagaggagttcaccgatacagtgttctccaagattgacgtcaacggggatggggaactctccctggaagagtttatagagggcgtccagaaggaccagatgctcctggacacactgacacgaagcctggaccttacccgcatcgtgcgcaggctccagaatggcgagcaagacgaggagggggctgacgaggccgctgaggcagccggctgagtgcaccgcccggctgcttctgcactagcgggtggggtggtatggtggtgcctgttggtgtgttcttgtcttaaccctagatagaa

SEQ ID NO: 59363 - DNA, 1318 bp, Homo sapiens
tatcgttctgttgatttttccccattctgttttagagccttttgaaggtcttcatgctttctttgtataatttcaatgtcttttaagtatttcttttccaggatttgattttttattgtgtgtatttccagcctgagcctggcaatttcatcttgcatcaaatggtttttatgcaacaggtcttcttctttttcatgactatcagaaatctcaaactgcagagttcttgttcccatggcgatatagatatcgcaatgggcaacgtgatggagggaaagtcagtggaggagctgagcagcaccgagtgccaccagtggtacaagaagttcatgactgagtgcccctctggccaactcaccctctatgagttccgccagttcttcggcctcaagaacctgagcccgtcggccagccagtacgtggaacagatgtttgagacttttgacttcaacaaggacggctacattgatttcatggagtacgtggcagcgctcagcttggtcctcaaggggaaggtggaacagaagctccgctggtacttcaagctctatgatgtagatggcaacggctgcattgaccgcgatgagctgctcaccatcatccaggtgcagagggcccggccaggttgcggggcagcggtctggggtgggacccggaactgagagcccagggttagaacaacaatctcaggattgagacaggatgtgggactgaggatcctggtggcagctgtaggcctcaccagctgcgtgacccaggccacgttccttcccttccttggcctcagtttcctcatcaataccaaaagacgatagaagtttgactcttgagtcccagctctgcctaggcccccgggtaccctgcactctactcctcactgctcttgggagccggacaagctctgaccgtccccaatcctacccctgagataggataaggatgggcccctctcacttctgccccttcttccctcccaggccattcgcgccattaacccctgcagcgataccaccatgactgcagaggagttcaccgatacagtgttctccaagattgacgtcaacggggatggggaactctccctggaagagtttatagagggcgtccagaaggaccagatgctcctggacacactgacacgaagcctggaccttacccgcatcgtgcgcaggctccagaatggcgagcaagacgaggagggggctgacgaggccgctgaggcagccggctgagtgcaccgcccggctgcttctgcactagcgggtggggtggtatggtggtgcctgttggtgtgttcttgtcttaaccctagatagaa

SEQ ID NO: 59364 - DNA, 1064 bp, Homo sapiens
actctcagtatcctgccaagagtcctccctgaccaccagaagttccacctcaccatcaagaaaggccctggtccaggatgtgcaaggtgtgatgaaatcacagggctggggaaggtcagctcggggtcacaagaagcctgatgggcaggaaagagcatgaaagccccagccagcctcacatgtgcggctgggaggactcacagaaaccctctgtacccagtcatgggccaaagacaccgtcatgcaagggggtgaaggctccacactcgtcccggccccgggcgtggaagcaggacctcgagcagtctctggcagcagcctatgtgccggtcgttgtggactctaaggggcagaatccggacaagctcagggtacagtctcccctggggctgcaaggatttagtggagactcttaacaccagttctctggcatctgtgagtttgagtgtgggccatcatcttcttccttctgctctctccctctccacatttcccggtaccatctgatccatcaggcccttctttgctcaggcctgaaggactcaggcctgtgagagaggacggccccgttgtcggccaagacacctttgggcgaggagcagcgaacagggcctgtccatctcagacgtcagccccctgaaggcctgagcaatgggcaacgtgatggagggaaagtcagtggaggagctgagcagcaccgagtgccaccagtggtacaagaagttcatgactgagtgcccctctggccaactcacccttctctgaggcagaactgagcttttccaggcctcttatggaatcctgcagatccagtggctgcagcttcaatcccagtgctgcaatcacacatccattctgccctgggggaccctggagcctacttgtgcgctttgcatttcattgattgacgcctcccttcaacaagcatttactgagcgcctactatgtactaatgctagatgttagatgtacaaagaagacagttttcatcctctaggaactcataggctaatggtgagacacacagacaaacatcattataataaaatatgctaagagaaaaa

SEQ ID NO: 59365 - DNA, 914 bp, Homo sapiens
actctcagtatcctgccaagagtcctccctgaccaccagaagttccacctcaccatcaagaaaggccctggtccaggatgtgcaaggtgtgatgaaatcacagggctggggaaggtcagctcggggtcacaagaagcctgatgggcaggaaagagcatgaaagccccagccagcctcacatgtgcggctgggaggactcacagaaaccctctgtacccagtcatgggccaaagacaccgtcatgcaagggggtgaaggctccacactcgtcccggccccgggcgtggaagcaggacctcgagcagtctctggcagcagcctatgtgccggtcgttgtggactctaaggggcagaatccggacaagctcagggtacagtctcccctggggctgcaaggatttagtggagactcttaacaccagttctctggcatctgtgagtttgagtgtgggccatcatcttcttccttctgctctctccctctccacatttcccggtaccatctgatccatcaggcccttctttgctcaggcctgaaggactcaggcctgtgagagaggacggccccgttgtcggccaagacacctttgggcgaggagcagcgaacagggcctgtccatctcagacgtcagccccctgaaggcctgagcaatgggcaacgtgatggagggaaagtcagtggaggagctgagcagcaccgagtgccaccagtggtacaagaagttcatgactgagtgcccctctggccaactcaccctctatgagttccgccagttcttcggcctcaagaacctgagcccgtcggccagccagtacgtggaacagatgtttgagacttttgacttcaacaaggccacttataatattctgcggacatgaggactggagacagacagggttgcctggtccctgga

SEQ ID NO: 59366 - DNA, 456 bp, Homo sapiens
  misc_feature (2)..(4): n is a, c, g, or t
cnnncggccagcatattttattataatgatgtttgtctgtgtgtctcaccattagctctatgatgtagatggcaacggctgcattgaccgcgatgagctgctcaccatcatccaggccattcgcgccattaacccctgcagcgataccaccatgactgcagaggagttcaccgatacagtgttctccaagattgacgtcaacggggatggggaactctccctggaagagtttatagagggcgtccagaaggaccagatgctcctggacacactgacacgaagcctggaccttacccgcatcgtgcgcaggctccagaatggcgagcaagacgaggagggggctgacgaggccgctgaggcagccggctgagtgcaccgcccggctgcttctgcactagcgggtggggtggtatggtggtgcctgttggtgtgttcttgtcttaaccctagatagaa

SEQ ID NO: 59367 - DNA, 1015 bp, Homo sapiens
tgcttctctaagccttgttctattttcaactcttttctccagggtacagtctcccctggggctgcaaggatttagtggagactcttaacaccagttctctggcatctgtgagtttgagtgtgggccatcatcttcttccttctgctctctccctctccacatttcccggtaccatctgatccatcaggcccttctttgctcaggcctgaaggactcaggcctgtgagagaggacggccccgttgtcggccaagacacctttgggcgaggagcagcgaacagggcctgtccatctcagacgtcagccccctgaaggcctgagcaatgggcaacgtgatggagggaaagtcagtggaggagctgagcagcaccgagtgccaccagtggtacaagaagttcatgactgagtgcccctctggccaactcaccctctatgagttccgccagttcttcggcctcaagaacctgagcccgtcggccagccagtacgtggaacagatgtttgagacttttgacttcaacaaggacggctacattgatttcatggagtacgtggcagcgctcagcttggtcctcaaggggaaggtggaacagaagctccgctggtacttcaagctctatgatgtagatggcaacggctgcattgaccgcgatgagctgctcaccatcatccaggccattcgcgccattaacccctgcagcgataccaccatgactgcagaggagttcaccgatacagtgttctccaagattgacgtcaacggggatggggaactctccctggaagagtttatagagggcgtccagaaggaccagatgctcctggacacactgacacgaagcctggaccttacccgcatcgtgcgcaggctccagaatggcgagcaagacgaggagggggctgacgaggccgctgaggcagccggctgagtgcaccgcccggctgcttctgcactagcgggtggggtggtatggtggtgcctgttggtgtgttcttgtcttaaccctagatagaa

SEQ ID NO: 59368 - DNA, 1715 bp, Homo sapiens
actctcagtatcctgccaagagtcctccctgaccaccagaagttccacctcaccatcaagaaaggccctggtccaggatgtgcaaggtgtgatgaaatcacagggctggggaaggtcagctcggggtcacaagaagcctgatgggcaggaaagagcatgaaagccccagccagcctcacatgtgcggctgggaggactcacagaaaccctctgtacccagtcatgggccaaagacaccgtcatgcaagggggtgaaggctccacactcgtcccggccccgggcgtggaagcaggacctcgagcagtctctggcagcagcctatgtgccggtcgttgtggactctaaggggcagaatccggacaagctcagggtacagtctcccctggggctgcaaggatttagtggagactcttaacaccagttctctggcatctgtgagtttgagtgtgggccatcatcttcttccttctgctctctccctctccacatttcccggtaccatctgatccatcaggcccttctttgctcaggcctgaaggactcaggcctgtgagagaggacggccccgttgtcggccaagacacctttgggcgaggagcagcgaacagggcctgtccatctcagacgtcagccccctgaaggcctgagcaatgggcaacgtgatggagggaaagtcagtggaggagctgagcagcaccgagtgccaccagtggtacaagaagttcatgactgagtgcccctctggccaactcaccctctatgagttccgccagttcttcggcctcaagaacctgagcccgtcggccagccagtacgtggaacagatgtttgagacttttgacttcaacaaggacggctacattgatttcatggagtacgtggcagcgctcagcttggtcctcaaggggaaggtggaacagaagctccgctggtacttcaagctctatgatgtagatggcaacggctgcattgaccgcgatgagctgctcaccatcatccaggtgcagagggcccggccaggttgcggggcagcggtctggggtgggacccggaactgagagcccagggttagaacaacaatctcaggattgagacaggatgtgggactgaggatcctggtggcagctgtaggcctcaccagctgcgtgacccaggccacgttccttcccttccttggcctcagtttcctcatcaataccaaaagacgatagaagtttgactcttgagtcccagctctgcctaggcccccgggtaccctgcactctactcctcactgctcttgggagccggacaagctctgaccgtccccaatcctacccctgagataggataaggatgggcccctctcacttctgccccttcttccctcccaggccattcgcgccattaacccctgcagcgataccaccatgactgcagaggagttcaccgatacagtgttctccaagattgacgtcaacggggatggggaactctccctggaagagtttatagagggcgtccagaaggaccagatgctcctggacacactgacacgaagcctggaccttacccgcatcgtgcgcaggctccagaatggcgagcaagacgaggagggggctgacgaggccgctgaggcagccggctgagtgcaccgcccggctgcttctgcactagcgggtggggtggtatggtggtgcctgttggtgtgttcttgtcttaaccctagatagaa

SEQ ID NO: 59369 - DNA, 366 bp, Homo sapiens
gccgctcttccttcaccccttgtagctcctgggggcgcttggggccatgggtccacctgggaggaggtgggaggtccccagacttgaccccgccccggccccacccagactccccgccctgccccggaccccagcccagtcaggactcagcacgtcggagggccctctggcccgaggtaactgaagccagagccgctgccctcgctggctgccgggagctgcctcctcatcagctcgtcccgccccgccctcctcccacctgcctgctgcccgcctgctcccgcctgatccgccccggccccctgccttgccagcccgggtgggcatgctgcggggccggggcttgggctgtggcgcttggctttg

SEQ ID NO: 59370 - DNA, 724 bp, Homo sapiens
tttagattctgaagctgtgacttgctttttactagcaagatacatggatacatttgaagctgagaagcaccccatcaaagtggggtgtgagtagcctctttgatgactgtatacttcatgtattgggacattatttctttcatgtattttgccaatattacggtgtagtcacaaaggggccaagaattttccttctggtagtggtgggctgtctttgccacatctagaagggcaattgtttgctcaaacaaggtcccatgaatatctttgaatacttgaaataaaaccccttgaaaacacgtaaatggttctctgttgaggtcagacctagagtgcatatgactgcactccattttgtttgtttgtttgcttgttgaactttaaaagtcaccagaagcagccaggagcttatctttgccagataagctggggagtgtgaggtgttcgggcccagcacggaccgggcccagccgagcccccgcctttcctgcagccctgctcttcctgttgcagctgtgatttctgtcctgagggggcctttgatgtaaagcgcagttaatattggaacgtgtcatttgcatctgaagatagtggtgtcttttttgattaggagaaacatttcttctagttatagaaaaagcattattttttcccccattcagatataatgatcacgtgagaagtgccagggacacagaagcgccagaccaagagccatctgttc

SEQ ID NO: 59371 - DNA, 466 bp, Homo sapiens
acttcttcatcttctttagctgagatacaaagtaccagaagtgggacttggcaacgacatgatcaggtgcaaagattcgcatgtggtagaggggtggtgtgtggcatttgggagtgagcaggcagcaacccaccaccttgtactcttgtagtgtgcccgaggccttcatggcatcctctccatgcttgccgccaccggcaaaaggagcctggctaatttttgtatttttagtagagatggggttttgccacgttggttggttggtcttgaactcttgacctcaagtgattatcctgcctggcctcccaaagtgctgggattacaggcgtgagccaccacacctggtcttattcttatttttcagacagagtcttcctctttcgcccaggctggagtgcagtgagctgagatcatgccactgtactgcagcctgagtgacagagtgagaccctgtctcagttaaaaa

SEQ ID NO: 59372 - DNA, 680 bp, Homo sapiens
acttcttcatcttctttagctgagatacaaagtaccagaagtgggacttggcaacgacatgatcaggtgcaaagattcgcatgtggtagaggggtggtgtgtggcatttgggagtgagcaggcagcaacccaccaccttgtactcttgtagtgtgcccgaggccttcatggcatcctctccatgcttgccgccaccggcaaaaggagcctggctaatttttgtatttttagtagagatggggttttgccacgttggttggttggtcttgaactcttgacctcaagtgattatcctgcctggcctcccaaagtgctgggattacaggcgtgagccaccacacctggtcttattcttatttttcagacagagtcttcctctttcgcccaggctggagtgcagtggcacgatcttggctcactgcagcttctgcctcctgggttcaagtgattctcctgcctccgcctcctgagtagctggggactgcaggagtgtgcccccagcctggctaatttttgtttttttgtttttttagtagagatagggtctctcccatgttggccaggctgctctcgaactcctggcctcaggtgatctgcctgcttcgacctcccgaagtgctgtgattacaggcgttagccaccacgtacagccataacttttactgaaaaaaaaaaaaaaa

SEQ ID NO: 59373 - DNA, 310 bp, Homo sapiens
tcagcattgttttctgtatgtgttgagatgattatttggtttttcttttttattgtgttaatttggtgaattgcatcaactttagtatcttaaaccaaccttgcctctctagggtaaaccttatgtggtcataatatataatcctttaaatacattattggatttctttttttaatatattgctgaggattttttatgactataatcataagagatattggcatatgattttctatacttgtaatgtctttgttagaaggagtttatattaggattatgctggcctcataaaatgggttgagaaatgttc

SEQ ID NO: 59374 - DNA, 465 bp, Homo sapiens
ccaagattccagagatgtggctggtttcacttccaggaagcttgctggaagactgccctgtgccccacgcctcagtagggcagggggcctcccctggttttaggatcatgcttctcctgcctgctgatgctacgatcagtgaccatggactcataaggcttttgtttaagaattgcctaagatgttcttcagatcctgaattccagcaggaaagctaatgccaaccagtttgaaaacaaccacagaggaatcgaatcagcacgagaatgcagtttcttcatttccctgtcccatgactttactctgcactctttgaccaatcaataatcctggaccttggcccacttcaaaccccttgaaatctctagctccaactccctggaggggtggatttgaggtttcctcctgtttccttgtttggctgccgtatgattattaaactctttctttgctgcaaaaaaaaaa

SEQ ID NO: 59375 - DNA, 446 bp, Homo sapiens
gcccaggctttcatgggaaggacacaggatcaaccaggacaagggaaagaagagccagggggcctgaactccagttccagctgggaagagacctcactgggtgaccttggctacgatcagtgaccatggactcataaggcttttgtttaagaattgcctaagatgttcttcagatcctgaattccagcaggaaagctaatgccaaccagtttgaaaacaaccacagaggaatcgaatcagcacgagaatgcagtttcttcatttccctgtcccatgactttactctgcactctttgaccaatcaataatcctggaccttggcccacttcaaaccccttgaaatctctagctccaactccctggaggggtggatttgaggtttcctcctgtttccttgtttggctgccgtatgattattaaactctttctttgctgcaaaaaaaaaa

SEQ ID NO: 59376 - DNA, 526 bp, Homo sapiens
agagttgaagatgacctagatcatgcgtcaacaaactatggcctgagggccaaagccagcgcaccacccgtttttgtacagcccatgggttaagaagagttttcaaaattttaaacagcagtctccccttatccatggtttcaccttctgtggtttcagttacttgcagtcaaccatggcccaaaaatagctacgatcagtgaccatggactcataaggcttttgtttaagaattgcctaagatgttcttcagatcctgaattccagcaggaaagctaatgccaaccagtttgaaaacaaccacagaggaatcgaatcagcacgagaatgcagtttcttcatttccctgtcccatgactttactctgcactctttgaccaatcaataatcctggaccttggcccacttcaaaccccttgaaatctctagctccaactccctggaggggtggatttgaggtttcctcctgtttccttgtttggctgccgtatgattattaaactctttctttgctgcaaaaaaaaaa

SEQ ID NO: 59377 - DNA, 385 bp, Homo sapiens
ccccctgtaccacccagagtcagccaaagctggagatctgtcagtttagaaaataaataagagtgagattaggggttgcattttttcccctttttgcaattaattcctgtgactggctgctctggcaacaatgtaaatacttgtagctttcagaacatgccaggtagcccatctcttctggtgggctggtacttatctgcaagggtagccttgtacttaatatgggcctttgttgtccctttctgtggccacagaacttcctaggaaatgacagtggggaaaatgagagctatggctctgggtagtccgctgatctcatggggatggggctggagccaggagaaaatgagatcatgagatgagctcaggaaagcactagcgaaaa

SEQ ID NO: 59378 - DNA, 530 bp, Homo sapiens
gacaaagatctaggaatatgagtacactatcctacataatagaaaagctaattttttgttttattactactgtaataatattaagtacctaaagagagttataggcctcttggggcccagaactcagagttcaaaatgacccttctttgattggatcaaaatctaatatttggctgtggcattatccagaagtatggagtttattatagctatgttcaaggaaaaggtaaggtgaaggaagatcagaagggatatatagtaaggagattcccatgttactaaactatttgtggatgttttcctgcatcatatgcaaatgagaattggtaggaaaacagagggctaagaattagagaaaataaatttggggaggagggatggattgtgcctcttattgctctgctgaatctccaaatataaacacacacacactcaaacccttctatgagtcctaaattacattcttgcttcaagctggctttttcaaatctggcagtccactggcgaaaatgtttgcaggttagagaaaa

SEQ ID NO: 59379 - DNA, 391 bp, Homo sapiens
  misc_feature (106)..(106): n is a, c, g, or t
gactcacacctgagtatctaaagacacctcacgcaccacctatcctgagtagccgtccctgtggcctcttggcgccctgccggtgtacgttgaattccagggtgtngagctgtttgctgtctttacagatgaaaacacttcgaccaagttgagtttctgctccgaaatcatagtggatggtggcagagcagtggcctaggccatggtgctgacatcacagccattcttgcaaggagatggtaggatagccactcactgttcaggcttgagctttagccagcaggcaggatgtccagcttgtccaagttgattaggagcacccggcccagctggaacctgcctcatttttgcggttcccctttaggaaggcacccacagcttgcccagggag

SEQ ID NO: 59380 - DNA, 3566 bp, Homo sapiens
agaaacccaccatttttctaggccctggattatgtagaagatttagatactaagcctcaagagacgtctttcctctcatttacggtcttcctgcatatttaaaatttctaatacggtagacagagtcggtgtctttgaagctgttaatcaggcaatttcctgggcactccagctgcgggtcctcgcggccttctcggcttctccagcttcggtaggagaggatccggcgccgaatcactgactggcacaggtgttgggaaaatgatccacagtctatttctcataaactgttccggtgacatatttctagagaagcactggaagagcgttgtgagccagtctgtctgtgattatttctttgaagctcaagagaaagctgctgatgttgaaaatgtaccacctgtcatttcaacacctcaccactacctcatcagtatctaccgggataagctcttctttgtatctgtcatacagaccgaagtgccacctctctttgtaattgagttcctacatcgagttgctgacacttttcaggactactttggtgagtgttcagaggctgcaattaaggataatgtggtcatagtatatgaactcttagaagaaatgttagacaatggatttccactggctaccgaatctaacattttgaaagaattgattaaaccaccaacaattctacgctctgttgtcaactctattacaggcagtagtaatgttggggacacactccccaccgggcagctgtccaacataccatggcgtcgggcaggggtaaagtacacaaacaatgaagcctattttgatgttgttgaagaaatagacgcaattatagataaatcaggatctacagtctttgcagaaattcagggggtcattgatgcttgcattaaactatctggaatgcctgatctctccctttctttcatgaaccctaggcttctggatgatgtcagctttcacccctgcatccggttcaagcgttgggaatctgaaagagttttgtcatttattcctccagatggaaatttccgactcatatcataccgtgtcagctcacaaaatctagtggcaataccagtgtatgtgaaacatagtatcagctttaaggagaacagttcttgcggcagatttgatataacaattggaccaaagcagaatatggggaaaactattgaaggaattacagtgacagttcacatgccaaaagttgtgctgaacatgaacctgacacccacacaaggcagctatacatttgatccagtcaccaaggtactaacatgggatgtgggaaaaattactccacaaaagctcccaagtcttaaaggactggtaaatttacagtctggagcccccaaaccagaagagaatccgagcctcaacatacagtttaagatccagcagcttgctatttcaggcttaaaagtaaaccgtttggacatgtatggggagaaatataagccatttaaaggagtcaaatacgtcacgaaagctggaaagttccaagtgaggacatgagaagaggccaaaattcctcaggaccagtttgttttccaagtgtcattacgatgtatcactattaggtaccaagtgagtgggaatacatattctagttaaagcatttgtgtctagctacacaccgctaacaaagttacttagttatcaatgtaggattcttaaggagctttaagctaaggaaaccttttagtgacttagcttattttgtatcttttcacttaggaagattttggaggtgatttttttccataggaggataccatctggcggctgcacattgtaacagtaaaggcagaaagctgtagtgataacctctctcctaaaagagttaactggtctcatccagcagaagctatcttaaatctgtgatgtgtcaggtgcagccaaatatcacaccttctgatcttagccatcccaaaccagtatctgtcccaagagaggaaattccccccacccccagaagtttacagaaaactgcctcttcaagtgtttgccttattcagcttttcacttgtgccattaagcaagcactgtagcaaaagccacttccacatggccctggcagggagcactgctgctccatgctccattctcactgtacttggtattgtattttttataaataagatttttatgtaaagcttagaatttgatttacagggaccttgctgcagtaaataccatctcaattttgtgccactggttcagctgttagcacagtaaaaaaatcatttgtatcaaaggggcaaatgctttattaaggtagtaaaagggaacattacttctgcttttaggaagttactgcaagcacaagcatttgtgcttttaagcaaattaaagtagtaaaagaaaaacttaagtgaaacctttgccatcttcatgttttataatataaagcttacccaacaccagttaagccatggttaacctaaatgcctcatgccccagttcagcaaaaggaggaaaatgtgcctgcctcacagtcatcagtctttttaaatcttttttgttgttgttcttaagggtttgaatttgtctgcattccttgtctttaggggaaattcccttttcatattgtgtgcttcccaaagctatagtcatagatttcttccagaaactattgtcataattgtcactggagtgcttaaatatacgtactatactgacaaaatacatggaagtgagttataatgaggcagaaacaaaatcctcggtaacattgatgatactctaccgatcaccgtggttttggaaagtcagtcaacagttgtattattgcactcaatttcattgtgacattttatttaacttcttcatcttggtggtccttgcccagttattttgcctcattagacatcaagaaatggagaaagactgaaagttaatatcttaagtgcttgttcttcatgtttccttcttgttatttatgctattctctttgtggctccattcttctttcaatcttctcagcttataaccgtctttcccttatgctaaggatagcccttacactcatcccatctatgctgtcaagggctgctggttggtgctggtacaaggagcccactcagcagttttcttacctttgcctgccctgcctttcatggaataagaaaggcaacgttttgcagcttccaaatttctgaagaaactaatctcagattggcagttaaagtcaaaatgttgccaaatatttattccttttgcctaagtttggctacccggttcaattgctttttatttttaatgtcttgactcttcagagttcgtacctcaaaagaacaatgagaacatttgctttgctttctgctgaatccctaatctcaacaatctatacctggactgtccagttctcctcctgtgctatcttctcttctatccaagtagaatgtatgccaggagctccttccctctagcaatttctactaaaatgtccaagtagaatgtttccttttacaatcaaattactgtatttattaatttgctagaatccagtaaatcattttggtagctctggctgtgctatcaataaaaagatgaaagcaaca

SEQ ID NO: 59381 - DNA, 407 bp, Homo sapiens
acttaaggacccggcagctatccggttcaattgctttttatttttaatgtcttgactcttcagagttcgtacctcaaaagaacaatgagaacatttgctttgctttctgctgaatccctaatctcaacaatctatacctggactgtccagttctcctcctgtgctatcttctcttctatccaagtagaatgtatgccaggagctccttccctctagcaatttctactaaaatgtccaagtagaatgtttccttttacaatcaaattactgtatttattaatttgctagaatccagtaaatcattttggtagctctggctgtgctatcaataaaaagatgaaagcaacaagttgattttttttaggtctactattgattgaaccggatagctgccgggatcctctagg

SEQ ID NO: 59382 - DNA, 972 bp, Homo sapiens
agaaacccaccatttttctaggccctggattatgtagaagatttagatactaagcctcaagagacgtctttcctctcatttacggtcttcctgcatatttaaaatttctaatacggtagacagagtcggtgtctttgaagctgttaatcaggcaatttcctgggcactccagctgcgggtcctcgcggccttctcggcttctccagcttcggtaggagaggatccggcgccgaatcactgactggcacaggtgttggggtgagtgtgaggggcgggaaatctgtggactggggacagctccaaaacccgggagtaggctgaatagctggggcccccgactccgatctgggctctaggagcgtctttggtgctgttggcccgggcctcgcttcccccccactcccggccttccgggctttctcgccagcaaggccagaagggagcggtccacctgcagcccagtgttctcaggcgcctgagccccggaggtcaagcttactgggttccccctctatagtgagctggagtacagacggcaggaatctcagtcccaggtttctgctttggaggacaaaaccccaaacggacctgagcagacgtcctgttagcgggtggtgcctggaagagcctggggtgaggaatgcagtgagaagggtgttgcagttcttcaggagagaggtaacggggttctaagctgagcaggtggcagtgagtgtggaagagtgacgggcgatgtggctgtttgtatttggtagatttgtttgaacctgaaacttacagccttatgtgtgattaagaagatggtgccagtgacaggaggaggtattttatggagtttgagttttatcgaatttgaaacagtggtttacatggagattgtagaaagactttaaaaaaaattatgagaattaagcccgaaagactttcaaggtgagacccaaaacagatgaagtttcatataaaagggtaaga

SEQ ID NO: 59383 - DNA, 3692 bp, Homo sapiens
agaaacccaccatttttctaggccctggattatgtagaagatttagatactaagcctcaagagacgtctttcctctcatttacggtcttcctgcatatttaaaatttctaatacggtagacagagtcggtgtctttgaagctgttaatcaggcaatttcctgggcactccagctgcgggtcctcgcggccttctcggcttctccagcttcggtaggagaggatccggcgccgaatcactgactggcacaggtgttgggatagtgtctcacttggtcacccaggctggagtgcagtggcgcaatcttagctctctacagcgtcgatcttcctcctgggctcaagcaattctcctgcttcatcctcctgagtacctaggactacagaaaatgatccacagtctatttctcataaactgttccggtgacatatttctagagaagcactggaagagcgttgtgagccagtctgtctgtgattatttctttgaagctcaagagaaagctgctgatgttgaaaatgtaccacctgtcatttcaacacctcaccactacctcatcagtatctaccgggataagctcttctttgtatctgtcatacagaccgaagtgccacctctctttgtaattgagttcctacatcgagttgctgacacttttcaggactactttggtgagtgttcagaggctgcaattaaggataatgtggtcatagtatatgaactcttagaagaaatgttagacaatggatttccactggctaccgaatctaacattttgaaagaattgattaaaccaccaacaattctacgctctgttgtcaactctattacaggcagtagtaatgttggggacacactccccaccgggcagctgtccaacataccatggcgtcgggcaggggtaaagtacacaaacaatgaagcctattttgatgttgttgaagaaatagacgcaattatagataaatcaggatctacagtctttgcagaaattcagggggtcattgatgcttgcattaaactatctggaatgcctgatctctccctttctttcatgaaccctaggcttctggatgatgtcagctttcacccctgcatccggttcaagcgttgggaatctgaaagagttttgtcatttattcctccagatggaaatttccgactcatatcataccgtgtcagctcacaaaatctagtggcaataccagtgtatgtgaaacatagtatcagctttaaggagaacagttcttgcggcagatttgatataacaattggaccaaagcagaatatggggaaaactattgaaggaattacagtgacagttcacatgccaaaagttgtgctgaacatgaacctgacacccacacaaggcagctatacatttgatccagtcaccaaggtactaacatgggatgtgggaaaaattactccacaaaagctcccaagtcttaaaggactggtaaatttacagtctggagcccccaaaccagaagagaatccgagcctcaacatacagtttaagatccagcagcttgctatttcaggcttaaaagtaaaccgtttggacatgtatggggagaaatataagccatttaaaggagtcaaatacgtcacgaaagctggaaagttccaagtgaggacatgagaagaggccaaaattcctcaggaccagtttgttttccaagtgtcattacgatgtatcactattaggtaccaagtgagtgggaatacatattctagttaaagcatttgtgtctagctacacaccgctaacaaagttacttagttatcaatgtaggattcttaaggagctttaagctaaggaaaccttttagtgacttagcttattttgtatcttttcacttaggaagattttggaggtgatttttttccataggaggataccatctggcggctgcacattgtaacagtaaaggcagaaagctgtagtgataacctctctcctaaaagagttaactggtctcatccagcagaagctatcttaaatctgtgatgtgtcaggtgcagccaaatatcacaccttctgatcttagccatcccaaaccagtatctgtcccaagagaggaaattccccccacccccagaagtttacagaaaactgcctcttcaagtgtttgccttattcagcttttcacttgtgccattaagcaagcactgtagcaaaagccacttccacatggccctggcagggagcactgctgctccatgctccattctcactgtacttggtattgtattttttataaataagatttttatgtaaagcttagaatttgatttacagggaccttgctgcagtaaataccatctcaattttgtgccactggttcagctgttagcacagtaaaaaaatcatttgtatcaaaggggcaaatgctttattaaggtagtaaaagggaacattacttctgcttttaggaagttactgcaagcacaagcatttgtgcttttaagcaaattaaagtagtaaaagaaaaacttaagtgaaacctttgccatcttcatgttttataatataaagcttacccaacaccagttaagccatggttaacctaaatgcctcatgccccagttcagcaaaaggaggaaaatgtgcctgcctcacagtcatcagtctttttaaatcttttttgttgttgttcttaagggtttgaatttgtctgcattccttgtctttaggggaaattcccttttcatattgtgtgcttcccaaagctatagtcatagatttcttccagaaactattgtcataattgtcactggagtgcttaaatatacgtactatactgacaaaatacatggaagtgagttataatgaggcagaaacaaaatcctcggtaacattgatgatactctaccgatcaccgtggttttggaaagtcagtcaacagttgtattattgcactcaatttcattgtgacattttatttaacttcttcatcttggtggtccttgcccagttattttgcctcattagacatcaagaaatggagaaagactgaaagttaatatcttaagtgcttgttcttcatgtttccttcttgttatttatgctattctctttgtggctccattcttctttcaatcttctcagcttataaccgtctttcccttatgctaaggatagcccttacactcatcccatctatgctgtcaagggctgctggttggtgctggtacaaggagcccactcagcagttttcttacctttgcctgccctgcctttcatggaataagaaaggcaacgttttgcagcttccaaatttctgaagaaactaatctcagattggcagttaaagtcaaaatgttgccaaatatttattccttttgcctaagtttggctacccggttcaattgctttttatttttaatgtcttgactcttcagagttcgtacctcaaaagaacaatgagaacatttgctttgctttctgctgaatccctaatctcaacaatctatacctggactgtccagttctcctcctgtgctatcttctcttctatccaagtagaatgtatgccaggagctccttccctctagcaatttctactaaaatgtccaagtagaatgtttccttttacaatcaaattactgtatttattaatttgctagaatccagtaaatcattttggtagctctggctgtgctatcaataaaaagatgaaagcaaca

SEQ ID NO: 59384 - DNA, 4161 bp, Homo sapiens
agaaacccaccatttttctaggccctggattatgtagaagatttagatactaagcctcaagagacgtctttcctctcatttacggtcttcctgcatatttaaaatttctaatacggtagacagagtcggtgtctttgaagctgttaatcaggcaatttcctgggcactccagctgcgggtcctcgcggccttctcggcttctccagcttcggtaggagaggatccggcgccgaatcactgactggcacaggtgttgggatagtgtctcacttggtcacccaggctggagtgcagtggcgcaatcttagctctctacagcgtcgatcttcctcctgggctcaagcaattctcctgcttcatcctcctgagtacctaggactacagaaaatgatccacagtctatttctcataaactgttccggtgacatatttctagagaagcactggaagagcgttgtgagccagtctgtctgtgattatttctttgaagctcaagagaaagctgctgatgttgaaaatgtaccacctgtcatttcaacacctcaccactacctcatcagtatctaccgggataagctcttctttgtatctgtcatacagaccgaagtgccacctctctttgtaattgagttcctacatcgagttgctgacacttttcaggactactttggtgagtgttcagaggctgcaattaaggataatgtggtcatagtatatgaactcttagaagaaatgttagacaatggatttccactggctaccgaatctaacattttgaaagaattgattaaaccaccaacaattctacgctctgttgtcaactctattacaggcagtagtaatgttggggacacactccccaccgggcagctgtccaacataccatggcgtcgggcaggggtaaagtacacaaacaatgaagcctattttgatgttgttgaagaaatagacgcaattatagataaatcaggatctacagtctttgcagaaattcagggggtcattgatgcttgcattaaactatctggaatgcctgatctctccctttctttcatgaaccctaggcttctggatgatgtcagctttcacccctgcatccggttcaagcgttgggaatctgaaagagttttgtcatttattcctccagatggaaatttccgactcatatcataccgtgtcagctcacaaaatctagtggcaataccagtgtatgtgaaacatagtatcagctttaaggagaacagttcttgcggcagatttgatataacaattggaccaaagcagaatatggggaaaactattgaaggaattacagtgacagttcacatgccaaaagttgtgctgaacatgaacctgacacccacacaaggcagctatacatttgatccagtcaccaaggtactaacatgggatgtgggaaaaattactccacaaaagctcccaagtcttaaaggactggtaaatttacagtctggagcccccaaaccagaagagaatccgagcctcaacatacagtttaagatccagcagcttgctatttcaggtaaggataaggttgacttgtagttaagggtaattgagttttgcaagctcatttattaggcatttagaagagtaacaaaagtttccttctctagaaagagcagtagcccatttgccttttatactgtgcttggtggggcagtctcacaggcaccgaccaaatgatttttcagagcaccttatttcaaacagcttcccctcacctccgccctcatttaagcaccaaaaagagagttattcatattcacagaaagtagaattatacttcacagacattccctgcctgtgtgggaatcttaaccaaaaccataccatcaaagtgcaataatttgtaaatgatagaagagacatttcttccaaatggtggaagggacactggttaatgtcagatttaccatatagcgctcattgctaacattatattggttgggatgatgataatttattctttttcattctttttgatacaggcttaaaagtaaaccgtttggacatgtatggggagaaatataagccatttaaaggagtcaaatacgtcacgaaagctggaaagttccaagtgaggacatgagaagaggccaaaattcctcaggaccagtttgttttccaagtgtcattacgatgtatcactattaggtaccaagtgagtgggaatacatattctagttaaagcatttgtgtctagctacacaccgctaacaaagttacttagttatcaatgtaggattcttaaggagctttaagctaaggaaaccttttagtgacttagcttattttgtatcttttcacttaggaagattttggaggtgatttttttccataggaggataccatctggcggctgcacattgtaacagtaaaggcagaaagctgtagtgataacctctctcctaaaagagttaactggtctcatccagcagaagctatcttaaatctgtgatgtgtcaggtgcagccaaatatcacaccttctgatcttagccatcccaaaccagtatctgtcccaagagaggaaattccccccacccccagaagtttacagaaaactgcctcttcaagtgtttgccttattcagcttttcacttgtgccattaagcaagcactgtagcaaaagccacttccacatggccctggcagggagcactgctgctccatgctccattctcactgtacttggtattgtattttttataaataagatttttatgtaaagcttagaatttgatttacagggaccttgctgcagtaaataccatctcaattttgtgccactggttcagctgttagcacagtaaaaaaatcatttgtatcaaaggggcaaatgctttattaaggtagtaaaagggaacattacttctgcttttaggaagttactgcaagcacaagcatttgtgcttttaagcaaattaaagtagtaaaagaaaaacttaagtgaaacctttgccatcttcatgttttataatataaagcttacccaacaccagttaagccatggttaacctaaatgcctcatgccccagttcagcaaaaggaggaaaatgtgcctgcctcacagtcatcagtctttttaaatcttttttgttgttgttcttaagggtttgaatttgtctgcattccttgtctttaggggaaattcccttttcatattgtgtgcttcccaaagctatagtcatagatttcttccagaaactattgtcataattgtcactggagtgcttaaatatacgtactatactgacaaaatacatggaagtgagttataatgaggcagaaacaaaatcctcggtaacattgatgatactctaccgatcaccgtggttttggaaagtcagtcaacagttgtattattgcactcaatttcattgtgacattttatttaacttcttcatcttggtggtccttgcccagttattttgcctcattagacatcaagaaatggagaaagactgaaagttaatatcttaagtgcttgttcttcatgtttccttcttgttatttatgctattctctttgtggctccattcttctttcaatcttctcagcttataaccgtctttcccttatgctaaggatagcccttacactcatcccatctatgctgtcaagggctgctggttggtgctggtacaaggagcccactcagcagttttcttacctttgcctgccctgcctttcatggaataagaaaggcaacgttttgcagcttccaaatttctgaagaaactaatctcagattggcagttaaagtcaaaatgttgccaaatatttattccttttgcctaagtttggctacccggttcaattgctttttatttttaatgtcttgactcttcagagttcgtacctcaaaagaacaatgagaacatttgctttgctttctgctgaatccctaatctcaacaatctatacctggactgtccagttctcctcctgtgctatcttctcttctatccaagtagaatgtatgccaggagctccttccctctagcaatttctactaaaatgtccaagtagaatgtttccttttacaatcaaattactgtatttattaatttgctagaatccagtaaatcattttggtagctctggctgtgctatcaataaaaagatgaaagcaaca

SEQ ID NO: 59385 - DNA, 5200 bp, Homo sapiens
  misc_feature (4460)..(4460): n is a, c, g, or t
agaaacccaccatttttctaggccctggattatgtagaagatttagatactaagcctcaagagacgtctttcctctcatttacggtcttcctgcatatttaaaatttctaatacggtagacagagtcggtgtctttgaagctgttaatcaggcaatttcctgggcactccagctgcgggtcctcgcggccttctcggcttctccagcttcggtaggagaggatccggcgccgaatcactgactggcacaggtgttgggatagtgtctcacttggtcacccaggctggagtgcagtggcgcaatcttagctctctacagcgtcgatcttcctcctgggctcaagcaattctcctgcttcatcctcctgagtacctaggactacagaaaatgatccacagtctatttctcataaactgttccggtgacatatttctagagaagcactggaagagcgttgtgagccagtctgtctgtgattatttctttgaagctcaagagaaagctgctgatgttgaaaatgtaccacctgtcatttcaacacctcaccactacctcatcagtatctaccgggataagctcttctttgtatctgtcatacagaccgaagtgccacctctctttgtaattgagttcctacatcgagttgctgacacttttcaggactactttggtgagtgttcagaggctgcaattaaggataatgtggtcatagtatatgaactcttagaagaaatgttagacaatggatttccactggctaccgaatctaacattttgaaagaattgattaaaccaccaacaattctacgctctgttgtcaactctattacaggcagtagtaatgttggggacacactccccaccgggcagctgtccaacataccatggcgtcgggcaggggtaaagtacacaaacaatgaagcctattttgatgttgttgaagaaatagacgcaattatagataaatcaggatctacagtctttgcagaaattcagggggtcattgatgcttgcattaaactatctggaatgcctgatctctccctttctttcatgaaccctaggcttctggatgatgtcagctttcacccctgcatccggttcaagcgttgggaatctgaaagagttttgtcatttattcctccagatggaaatttccgactcatatcataccgtgtcagctcacaaaatctagtggcaataccagtgtatgtgaaacatagtatcagctttaaggagaacagttcttgcggcagatttgatataacaattggaccaaagcagaatatggggaaaactattgaaggaattacagtgacagttcacatgccaaaagttgtgctgaacatgaacctgacacccacacaaggcagctatacatttgatccagtcaccaaggtactaacatgggatgtgggaaaaattactccacaaaagctcccaagtcttaaaggactggtaaatttacagtctggagcccccaaaccagaagagaatccgagcctcaacatacagtttaagatccagcagcttgctatttcaggcttaaaagtaaaccgtttggacatgtatggggagaaatataagccatttaaaggagtcaaatacgtcacgaaagctggaaagttccaagtgaggacatgagaagaggccaaaattcctcaggaccagtttgttttccaagtgtcattacgatgtatcactattaggtaccaagtgagtgggaatacatattctagttaaagcatttgtgtctagctacacaccgctaacaaagttacttagttatcaatgtaggattcttaaggagctttaagctaaggaaaccttttagtgacttagcttattttgtatcttttcacttaggaagattttggaggtgatttttttccataggaggataccatctggcggctgcacattgtaacagtaaaggcagaaagctgtagtgataacctctctcctaaaagagttaactggtctcatccagcagaagctatcttaaatctgtgatgtgtcaggtgcagccaaatatcacaccttctgatcttagccatcccaaaccagtatctgtcccaagagaggaaattccccccacccccagaagtttacagaaaactgcctcttcaagtgtttgccttattcagcttttcacttgtgccattaagcaagcactgtagcaaaagccacttccacatggccctggcagggagcactgctgctccatgctccattctcactgtacttggtattgtattttttataaataagatttttatgtaaagcttagaatttgatttacagggaccttgctgcagtaaataccatctcaattttgtgccactggttcagctgttagcacagtaaaaaaatcatttgtatcaaaggggcaaatgctttattaaggtagtaaaagggaacattacttctgcttttaggaagttactgcaagcacaagcatttgtgcttttaagcaaattaaagtagtaaaagaaaaacttaagtgaaacctttgccatcttcatgttttataatataaagcttacccaacaccagttaagccatggttaacctaaatgcctcatgccccagttcagcaaaaggaggaaaatgtgcctgcctcacagtcatcagtctttttaaatcttttttgttgttgttcttaagggtttgaatttgtctgcattccttgtctttaggggaaattcccttttcatattgtgtgcttcccaaagctatagtcatagatttcttccagaaactattgtcataattgtcactggagtgcttaaatatacgtactatactgacaaaatacatggaagtgagttataatgaggcagaaacaaaatcctcggtaacattgatgatactctaccgatcaccgtggttttggaaagtcagtcaacagttgtattattgcactcaatttcattgtgacattttatttaacttcttcatcttggtggtccttgcccagttattttgcctcattagacatcaagaaatggagaaagactgaaagttaatatcttaagtgcttgttcttcatgtttccttcttgttatttatgctattctctttgtggctccattcttctttcaatcttctcagcttataaccgtctttcccttatgctaaggatagcccttacactcatcccatctatgctgtcaagggctgctggttggtgctggtacaaggagcccactcagcagttttcttacctttgcctgccctgcctttcatggaataagaaaggcaacgttttgcagcttccaaatttctgaagaaactaatctcagattggcagttaaagtcaaaatgttgccaaatatttattccttttgcctaagtttggctacccggttcaattgctttttatttttaatgtcttgactcttcagagttcgtacctcaaaagaacaatgagaacatttgctttgctttctgctgaatccctaatctcaacaatctatacctggactgtccagttctcctcctgtgctatcttctcttctatccaagtagaatgtatgccaggagctccttccctctagcaatttctactaaaatgtccaagtagaatgtttccttttacaatcaaattactgtatttattaatttgctagaatccagtaaatcattttggtagctctggctgtgctatcaataaaaagatgaaagcaacaagttgattttttttaggtctactattgattgaacattctccaatgggcaaggctcattgtcaaagcagggtgaacatgatcagattttcttctgcatcatcacacaagctgcgagtgttgctgcaaagcacttctcagtactccttccctaacctcagtatgttaatagccattaatacttggcttaagcatcaccattctggccacagtctgagagattagtgatcaaagctcccttccctatcactaccaccacctactgataacaaagatttctgaatacttagtagtagtaaaatatttttcaagcacagagttacagctaatcctggatcacttgttctaaattcataagggagtatatcaagagcaaatgaagtaaatgattctttcctgcgtgtgggagtcaccatcattttattcaaagggagttcctgtgataggttcattccttaagtggtgctacagaaggaccctaggaaaatgctgatcttgtcctgagaggcaactgatttgagaaaatgattatactacagcaggaaggcagcaccagtgaacatatggtaaatggcaaaaacaagacagttttagaaactgctaattcagtagcagccttggcctttcccttaactcaagcaggctggaatctgtctttatagtcggcaactttccaagataaagcagtgataatagcagttggcaacactaaatatcaatatcatcaccctttaatgacatgttacccctttcagatctagaaaatcaggnaaaaagtgatgtcccaactctactctaaaaacctgctcctactattttagtcagtgtttctttaaggaagaagaggactatgtccccaaaagctaactctgttttatagccctggtggatccctgaaaaccctatttattctatactgggctttggaatatgaaaaatggacctgtgtggccgggcgtggtggatcacacctgtaatcccagcactttgggaggtcaaggtgggcggatcacttgaggtcaggagttcgagaccagcctggccaacatggtgaaactccatctctactaaaaatacaaaaattagccaggcatggtggcacacacctgtaatcccagctacatgggaggctgaggcaggagaattgcttgaacccgggaggcagaggttgcagtgagctgagattgcaccactgcactgcagcctgggcaacagagcaagtctctgtcttgcagcagggggaaggacctgtggtactcctacaaacttaacaactttagcttttcggggaacagtggtggtctccacagatagctagaatcttctaagatgaaaataaactgtttcatccagctgctttctgcctgttaacctttgccacttccattccttcaagtgtgtaatccccagggttgtcttgtattacacacatccttgttaagtaaatataccactgttgatttcttcttccagtgcaacatttggattaaataaaaatctttagtttccag

SEQ ID NO: 59386 - DNA, 3639 bp, Homo sapiens
agaaacccaccatttttctaggccctggattatgtagaagatttagatactaagcctcaagagacgtctttcctctcatttacggtcttcctgcatatttaaaatttctaatacggtagacagagtcggtgtctttgaagctgttaatcaggcaatttcctgggcactccagctgcgggtcctcgcggccttctcggcttctccagcttcggtaggagaggatccggcgccgaatcactgactggcacaggtgttgggatagtgtctcacttggtcacccaggctggagtgcagtggcgcaatcttagctctctacagcgtcgatcttcctcctgggctcaagcaattctcctgcttcatcctcctgagtacctaggactacagaaaatgatccacagtctatttctcataaactgttccggtgacatatttctagagaagcactggaagagcgttgtgagccagtctgtctgtgattatttctttgaagctcaagagaaagctgctgatgttgcgggataagctcttctttgtatctgtcatacagaccgaagtgccacctctctttgtaattgagttcctacatcgagttgctgacacttttcaggactactttggtgagtgttcagaggctgcaattaaggataatgtggtcatagtatatgaactcttagaagaaatgttagacaatggatttccactggctaccgaatctaacattttgaaagaattgattaaaccaccaacaattctacgctctgttgtcaactctattacaggcagtagtaatgttggggacacactccccaccgggcagctgtccaacataccatggcgtcgggcaggggtaaagtacacaaacaatgaagcctattttgatgttgttgaagaaatagacgcaattatagataaatcaggatctacagtctttgcagaaattcagggggtcattgatgcttgcattaaactatctggaatgcctgatctctccctttctttcatgaaccctaggcttctggatgatgtcagctttcacccctgcatccggttcaagcgttgggaatctgaaagagttttgtcatttattcctccagatggaaatttccgactcatatcataccgtgtcagctcacaaaatctagtggcaataccagtgtatgtgaaacatagtatcagctttaaggagaacagttcttgcggcagatttgatataacaattggaccaaagcagaatatggggaaaactattgaaggaattacagtgacagttcacatgccaaaagttgtgctgaacatgaacctgacacccacacaaggcagctatacatttgatccagtcaccaaggtactaacatgggatgtgggaaaaattactccacaaaagctcccaagtcttaaaggactggtaaatttacagtctggagcccccaaaccagaagagaatccgagcctcaacatacagtttaagatccagcagcttgctatttcaggcttaaaagtaaaccgtttggacatgtatggggagaaatataagccatttaaaggagtcaaatacgtcacgaaagctggaaagttccaagtgaggacatgagaagaggccaaaattcctcaggaccagtttgttttccaagtgtcattacgatgtatcactattaggtaccaagtgagtgggaatacatattctagttaaagcatttgtgtctagctacacaccgctaacaaagttacttagttatcaatgtaggattcttaaggagctttaagctaaggaaaccttttagtgacttagcttattttgtatcttttcacttaggaagattttggaggtgatttttttccataggaggataccatctggcggctgcacattgtaacagtaaaggcagaaagctgtagtgataacctctctcctaaaagagttaactggtctcatccagcagaagctatcttaaatctgtgatgtgtcaggtgcagccaaatatcacaccttctgatcttagccatcccaaaccagtatctgtcccaagagaggaaattccccccacccccagaagtttacagaaaactgcctcttcaagtgtttgccttattcagcttttcacttgtgccattaagcaagcactgtagcaaaagccacttccacatggccctggcagggagcactgctgctccatgctccattctcactgtacttggtattgtattttttataaataagatttttatgtaaagcttagaatttgatttacagggaccttgctgcagtaaataccatctcaattttgtgccactggttcagctgttagcacagtaaaaaaatcatttgtatcaaaggggcaaatgctttattaaggtagtaaaagggaacattacttctgcttttaggaagttactgcaagcacaagcatttgtgcttttaagcaaattaaagtagtaaaagaaaaacttaagtgaaacctttgccatcttcatgttttataatataaagcttacccaacaccagttaagccatggttaacctaaatgcctcatgccccagttcagcaaaaggaggaaaatgtgcctgcctcacagtcatcagtctttttaaatcttttttgttgttgttcttaagggtttgaatttgtctgcattccttgtctttaggggaaattcccttttcatattgtgtgcttcccaaagctatagtcatagatttcttccagaaactattgtcataattgtcactggagtgcttaaatatacgtactatactgacaaaatacatggaagtgagttataatgaggcagaaacaaaatcctcggtaacattgatgatactctaccgatcaccgtggttttggaaagtcagtcaacagttgtattattgcactcaatttcattgtgacattttatttaacttcttcatcttggtggtccttgcccagttattttgcctcattagacatcaagaaatggagaaagactgaaagttaatatcttaagtgcttgttcttcatgtttccttcttgttatttatgctattctctttgtggctccattcttctttcaatcttctcagcttataaccgtctttcccttatgctaaggatagcccttacactcatcccatctatgctgtcaagggctgctggttggtgctggtacaaggagcccactcagcagttttcttacctttgcctgccctgcctttcatggaataagaaaggcaacgttttgcagcttccaaatttctgaagaaactaatctcagattggcagttaaagtcaaaatgttgccaaatatttattccttttgcctaagtttggctacccggttcaattgctttttatttttaatgtcttgactcttcagagttcgtacctcaaaagaacaatgagaacatttgctttgctttctgctgaatccctaatctcaacaatctatacctggactgtccagttctcctcctgtgctatcttctcttctatccaagtagaatgtatgccaggagctccttccctctagcaatttctactaaaatgtccaagtagaatgtttccttttacaatcaaattactgtatttattaatttgctagaatccagtaaatcattttggtagctctggctgtgctatcaataaaaagatgaaagcaaca

SEQ ID NO: 59387 - DNA, 1972 bp, Homo sapiens
atcaatgtaggattcttaaggagctttaagctaaggaaacctacattgataacaaagttacttagttatcaatgtaggattcttaaggagctttaagctaaggaaaccttttagtgacttagcttattttgtatcttttcacttaggaagattttggaggtgatttttttccataggaggataccatctggcggctgcacattgtaacagtaaaggcagaaagctgtagtgataacctctctcctaaaagagttaactggtctcatccagcagaagctatcttaaatctgtgatgtgtcaggtgcagccaaatatcacaccttctgatcttagccatcccaaaccagtatctgtcccaagagaggaaattccccccacccccagaagtttacagaaaactgcctcttcaagtgtttgccttattcagcttttcacttgtgccattaagcaagcactgtagcaaaagccacttccacatggccctggcagggagcactgctgctccatgctccattctcactgtacttggtattgtattttttataaataagatttttatgtaaagcttagaatttgatttacagggaccttgctgcagtaaataccatctcaattttgtgccactggttcagctgttagcacagtaaaaaaatcatttgtatcaaaggggcaaatgctttattaaggtagtaaaagggaacattacttctgcttttaggaagttactgcaagcacaagcatttgtgcttttaagcaaattaaagtagtaaaagaaaaacttaagtgaaacctttgccatcttcatgttttataatataaagcttacccaacaccagttaagccatggttaacctaaatgcctcatgccccagttcagcaaaaggaggaaaatgtgcctgcctcacagtcatcagtctttttaaatcttttttgttgttgttcttaagggtttgaatttgtctgcattccttgtctttaggggaaattcccttttcatattgtgtgcttcccaaagctatagtcatagatttcttccagaaactattgtcataattgtcactggagtgcttaaatatacgtactatactgacaaaatacatggaagtgagttataatgaggcagaaacaaaatcctcggtaacattgatgatactctaccgatcaccgtggttttggaaagtcagtcaacagttgtattattgcactcaatttcattgtgacattttatttaacttcttcatcttggtggtccttgcccagttattttgcctcattagacatcaagaaatggagaaagactgaaagttaatatcttaagtgcttgttcttcatgtttccttcttgttatttatgctattctctttgtggctccattcttctttcaatcttctcagcttataaccgtctttcccttatgctaaggatagcccttacactcatcccatctatgctgtcaagggctgctggttggtgctggtacaaggagcccactcagcagttttcttacctttgcctgccctgcctttcatggaataagaaaggcaacgttttgcagcttccaaatttctgaagaaactaatctcagattggcagttaaagtcaaaatgttgccaaatatttattccttttgcctaagtttggctacccggttcaattgctttttatttttaatgtcttgactcttcagagttcgtacctcaaaagaacaatgagaacatttgctttgctttctgctgaatccctaatctcaacaatctatacctggactgtccagttctcctcctgtgctatcttctcttctatccaagtagaatgtatgccaggagctccttccctctagcaatttctactaaaatgtccaagtagaatgtttccttttacaatcaaattactgtatttattaatttgctagaatccagtaaatcattttggtagctctggctgtgctatcaataaaaagatgaaagcaaca

SEQ ID NO: 59388 - DNA, 3751 bp, Homo sapiens
agaaacccaccatttttctaggccctggattatgtagaagatttagatactaagcctcaagagacgtctttcctctcatttacggtcttcctgcatatttaaaatttctaatacggtagacagagtcggtgtctttgaagctgttaatcaggcaatttcctgggcactccagctgcgggtcctcgcggccttctcggcttctccagcttcggtaggagaggatccggcgccgaatcactgactggcacaggtgttgggatagtgtctcacttggtcacccaggctggagtgcagtggcgcaatcttagctctctacagcgtcgatcttcctcctgggctcaagcaattctcctgcttcatcctcctgagtacctaggactacagaaaatgatccacagtctatttctcataaactgttccggtgacatatttctagagaagcactggaagagcgttgtgagccagtctgtctgtgattatttctttgaagctcaagagaaagctgctgatgttgaaaatgtaccacctgtcatttcaacacctcaccactacctcatcagtatctaccgggataagctcttctttgtatctgtcatacagaccgaagtgccacctctctttgtaattgagttcctacatcgagttgctgacacttttcaggactactttggtgagtgttcagaggctgcaattaaggataatgtggtcatagtatatgaactcttagaagaaatgttagacaatggatttccactggctaccgaatctaacattttgaaagaattgattaaaccaccaacaattctacgctctgttgtcaactctattacaggcagtagtaatgttggggacacactccccaccgggcagctgtccaacataccatggcgtcgggcaggggtaaagtacacaaacaatgaagcctattttgatgttgttgaagaaatagacgcaattatagataaatcaggatctacagtctttgcagaaattcagggggtcattgatgcttgcattaaactatctggaatgcctgatctctccctttctttcatgaaccctaggcttctggatgatgtcagctttcacccctgcatccggttcaagcgttgggaatctgaaagagttttgtcatttattcctccagatggaaatttccgactcatatcataccgtgtcagctcacaaaatctagtggcaataccagtgtatgtgaaacatagtatcagctttaaggagaacagttcttgcggcagatttgatataacaattggaccaaagcagaatatggggaaaactattgaaggaattacagtgacagttcacatgccaaaagttgtgctgaacatgaacctgacacccacacaaggcagctatacatttgatccagtcaccaaggtactaacatgggatgtgggaaaaattactccacaaaagctcccaagtcttaaaggactggtaaatttacagtctggagcccccaaaccagaagagaatccgagcctcaacatacagtttaagatccagcagcttgctatttcaggcttaaaagtaaaccgtttggacatgtatggggagaaatataagccatttaaaggagtcaaatacgtcacgaaagctggaaagttccaagtgaggacatgagaagaggccaaaattcctcaggaccagtttgttttccaagtgtcattacgatgtatcactattaggtaccaagtgagtgggaatacatattctagttaaagcatttgtgtctagctacacaccgctaacaaagttacttagttatcaatgtaggattcttaaggagctttaagctaaggaaaccttttagtgacttagcttattttgtatcttttcacttaggaagattttggaggtgatttttttccataggaggataccatctggcggctgcacattgtaacagtaaaggcagaaagctgtagtgataacctctctcctaaaagagttaactggtctcatccagcagaagctatcttaaatctgtgatgtgtcaggtgcagccaaatatcacaccttctgatcttagccatcccaaaccagtatctgtcccaagagaggaaattccccccacccccagaagtttacagaaaactgcctcttcaagtgtttgccttattcagcttttcacttgtgccattaagcaagcactgtagcaaaagccacttccacatggccctggcagggagcactgctgctccatgctccattctcactgtacttggtattgtattttttataaataagatttttatgtaaagcttagaatttgatttacagggaccttgctgcagtaaataccatctcaattttgtgccactggttcagctgttagcacagtaaaaaaatcatttgtatcaaaggggcaaatgctttattaaggtagtaaaagggaacattacttctgcttttaggaagttactgcaagcacaagcatttgtgcttttaagcaaattaaagtagtaaaagaaaaacttaagtgaaacctttgccatcttcatgttttataatataaagcttacccaacaccagttaagccatggttaacctaaatgcctcatgccccagttcagcaaaaggaggaaaatgtgcctgcctcacagtcatcagtctttttaaatcttttttgttgttgttcttaagggtttgaatttgtctgcattccttgtctttaggggaaattcccttttcatattgtgtgcttcccaaagctatagtcatagatttcttccagaaactattgtcataattgtcactggagtgcttaaatatacgtactatactgacaaaatacatggaagtgagttataatgaggcagaaacaaaatcctcggtaacattgatgatactctaccgatcaccgtggttttggaaagtcagtcaacagttgtattattgcactcaatttcattgtgacattttatttaacttcttcatcttggtggtccttgcccagttattttgcctcattagacatcaagaaatggagaaagactgaaagttaatatcttaagtgcttgttcttcatgtttccttcttgttatttatgctattctctttgtggctccattcttctttcaatcttctcagcttataaccgtctttcccttatgctaaggatagcccttacactcatcccatctatgctgtcaagggctgctggttggtgctggtacaaggagcccactcagcagttttcttacctttgcctgccctgcctttcatggaataagaaaggcaacgttttgcagcttccaaatttctgaagaaactaatctcagattggcagttaaagtcaaaatgttgccaaatatttattccttttgcctaagtttggctacccggttcaattgctttttatttttaatgtcttgactcttcagagttcgtacctcaaaagaacaatgagaacatttgctttgctttctgctgaatccctaatctcaacaatctatacctggactgtccagttctcctcctgtgctatcttctcttctatccaagtagaatgtatgccaggagctccttccctctagcaatttctactaaaatgtccaagtagaatgtttccttttacaatcaaattactgtatttattaatttgctagaatccagtaaatcattttggtagctctggctgtgctatcaataaaaagatgaaagcaacaagttgattttttttaggtctactattgattgaaccggatagctgccgggatcctctagg

SEQ ID NO: 59389 - DNA, 2593 bp, Homo sapiens
agaaacccaccatttttctaggccctggattatgtagaagatttagatactaagcctcaagagacgtctttcctctcatttacggtcttcctgcatatttaaaatttctaatacggtagacagagtcggtgtctttgaagctgttaatcaggcaatttcctgggcactccagctgcgggtcctcgcggccttctcggcttctccagcttcggtaggagaggatccggcgccgaatcactgactggcacaggtgttgggatagtgtctcacttggtcacccaggctggagtgcagtggcgcaatcttagctctctacagcgtcgatcttcctcctgggctcaagcaattctcctgcttcatcctcctgagtacctaggactacagaaaatgatccacagtctatttctcataaactgttccggtgacatatttctagagaagcactggaagagcgttgtgagccagtctgtctgtgattatttctttgaagctcaagagaaagctgctgatgttgaaaatgtaccacctgtcatttcaacacctcaccactacctcatcagtatctaccgggataagctcttctttgtatctgtcatacagaccgaagtgccacctctctttgtaattgagttcctacatcgagttgctgacacttttcaggactactttggtgagtgttcagaggctgcaattaaggataatgtggtcatagtatatgaactcttagaagaaatgttagacaatggatttccactggctaccgaatctaacattttgaaagaattgattaaaccaccaacaattctacgctctgttgtcaactctattacaggcagtagtaatgttggggacacactccccaccgggcagctgtccaacataccatggcgtcgggcaggggtaaagtacacaaacaatgaagcctattttgatgttgttgaagaaatagacgcaattatagataaatcaggatctacagtctttgcagaaattcagggggtcattgatgcttgcattaaactatctggaatgcctgatctctccctttctttcatgaaccctaggcttctggatgatgtcagctttcacccctgcatccggttcaagcgttgggaatctgaaagagttttgtcatttattcctccagatggaaatttccgactcatatcataccgtgtcagctcacaaaatctagtggcaataccagtgtatgtgaaacatagtatcagctttaaggagaacagttcttgcggcagatttgatataacaattggaccaaagcagaatatggggaaaactattgaaggaattacagtgacagttcacatgccaaaagttgtgctgaacatgaacctgacacccacacaaggcagctatacatttgatccagtcaccaaggtactaacatgggatgtgggaaaaattactccacaaaagctcccaagtcttaaaggactggtaaatttacagtctggagcccccaaaccagaagagaatccgagcctcaacatacagtttaagatccagcagcttgctatttcaggcttaaaagtaaaccgtttggacatgtatggggagaaatataagccatttaaaggagtcaaatacgtcacgaaagctggaaagttccaagtgaggacatgagaagaggccaaaattcctcaggaccagtttgttttccaagtgtcattacgatgtatcactattaggtaccaagtgagtgggaatacatattctagttaaagcatttgtgtctagctacacaccgctaacaaagttacttagttatcaatgtaggattcttaaggagctttaagctaaggaaaccttttagtgacttagcttattttgtatcttttcacttaggaagattttggaggtgatttttttccataggaggataccatctggcggctgcacattgtaacagtaaaggcagaaagctgtagtgataacctctctcctaaaagagttaactggtctcatccagcagaagctatcttaaatctgtgatgtgtcaggtgcagccaaatatcacaccttctgatcttagccatcccaaaccagtatctgtcccaagagaggaaattccccccacccccagaagtttacagaaaactgcctcttcaagtgtttgccttattcagcttttcacttgtgccattaagcaagcactgtagcaaaagccacttccacatggccctggcagggagcactgctgctccatgctccattctcactgtacttggtattgtattttttataaataagatttttatgtaaagcttagaatttgatttacagggaccttgctgcagtaaataccatctcaattttgtgccactggttcagctgttagcacagtaaaaaaatcatttgtatcaaaggggcaaatgctttattaaggtagtaaaagggaacattacttctgcttttaggaagttactgcaagcacaagcatttgtgcttttaagcaaattaaagtagtaaaagaaaaacttaagtgaaacctttgccatcttcatgttttataatataaagcttacccaacaccagttaagccatggagtaaatggcagggtgcgagctcgat

SEQ ID NO: 59390 - DNA, 686 bp, Homo sapiens
agtgacagttcacatgccaaaagttgtgctgaacatgaacctgacacccacacaaggcagctatacatttgatccagtcaccaaggtacagccacttcaaatcaagagtgagcaagtgtttctgcaatctattttgtgatttgtggggaggaatggagggaaaggtttggcaccttgtttaaaactaaagttcgtatcaaaacctagagagcatactgtgctgtgcttctgccactggctgcagaaggaatcctgcagctgctactgagtagatgaacagaaaaatgtgtcattctgtcctttttcagagtgtgccttcactcatccattattaatccagagcctgactctgctatctaataagaaagaagtaaaagcttttttaaaaagagaaaacattatgtagattgaagaagatattatgatggtctatgaattactaagttttctatataaattgatcactaagacctttttcttcctttataatttaaaagcattatttcatactctttcacagggctaggaaagttgcttcctcactctacttaaatttttgtgtaacagagggttttcagagaaactgtagcagatgattttctctcagcttcctgattagctggtaaatatgattgttttcaatagcagagtcattgagctacctgataaatgaaaagacatgtttt

SEQ ID NO: 59391 - DNA, 1431 bp, Homo sapiens
agaaacccaccatttttctaggccctggattatgtagaagatttagatactaagcctcaagagacgtctttcctctcatttacggtcttcctgcatatttaaaatttctaatacggtagacagagtcggtgtctttgaagctgttaatcaggcaatttcctgggcactccagctgcgggtcctcgcggccttctcggcttctccagcttcggtaggagaggatccggcgccgaatcactgactggcacaggtgttgggatagtgtctcacttggtcacccaggctggagtgcagtggcgcaatcttagctctctacagcgtcgatcttcctcctgggctcaagcaattctcctgcttcatcctcctgagtacctaggactacagaaaatgatccacagtctatttctcataaactgttccggtgacatatttctagagaagcactggaagagcgttgtgagccagtctgtctgtgattatttctttgaagctcaagagaaagctgctgatgttgaaaatgtaccacctgtcatttcaacacctcaccactacctcatcagtatctaccgggataagctcttctttgtatctgtcatacagaccgaagtgccacctctctttgtaattgagttcctacatcgagttgctgacacttttcaggactactttggtgagtgttcagaggctgcaattaaggataatgtggtcatagtatatgaactcttagaagaaatgttagacaatggatttccactggctaccgaatctaacattttgaaagaattgattaaaccaccaacaattctacgctctgttgtcaactctattacaggcagtagtaatgttggggacacactccccaccgggcagctgtccaacataccatggcgtcgggcaggggtaaagtacacaaacaatgaagcctattttgatgttgttgaagaaatagacgcaattatagataaatcaggatctacagtctttgcagaaattcagggggtcattgatgcttgcattaaactatctggaatgcctgatctctccctttctttcatgaaccctaggcttctggatgatgtcagctttcacccctgcatccggttcaagcgttgggaatctgaaagagttttgtcatttattcctccagatggaaatttccgactcatatcataccgtgtcagctcacaaaagtatgttgatgcatcagccagaatctgccatcatacatatcaagtacaactcacctttccctgtttctttctgaaagttgagtacttgaggtcatcactgctcactttaaccatagctcaccaggagacccagtgagaacgggtgaaaatacgcacctaaaataatccgtatactttgaatgtatgagtgtagagtggtactaagtgagactagagtaaaatctatagccaagaacaagca

SEQ ID NO: 59392 - DNA, 858 bp, Homo sapiens
cgatgagctcagaagaaacaagctgcaaccatggttgggactgtccatatcaagaaccatctgcagtgagcgccatgcgtggagagccacatccacatgaaacttcatcctggccaagcagcaccacactctgtccatcattgtcactgcccgcagaagcactagcaagacagccacggtgcacacggagcaccttcacgactctcagctcccccaaggagtccagactaagtgactgtcaccagagaaggatcatcaggagcagccagggatgcccccggcacacagggactaggtctagtgagaacattagagggcggtgtaaatggatccccatgcctgggcacctgtaatcccaactacttgggaggcaccatcccagagagctccaagcgtcctttttttttttttttttcctttgagtgctgtctctggacatcttcagcccagaatcttctcaggagcaaaggcttcctgatgcctcattcatgtcaagaaaggaggccaggagccatcctgtgttcagatggttgagacagtgactacgatggcaggacaatgccgtgagaagcacttcatggtgacagagcccaacccagccgggaacagctgcgatggggaagctctggagcattttgtgagcaccgtctcggtggatgggaaagccaaagtctctgcccgtctcttactggaggcactaaaccccctccctgggttgacctcacagacattgaagtgagtctgcccacaaaggaaaagaggccagagactgtcgtgaagacatccactaggtaccagaaggaaagctgagggggcagcaaagacaataaaaggtgtctagagaggtcaaaaaagtgt

SEQ ID NO: 59393 - DNA, 631 bp, Homo sapiens
aattgatcctgcatattttttactgaaataaaattagcttcaccctatgtaatactatccaagaaaccatggggttttaatgggcttcattgttttatgggctttttcctaatacatattaaaatagatgactattaatgttcatctgtgcaacatttaaaatcatcctgcacaccagtagcgcagtatatcaacacattcagaaacacagatcaaaaagagtcaagaaaaacagatcactggcgttgggaatggacaaaagccaatgatcttctgtttctatgtgaacactcctgaatctctgtgcatttccaaatgggtaagatatatattgctatctctattcaaatgatttttaggattgttggaaaaaatacaccccagtacaaagcacaatcccaaggatctagtagtttgatacttcttgccacctgccatggtttgaatgtctgtcccctccaaaactcatgttgaaatttagttgccattgtaacagtattaacagatgggatctcagagagctgattaggccattaggactccaccctcatgggtggggttggtgccattataaaagggcaagttcagccctctttctttgcccttctgtacttctgccatgggatagcac

SEQ ID NO: 59394 - DNA, 368 bp, Homo sapiens
agggctgcactgctccatcttttatgcctccctctaccatctactgtggaaattaaggcctttccactttactgtggaccaagcatattcaggcttctattagcagtgagtttgccccaacccctgggaccttggccagggtatttaattctgtgttccaaaaaagtgcccccaagttaatgtatttttgctttgtattctgcagctttatattctgacctccttgatcaatcaccctcaaaatataatgccaggggtactatacagacttaatatatccctgctaattctttcagtttctttgatgagcattctttcttctcttgtcagacccagcatgtccctggccaggatatgctgagatttaa

SEQ ID NO: 59395 - DNA, 392 bp, Homo sapiens
atttcagtggaatgaaagaatagtttcctttttaggaaaattacgtgttccaaattgatatatccctgtcaccacctctcaacctcttcttagaaattcaatataataacagtccaggagcctcttgagcctttcaacatcctcagcccgctttttccatcctgcctttctttctgcccttcttggataatctttcccactcatttttcccctccaacaatctggcagtagtaggaaaggtaggaagaagaatggtgatttgttcaaattcttctttgccccacacatgaaatgggtactgctgaaggcagtgaaaaatagatggctgtgggtggtttgttagtgactcatcagtctttccattctgctgggaaagggaagggctgggacca

SEQ ID NO: 59396 - DNA, 861 bp, Homo sapiens
ctgacgcccatgccgctgtgagctatgattgcaccactgccctgagcctggacgacagagcaagttcctgtcttaaaaaaaaaagtaataaaaaagacatttaaaaaaaaattagagctcagtgacctgtgactcactttgccactttgtcattttcttgacttctgtcccaacgccagccctgtaatatggagataaagagtggggaggacagaactctgaaacctaaaaggcaagatttttgctaaaccggagaacgtaaaaatacattcctagaggcaatctaaccagccagataaccagaagtttactcttcaaagccaagaatcagtacccccacctcaccttccattctctcttaggctttgtctatgtctctaaggggagtttttcagttgactgatgaggtcctgactggtagggaaagcctgcagggaaatcctgtggcaaagcacactcttgatcacctacttaacaagaaggtctagcaggacattcttgatccaggtcagcttcttccctgaaaataatacatatttttaatttctgtttgaaaaaactccactgtgaaattactctgcttatattagaaggtatgaagacagtagttatgtactgttcgtttgcatacggtcattttgagatagaaaaattaaatttttttaggaaaagaatttcaagcaactttctacgaaaatacagcttgtggttaaatttcctaatgaaagaggaattattcactgaaaaatttgtctaatctgtgccacctcaaaataagaattgtgcctcttcaatgaatgttgtatatgagaatgttacatttgtaacagcacaggaaactcaataaattataaatgaatt

SEQ ID NO: 59397 - DNA, 1958 bp, Homo sapiens
  misc_feature (2)..(4): n is a, c, g, or t
  misc_feature (6)..(6): n is a, c, g, or t
  misc_feature (11)..(11): n is a, c, g, or t
cnnncncgcgnggtcttcccttcccgcgttccccgggagaaacatggccgggagcagcgaggaggcgccagactacgggcgaggcgtcgtgattatggatgattggccagggtatgacttgaatttattcacgtacccacagcactattatggagacttggagtatgtcctcatccctcatggtatcattgtggacagaattgagcggctggccaaggatattatgaaagacataggatatagtgacatcatggtcctgtgtgtgcttaaaggaggttacaaattctgtgctgatctcgtagaacaccttaagaacatcagccgaaattcagatcgatttgtctcaatgaaggttgatttcatcagactaaaaagttacaggaatgaccagtccatgggtgagatgcagataatcggaggcgatgatctttcaacgctggctggaaagaatgttctcattgttgaggatgttgtcggaactgggaggaccatgaaagcactactcagcaatatagagaaatacaagcccaacatgattaaggtagccagtttgttggtgaagagaacatccagaagtgacggctttagacctgactatgctggatttgagattccaaacttatttgtggtgggatatgccttagattacaatgaatacttcagagatctgaatcacatatgcgtcatcaatgagcacggtaaagaaaaatatcgagtctaaagacatgaattctcaccactaaagtcccagatagcatcatatttacgcctgtacttgggaagccagctgtcaagtttgtccccccaggcatcttcactcagcaggatataaaagaaaaaaatgttcaaatgagagagctttcttttctgaggttaatataaagagtatcaaaggttcctaaggaaaagaaagcagtgcttttatttgacttgttccaaattaaacactccgccttgtgactcagcaatgctatctaccttcacactcctgagctccgccttcctttgttttgatacagtcattatatttgattagtattcccaggaatacccccacctagttactcaaatatttttcacttaactttttatactcttattttggtaataagcttacaatattaagaagctggggacttttttttaactgaagacttgagtcccctataccgggaatgcagctattaatagattcccatattttaaaaggagggaaaggacaatttaatataaatttctgtttgtgcatttctgacaggccattattatctgctttgacaaagcctttctgaaacgcagtgtacaatgaatcttaatgatgttatgaaacgagctttgctcggggctcttgattggagcttccggtatgtgatgacggtatgtcatgtatgcatggatgtactcaactgtgtttaatactctgaattttaattagaaaaaaatacaatagcagcaaggccctggtttctaagctgtatccttttattcatgtgggacatgagcaaatggcagaattaggggcgagtgctttcaatgctcgaaactaagcaagtataaatttttcctcttatttgcatgaaaggacaagacactgttatgccctgtcctaaatgtgaagacagaggttgaattttttaaaaaatatctttaaaagactgatcacaaaatccaaggtgctacaggaaacaagcacactcaagaaagtttttttctgaataacatttttttccaatttctccgttttataagacatttcctaatttatggggattttaattgaaaataaacttgagtcccaatagagctgtttttttctcacttcctacaaaatgcaaatgcaaaataaataactaagcagcttttgtttggttctgaaccgtatgtggcgtattgttattaggttctagcttcctttaaactaataaagaataagaaaacttgttatgttttaaaaaatc

SEQ ID NO: 59398 - DNA, 301 bp, Homo sapiens
ctggtcgatctctagcaggatcccccggagacacttacgatagaaagtttttttctgaataacatttttttccaatttctccgttttataagacatttcctaatttatggggattttaattgaaaataaacttgagtcccaatagagctgtttttttctcacttcctacaaaatgcaaatgcaaaataaataactaagcagcttttgtttggttctgaaccgtatgtggcgtattgttattaggttctagcttcctttaaactaataaagaataagaaaacttgttatgttttaaaaaatc

SEQ ID NO: 59399 - DNA, 1833 bp, Homo sapiens
  misc_feature (2)..(4): n is a, c, g, or t
  misc_feature (6)..(6): n is a, c, g, or t
  misc_feature (11)..(11): n is a, c, g, or t
cnnncncgcgnggtcttcccttcccgcgttccccgggagaaacatggccgggagcagcgaggaggcgccagactacgggcgaggcgtcgtgaattgagcggctggccaaggatattatgaaagacataggatatagtgacatcatggtcctgtgtgtgcttaaaggaggttacaaattctgtgctgatctcgtagaacaccttaagaacatcagccgaaattcagatcgatttgtctcaatgaaggttgatttcatcagactaaaaagttacaggaatgaccagtccatgggtgagatgcagataatcggaggcgatgatctttcaacgctggctggaaaggatgttgtcggaactgggaggaccatgaaagcactactcagcaatatagagaaatacaagcccaacatgattaaggtagccagtttgttggtgaagagaacatccagaagtgacggctttagacctgactatgctggatttgagattccaaacttatttgtggtgggatatgccttagattacaatgaatacttcagagatctgaatcacatatgcgtcatcaatgagcacggtaaagaaaaatatcgagtctaaagacatgaattctcaccactaaagtcccagatagcatcatatttacgcctgtacttgggaagccagctgtcaagtttgtccccccaggcatcttcactcagcaggatataaaagaaaaaaatgttcaaatgagagagctttcttttctgaggttaatataaagagtatcaaaggttcctaaggaaaagaaagcagtgcttttatttgacttgttccaaattaaacactccgccttgtgactcagcaatgctatctaccttcacactcctgagctccgccttcctttgttttgatacagtcattatatttgattagtattcccaggaatacccccacctagttactcaaatatttttcacttaactttttatactcttattttggtaataagcttacaatattaagaagctggggacttttttttaactgaagacttgagtcccctataccgggaatgcagctattaatagattcccatattttaaaaggagggaaaggacaatttaatataaatttctgtttgtgcatttctgacaggccattattatctgctttgacaaagcctttctgaaacgcagtgtacaatgaatcttaatgatgttatgaaacgagctttgctcggggctcttgattggagcttccggtatgtgatgacggtatgtcatgtatgcatggatgtactcaactgtgtttaatactctgaattttaattagaaaaaaatacaatagcagcaaggccctggtttctaagctgtatccttttattcatgtgggacatgagcaaatggcagaattaggggcgagtgctttcaatgctcgaaactaagcaagtataaatttttcctcttatttgcatgaaaggacaagacactgttatgccctgtcctaaatgtgaagacagaggttgaattttttaaaaaatatctttaaaagactgatcacaaaatccaaggtgctacaggaaacaagcacactcaagaaagtttttttctgaataacatttttttccaatttctccgttttataagacatttcctaatttatggggattttaattgaaaataaacttgagtcccaatagagctgtttttttctcacttcctacaaaatgcaaatgcaaaataaataactaagcagcttttgtttggttctgaaccgtatgtggcgtattgttattaggttctagcttcctttaaactaataaagaataagaaaacttgttatgttttaaaaaatc

SEQ ID NO: 59400 - DNA, 1968 bp, Homo sapiens
cataagttgagggaattctcctctcaagtgatactcttttgttatgttttaaacaaatttctgatgaaaaaataccataaccaaaataatttgatttgcagattatggatgattggccagggtatgacttgaatttattcacgtacccacagcactattatggagacttggagtatgtcctcatccctcatggtatcattgtggacagaattgagcggctggccaaggatattatgaaagacataggatatagtgacatcatggtcctgtgtgtgcttaaaggaggttacaaattctgtgctgatctcgtagaacaccttaagaacatcagccgaaattcagatcgatttgtctcaatgaaggttgatttcatcagactaaaaagttacaggaatgaccagtccatgggtgagatgcagataatcggaggcgatgatctttcaacgctggctggaaagaatgttctcattgttgaggatgttgtcggaactgggaggaccatgaaagcactactcagcaatatagagaaatacaagcccaacatgattaaggtagccagtttgttggtgaagagaacatccagaagtgacggctttagacctgactatgctggatttgagattccaaacttatttgtggtgggatatgccttagattacaatgaatacttcagagatctgaatcacatatgcgtcatcaatgagcacggtaaagaaaaatatcgagtctaaagacatgaattctcaccactaaagtcccagatagcatcatatttacgcctgtacttgggaagccagctgtcaagtttgtccccccaggcatcttcactcagcaggatataaaagaaaaaaatgttcaaatgagagagctttcttttctgaggttaatataaagagtatcaaaggttcctaaggaaaagaaagcagtgcttttatttgacttgttccaaattaaacactccgccttgtgactcagcaatgctatctaccttcacactcctgagctccgccttcctttgttttgatacagtcattatatttgattagtattcccaggaatacccccacctagttactcaaatatttttcacttaactttttatactcttattttggtaataagcttacaatattaagaagctggggacttttttttaactgaagacttgagtcccctataccgggaatgcagctattaatagattcccatattttaaaaggagggaaaggacaatttaatataaatttctgtttgtgcatttctgacaggccattattatctgctttgacaaagcctttctgaaacgcagtgtacaatgaatcttaatgatgttatgaaacgagctttgctcggggctcttgattggagcttccggtatgtgatgacggtatgtcatgtatgcatggatgtactcaactgtgtttaatactctgaattttaattagaaaaaaatacaatagcagcaaggccctggtttctaagctgtatccttttattcatgtgggacatgagcaaatggcagaattaggggcgagtgctttcaatgctcgaaactaagcaagtataaatttttcctcttatttgcatgaaaggacaagacactgttatgccctgtcctaaatgtgaagacagaggttgaattttttaaaaaatatctttaaaagactgatcacaaaatccaaggtgctacaggaaacaagcacactcaagaaagtttttttctgaataacatttttttccaatttctccgttttataagacatttcctaatttatggggattttaattgaaaataaacttgagtcccaatagagctgtttttttctcacttcctacaaaatgcaaatgcaaaataaataactaagcagcttttgtttggttctgaaccgtatgtggcgtattgttattaggttctagcttcctttaaactaataaagaataagaaaacttgttatgttttaaaaaatc

SEQ ID NO: 59401 - DNA, 766 bp, Homo sapiens
  misc_feature (2)..(4): n is a, c, g, or t
  misc_feature (6)..(6): n is a, c, g, or t
  misc_feature (11)..(11): n is a, c, g, or t
cnnncncgcgnggtcttcccttcccgcgttccccgggagaaacatggccgggagcagcgaggaggcgccagactacgggcgaggcgtcgtgattatggatgattggccagggtatgacttgaatttattcacgtacccacagcactattatggagacttggagtatgtcctcatccctcatggtatcattgtggacagaattgagcggctggccaaggatattatgaaagacataggatatagtgacatcatggtcctgtgtgtgcttaaaggaggttacaaattctgtgctgatctcgtagaacaccttaagaacatcagccgaaattcagatcgatttgtctcaatgaaggttgatttcatcagactaaaaagttacaggctgcgtgctcggttgaagaggacaaccatctgtgatagaggaggactggccttcagtcaagggtatatgagtagctgtgctcccctgcaagaatctccaaataccctctggagaggttacctccaagtgctcattccctgtttccacatccggtttcagttaccaagatcagagcagaattaggtctgagatccagtgaggtgtacagtagcacctggaccattctagggctcactgtcttcaagccctggctgtgcccacagtcttcatgaagaaactggacactgtgtctgctggatgatgtatttcttcttgcttgaggttatgaaaaatatcaaaatatgtaaagaaacatgctggataaaaatattgccttgaaatcca

SEQ ID NO: 59402 - DNA, 1881 bp, Homo sapiens
  misc_feature (2)..(4): n is a, c, g, or t
  misc_feature (6)..(6): n is a, c, g, or t
  misc_feature (11)..(11): n is a, c, g, or t
cnnncncgcgnggtcttcccttcccgcgttccccgggagaaacatggccgggagcagcgaggaggcgccagactacgggcgaggcgtcgtgattatggatgattggccagggtatgacttgaatttattcacgtacccacagcactattatggagacttggagtatgtcctcatccctcatggtatcattgtggacagaattgagcggctggccaaggatattatgaaagacataggatatagtgacatcatggtcctgtgtgtgcttaaaggaggttacaaattctgtgctgatctcgtagaacaccttaagaacatcagccgaaattcagatcgatttgtctcaatgaaggttgatttcatcagactaaaaagttacaggaatgaccagtccatgggtgagatgcagataatcggaggcgatgatctttcaacgctggctggaaagaatgttctcattgttgaggatgttgtcggaactgggaggaccatgaaagcactactcagcaatatagagaaatacaagcccaacatgattaaggtagccagtttgttggtgaagagaacatccagaagtgacggctttagacctgactcacatatgcgtcatcaatgagcacggtaaagaaaaatatcgagtctaaagacatgaattctcaccactaaagtcccagatagcatcatatttacgcctgtacttgggaagccagctgtcaagtttgtccccccaggcatcttcactcagcaggatataaaagaaaaaaatgttcaaatgagagagctttcttttctgaggttaatataaagagtatcaaaggttcctaaggaaaagaaagcagtgcttttatttgacttgttccaaattaaacactccgccttgtgactcagcaatgctatctaccttcacactcctgagctccgccttcctttgttttgatacagtcattatatttgattagtattcccaggaatacccccacctagttactcaaatatttttcacttaactttttatactcttattttggtaataagcttacaatattaagaagctggggacttttttttaactgaagacttgagtcccctataccgggaatgcagctattaatagattcccatattttaaaaggagggaaaggacaatttaatataaatttctgtttgtgcatttctgacaggccattattatctgctttgacaaagcctttctgaaacgcagtgtacaatgaatcttaatgatgttatgaaacgagctttgctcggggctcttgattggagcttccggtatgtgatgacggtatgtcatgtatgcatggatgtactcaactgtgtttaatactctgaattttaattagaaaaaaatacaatagcagcaaggccctggtttctaagctgtatccttttattcatgtgggacatgagcaaatggcagaattaggggcgagtgctttcaatgctcgaaactaagcaagtataaatttttcctcttatttgcatgaaaggacaagacactgttatgccctgtcctaaatgtgaagacagaggttgaattttttaaaaaatatctttaaaagactgatcacaaaatccaaggtgctacaggaaacaagcacactcaagaaagtttttttctgaataacatttttttccaatttctccgttttataagacatttcctaatttatggggattttaattgaaaataaacttgagtcccaatagagctgtttttttctcacttcctacaaaatgcaaatgcaaaataaataactaagcagcttttgtttggttctgaaccgtatgtggcgtattgttattaggttctagcttcctttaaactaataaagaataagaaaacttgttatgttttaaaaaatc

SEQ ID NO: 59403 - DNA, 1905 bp, Homo sapiens
agcggaaggtggagaaaggtggaggaagatggagggagattatggatgattggccagggtatgacttgaatttattcacgtacccacagcactattatggagacttggagtatgtcctcatccctcatggtatcattgtggacagaattgagcggctggccaaggatattatgaaagacataggatatagtgacatcatggtcctgtgtgtgcttaaaggaggttacaaattctgtgctgatctcgtagaacaccttaagaacatcagccgaaattcagatcgatttgtctcaatgaaggttgatttcatcagactaaaaagttacaggaatgaccagtccatgggtgagatgcagataatcggaggcgatgatctttcaacgctggctggaaagaatgttctcattgttgaggatgttgtcggaactgggaggaccatgaaagcactactcagcaatatagagaaatacaagcccaacatgattaaggtagccagtttgttggtgaagagaacatccagaagtgacggctttagacctgactatgctggatttgagattccaaacttatttgtggtgggatatgccttagattacaatgaatacttcagagatctgaatcacatatgcgtcatcaatgagcacggtaaagaaaaatatcgagtctaaagacatgaattctcaccactaaagtcccagatagcatcatatttacgcctgtacttgggaagccagctgtcaagtttgtccccccaggcatcttcactcagcaggatataaaagaaaaaaatgttcaaatgagagagctttcttttctgaggttaatataaagagtatcaaaggttcctaaggaaaagaaagcagtgcttttatttgacttgttccaaattaaacactccgccttgtgactcagcaatgctatctaccttcacactcctgagctccgccttcctttgttttgatacagtcattatatttgattagtattcccaggaatacccccacctagttactcaaatatttttcacttaactttttatactcttattttggtaataagcttacaatattaagaagctggggacttttttttaactgaagacttgagtcccctataccgggaatgcagctattaatagattcccatattttaaaaggagggaaaggacaatttaatataaatttctgtttgtgcatttctgacaggccattattatctgctttgacaaagcctttctgaaacgcagtgtacaatgaatcttaatgatgttatgaaacgagctttgctcggggctcttgattggagcttccggtatgtgatgacggtatgtcatgtatgcatggatgtactcaactgtgtttaatactctgaattttaattagaaaaaaatacaatagcagcaaggccctggtttctaagctgtatccttttattcatgtgggacatgagcaaatggcagaattaggggcgagtgctttcaatgctcgaaactaagcaagtataaatttttcctcttatttgcatgaaaggacaagacactgttatgccctgtcctaaatgtgaagacagaggttgaattttttaaaaaatatctttaaaagactgatcacaaaatccaaggtgctacaggaaacaagcacactcaagaaagtttttttctgaataacatttttttccaatttctccgttttataagacatttcctaatttatggggattttaattgaaaataaacttgagtcccaatagagctgtttttttctcacttcctacaaaatgcaaatgcaaaataaataactaagcagcttttgtttggttctgaaccgtatgtggcgtattgttattaggttctagcttcctttaaactaataaagaataagaaaacttgttatgttttaaaaaatc

SEQ ID NO: 59404 - DNA, 443 bp, Homo sapiens
aagagcaccgtgcccacgtggggaccctggagccctggagagcccatgtcctctgaaagccggcagctccttccctcccaaactcctttccctccacccttcttgaagcgtcctctgggttcctgcctccagtgtctcttctccccttctctcttgaactcactttcagggttttggctcttcttgaggagccatcaaaccaaggttatcagcagcccccaggatgctcaatgcagtggttggtttccagtcccatctcccttggcccatctgcggcagtggacgctgttaatccttctcttccttgaaatactctccacctggacaccgccctctcccagtctctgcacattaccagctgctcccccgcatcccgcctccatccctgggctctgtcccccgcatcccgcctccatccctgggctctgtcccctcgctccgtc

SEQ ID NO: 59405 - DNA, 152 bp, Homo sapiens
aatctgcacagtcactctggaggataggggtgacctcatctctactgtccagaggtaaactgaggacttggggttaaggaacgacctggttacttggtgtgtagcagcagagctgggatttgaccagaacatcagctctggatcagcaaatg

SEQ ID NO: 59406 - DNA, 324 bp, Homo sapiens
tccacactggtgccttgcatggacttttggtctgattctaaattgcaggccaccccctcagtagcatcttctcagtttaggacaggtcagtcaactggaagagaagaaaggagaaagaatgggaggaaaggctgagttgtaaggcccagttgctttctccatgggttaatggtcactgggctgcttaggtaacagggctccccatcccactgtgcaggggccacactgcacatccctctcccttgctctcctctctgtcacacacaagccagttgtttattgtctccatttagctgttttcaagcggcacaaaataaaggccct

SEQ ID NO: 59407 - DNA, 370 bp, Homo sapiens
  misc_feature (81)..(81): n is a, c, g, or t
cctttttctggagaacggggtctcgctatattgcccaggcaggtctcgaactcctgggctcaagctatcctcccgcctctnagcctccgtttccagaaggtcaccaagtaatatctgcgtttcatcagttgcagttaagatttttgtttcttgaaatactggttttcaaacagatcagaattacctggggagcttgtttaaaatataaatgccccaaggccagctccaggacattctgactccataggtatgtggtaagcccagggaatccaggtaagctcaggtaagcccagggtaagccagggaattgttaacaggaagctggtggtttctggcacctggacaccgactgaattctaggtagcttgcc

SEQ ID NO: 59408 - DNA, 284 bp, Homo sapiens
aaaagaaaagtgttttgagatggtagaaaaccctaagattagaaggcaaggcaagaaagcataaaacaggaatagttaactatgtcaaattgctgctgagaggagaaaagcatgagaactgaaatgtatctattagatttggcatcatggaggatgtgggtgagaaaatgaacaaaatcaggctcaatgaaatgagacagaagccatattaaaatggatgaatagttagtgggggtaagagaaaagatggaaaaggtaatgctgacaactctcttgcaaaaaaa

SEQ ID NO: 59409 - DNA, 272 bp, Homo sapiens
agtggaagtggaatctttaccttattagaaataagatggcaagcagtgtacttgaatagaacgtgagataaaggtggtcaatgacatggtacttagttaaaacctgctgttggaggaaaagccaattctcaaacactttgaaatatggagtttgttcctggagtttgtttaatcccctttgatttaaataatattttatggtactgaaattgtttcaaagggaaacattttacatttcaattaaagtcactgtaaaatcttcttgaagaaaa

SEQ ID NO: 59410 - DNA, 280 bp, Homo sapiens
gacatgacagctgaaccagtgaagaatggcattttagccaagagtcagccaaatatggatcaagagtgtgatgtggttctaaactccagtatccagaacaagacagcacttttcaactgcttgccctggagtgtcatggcagtactcactgttatagtatgtgaggaaagctgaagaaatcggaggtgtttagattggaggatgcaaatagcaggattttagaaactgcagagcacaataatgctatacgagtcaagaatgagctggttcttattgtgag

SEQ ID NO: 59411 - DNA, 342 bp, Homo sapiens
gccgtgcttcggcactgttccatgattggtgcatatctacgccgctgattggctgttaaagtggcctaatgattggatggatgcaaagaggaatggacgaatcagagtttagcactaagcggcccttctgattggataaaatggagctatgtttggatccttcccttggttccaaagctctgcaatagaaagtcaatgcaaatgaattgcattggtctctatcagaatgagcaggagtctaaactcacaggcatcaagcgaatgctatgcacccagagaggctactttaacaaaatttttgtaaatattttccgatgtaaaataaaatgtgttccctggatt

SEQ ID NO: 59412 - DNA, 565 bp, Homo sapiens
aggcagaggttgcagtgagctgagatcacaccactgcactccagcctgggtgacagagcaagattccattaaaaaaaaaaaagaaagaaagaaagaatggaaagagacttagtctgacagttatttatttcattattctttttctttatatagaatatgcttcctaacgagatgtaaatagtagattaatctgactcttaaaacattttgtcataattcaccttttgatttacattaatctgcaagcttgcttctatagaaaattgcaaccacacattttgccatttcttagacaaactagtgtactggcttcacactttttcactctttttccttttcttcctatatgagaatgttcaggcagcagtgccacactcggcttgcacagctctgagaagggaagaagatgctagcctttcagaacggtggttttgtcatgtgtgtcttcatttgttcattgagcagaacatttgttgaatgcctaccaaacatcacataccctgcactggggatggacaattcatgagtgaagtgttttggaataaccaataagtaagtcagccac

SEQ ID NO: 59413 - DNA, 377 bp, Homo sapiens
ggattgaggtgaagatacaacaaagaaaggaaattgaacggaattattaagagggtcaagtttgataggcagataagactaggtatcagcaagacatttcaaacaaaaggaacattatgtaattttttaaaaaaatacatgaaaataatatttaaacaaggaaggaatatgataaaagaaggatagttagtaaaatttggataacataaagattattgaatctccagtcgtcaaatttatcctaaactactggggagaggtctcatgtcagattttgattatcgagaaagaggggtcaagagtataagagaaattgctttttgttttgaacttcagtgtccactattgtggacaatatcaaattcaaacaaatatac

SEQ ID NO: 59414 - DNA, 185 bp, Homo sapiens
attggtgtgtaatcatccctctaacatataattatatactatgagtagagaatttggcagaaacaagaaaaggacatgggataactttcagatttaaagaggcaggctctggaacacaaactggtattctgctgacacactgctggcatatcataagagctactccacaagaccatttagaagtc

SEQ ID NO: 59415 - DNA, 332 bp, Homo sapiens
cacattctcagaggcaggctgtgtgctcaaccccaggggcctcatacacacacaatttgttcagcttcacagacctgcacctctcccaccaagcccgcccctatagaagctcatacttccatgcacagtcaatgtgctgagtgccacagcagtgtacacacacacacacacgcttacctgctgaaacatgcatactggttcacactcacagaagaatacatatgtacacacatatgcatagacatgcaagttcatgtgcttagacctgtacagaggtatacacatacacacacacacacacacacacacacacacacacacacacgcttggg

SEQ ID NO: 59416 - DNA, 482 bp, Homo sapiens
gcagctacattgcacattttcatatgaggaaactgaggcattgaaagattcagttattattcatatggctagtgagcaggaatgctaagtttagccccatagttgtttaactgaagctcattgtcttgtcttttttttttttttgagacggagtctcgcctaggctagagtgcggcggtacgatcttggctcactgcaccctctgtctcccaggttcaagcgattctcctgcctcagcctccctagtagctaggattacaggcacacgccaccacgcccagctaatttttgtatttttggtagagacagggtttcaccatgttggccaggctggtctcaaactcctgacctcaggtgatctgcctgcctcggcaacccagagtgctgggattcaggtgtgagccacagcgcccggccgtctctctcttaagacttaatttttttagagcagttttaagttcaaagcaaaattgataaagaaa

SEQ ID NO: 59417 - DNA, 1369 bp, Homo sapiens
aggcgcactgggtcctcggcgcggaccgcgcagactgaataataaaaggggagcggcgaagaggcaggaagacaagaccatgtcgaagggccccgggcccggcggctccgcagcttcctcggcgcccccggccgctaccgctcaggtgctgcaggcacagcccgagaaaccgcagcactacacctatgttagatactaaagaaggcttccccacaacccatatgcatctgctttgactggtggtttctatcatcctacaaagactgtgacttattggtgagggcagctggacaactctgagagcaacttagagaaatccatcttgggcacactctataaaggagctccttctctgcaaatagcaccccagataagtgcacaaaagcaagataccctcgtggacctacacgtcctcccgcttttcaacaccctgatgcctgaagctatggttgatactaaaggaggttttcccactatccgtatgcatcttctctgttttgagattgcaactatggacagttatggctaatcctagtagattgtcttcccttttaacatcttggatgaatttgggtcacactaattgttatgtgaagatggatgttgaattgtgtagaatttgacagcagtatcaagagctgaggagaaggagaagatggaaaggagtctagcaacttaaaaatctcacagcattctctgtgaggtgaccttttttcctgttggtggctcaatttctttaggacataaagaagatactgaggcctgtgacagcctgtgaccagtatcatcaagtcgtatctgaacttattgaactgtttcctccccttccttattctttattcacagtttgcttttcatgtgcataagttgactcatttgtttcctgttagcatttgaaacaccatatagccaccataagtcctgacaaaatgacttttaataaggagggggaaggtccatgtcccaccttcctatgaaattttggcctattcacaagtctacccccacataagagaagtagttatgttctgtaaagaagaggttgataaaaacctttagcatggtgttttgtgacttagaagttttaagtagtcgttcttatatctaagcatttattaattttggtaagaacattactatacgtttctgatgtcacttttactgttaagaggtgccaggcatctggtgacctgtcacttcaggatttgtgtgaatcagaccatctaaatataatataaattagagactggtacttgtatttcctgattaaaaacaaagtaacgtctgttttactattgaagtaagagtactttataatgaatacaaaaatgtatattaaatatccagtagagcatgctaaaaaaaaaat

SEQ ID NO: 59418 - DNA, 1109 bp, Homo sapiens
aggcgcactgggtcctcggcgcggaccgcgcagactgaataataaaaggggagcggcgaagaggcaggaagacaagaccatgtcgaagggccccgggcccggcggctccgcagcttcctcggcgcccccggccgctaccgctcaggtgctgcaggcacagcccgagaaaccgcagcactacacctatggttgatactaaaggaggttttcccactatccgtatgcatcttctctgttttgagattgcaactatggacagttatggctaatcctagtagattgtcttcccttttaacatcttggatgaatttgggtcacactaattgttatgtgaagatggatgttgaattgtgtagaatttgacagcagtatcaagagctgaggagaaggagaagatggaaaggagtctagcaacttaaaaatctcacagcattctctgtgaggtgaccttttttcctgttggtggctcaatttctttaggacataaagaagatactgaggcctgtgacagcctgtgaccagtatcatcaagtcgtatctgaacttattgaactgtttcctccccttccttattctttattcacagtttgcttttcatgtgcataagttgactcatttgtttcctgttagcatttgaaacaccatatagccaccataagtcctgacaaaatgacttttaataaggagggggaaggtccatgtcccaccttcctatgaaattttggcctattcacaagtctacccccacataagagaagtagttatgttctgtaaagaagaggttgataaaaacctttagcatggtgttttgtgacttagaagttttaagtagtcgttcttatatctaagcatttattaattttggtaagaacattactatacgtttctgatgtcacttttactgttaagaggtgccaggcatctggtgacctgtcacttcaggatttgtgtgaatcagaccatctaaatataatataaattagagactggtacttgtatttcctgattaaaaacaaagtaacgtctgttttactattgaagtaagagtactttataatgaatacaaaaatgtatattaaatatccagtagagcatgctaaaaaaaaaat

SEQ ID NO: 59419 - DNA, 743 bp, Homo sapiens
gtccatcctggggagtgggtgggcaccatgcctgacagagccaatacttgcctcctaggccctttcagcctgggcttgggagaccatcctggtatttgtcctcaggccagggggatctgtcttttccatctcagcattcttcgtcaaaagtccaggcccgggggttggggtagggcagtccccagagcctgtgctgatgagcctgtaggactggtggcagggacaaagcctgaggtcactcccctttccttcgtgagcttcgggctccccgagtggtcactgctgctcgttggcagatgaaagtggaactgagccccttgaagactccctctggagagggtggaggatgggccacgcaccagcctgcgctgtgcccacgggcccactccctcccctccttctccgcagctcctctgtagaaacagcagcctaggcagcccgtctaacctctgcggctccccaccgggctccatcaggaagcccccaaacctggagggcatcgtcttccctggggagtctggcctggcccctggcagctataagaaggctcccggcttcgagagggaagaccaggtgggagccgagtacctgaaaaatttcaaatgccaggtaagggatgagggaggcagcagtgaggttagccttctcctgcgtggggcaagagaatcttggaggagtgtcttggtccagctacggggaggatgactgggagctaggactccactgtcctcggcctcttcagc

SEQ ID NO: 59420 - DNA, 843 bp, Homo sapiens
aggcgcactgggtcctcggcgcggaccgcgcagactgaataataaaaggggagcggcgaagaggcaggaagacaagaccatgtcgaagggccccgggcccggcggctccgcagcttcctcggcgcccccggccgctaccgctcaggtgctgcaggcacagcccgagaaaccgcagcactacacggcagaggagagagaccagtgaaggttgggaggaggcggccaaaaggagacagcttcatgcccccaggacataaatagcccggctgctgcaggtacctgaaagaattccgcacagagcagtgcccactctttgtgcaacacaaatgcacgcagcatcggccctacacctgcttccactggcacttcgtgaaccagcggcgccgccggtccatccgccgtcgggacggcaccttcaattacagccctgacgtctactgcaccaagtacgacgaggctacaggcctctgcccggagggcgacgagtgcccattcctgcacagaaccacaggggacactgagcgcaggtaccaccttcgttactacaaaactggaatctgcatccacgagacagactcgaaaggcaactgcaccaaaaacggccgcctaccaggctggtacctcattctatgaccaacggctaaccagctgccccagatcttccttgcaccttccccttcataacccagagagaggcacatccggaaaagcattccattagaggcatcatctagaatgcaagatgagtgattcccagccatagctccatgagccgaaacacatagaatacgatgtgatatatccatgaccacaatgaataatcggcgtattaagactaacaat

SEQ ID NO: 59421 - DNA, 3986 bp, Homo sapiens
  misc_feature (1191)..(1191): n is a, c, g, or t
aggcgcactgggtcctcggcgcggaccgcgcagactgaataataaaaggggagcggcgaagaggcaggaagacaagaccatgtcgaagggccccgggcccggcggctccgcagcttcctcggcgcccccggccgctaccgctcaggtgctgcaggcacagcccgagaaaccgcagcactacacggcagaggagagagaccagtgaaggttgggaggaggcggccaaaaggagacagcttcatgcccccaggacataaatagcccggctgctgcaggtacctgaaagaattccgcacagagcagtgcccactctttgtgcaacacaaatgcacgcagcatcggccctacacctgcttccactggcacttcgtgaaccagcggcgccgccggtccatccgccgtcgggacggcaccttcaattacagccctgacgtctactgcaccaagtacgacgaggctacaggcctctgcccggagggcgacgagtgcccattcctgcacagaaccacaggggacactgagcgcaggtaccaccttcgttactacaaaactggaatctgcatccacgagacagactcgaaaggcaactgcaccaaaaacggcctgcactgcgcttttgcccacgggccccatgacctccgctcccctgtctacgacatcagggagcttcaggccatggaggccttgcagaatggccagaccacggtagaggggagcatagagggccagtcggctggggctgcgagccatgccatgatagaaaagatcctcagcgaggagcctcggtggcaagagactgcttatgtgctggggaactataagacggagccttgcaagaagcccccgcggctgtgccgccaaggctatgcctgtccctactaccacaacagcaaggaccggcggcggagcccccggaagcacaaatacaggtcgtctccatgtccaaacgtcaagcacggggatgagtggggagaccctggcaagtgtgagaacggagacgcctgccagtactgccacacccgcaccgagcagcagttccaccccgagatctacaagtccaccaagtgcaacgacatgcagcagtcgggcagctgtccccgaggacccttctgcgcctttgcccacgtagaacagccacccctgagtgacgacctgcagccttcctcagctgtgtccagccccacccagccnggtcctgtcctgtacatgccatctgccgccggagactcggtgcctgtgagcccctccagcccgcatgcccctgacctcagtgccctcctctgtagaaacagcagcctaggcagcccgtctaacctctgcggctccccaccgggctccatcaggaagcccccaaacctggagggcatcgtcttccctggggagtctggcctggcccctggcagctataagaaggctcccggcttcgagagggaagaccaggtgggagccgagtacctgaaaaatttcaaatgccaggccaaattaaaaccccactcattagagcccaggagtcaagagcagcctctgcttcagcccaaacaggacatgctgggcatcctccccgcaggcagccccctgacctcaagcatctcttctagtatcacctccagcctggcagctaccccccctagcccagtgggcaccagcagcgtccccggcatgaatgcaaacgctctgcccttctaccccaccagcgacacggtagagtcagtcatagagtctgctttggatgacctggacctgaatgagtttggcgtggccgccctggagaagactttcgataacagcacagtgccccacccaggaagcatcaccatcggcggcagcttgctgcagagctctgcgcccgtgaacatccccggctccttgggcagctctgcctccttccactcagcatccccgtcccctcccgtcagcctctcctcgcatttcctgcagcagccccagggccacctgagtcagtcggaaaacacatttttgggaacctcagcatcacatggatctttgggtctgaacgggatgaacagcagcatctgggagcattttgcctctggaagcttctccccgggcacttcccccgctttcctatcagggccaggggctgccgagctggcccgacttcggcaagagctggatgaagccaacagcaccatcaagcagtgggaggagtcctggaagcaggccaagcaggcttgtgatgcctggaagaaagaggcggaggaggctggtgagcgggccagtgcggcgggcgccgagtgcgagctggcccgggagcagcgggatgcactggaggtgcaggtgaagaagctccaggaggagctggagcggctacacgcggggcctgagccccaggccctgcccgccttctccgacctggaggcgctctcactctccaccctctactccctccagaaacaactgcgggcccacctggaacaagtggacaaggccgtgttccacatgcagtcggtgaaatgccttaagtgtcaggaacagaagcgggcagtgctgccgtgccaacacgctgcgctgtgtgagctctgcgctgagggcagcgagtgccccatctgccagcctggccgggcccacaccctccagtcgtgaccctgcaggcctggcccagcctggcccagatcttctcacctaggactttttaaagtatatatatatatatgaatatatatatatatgtgtatgtatgtatgtatatgtatatgattatgtatatgtatacatttccgtatgtatgtatatgtatacatttccgtatgtgtgcaggtatgcgtggtggtgtggacagtgtctgtgtgtatatctgtacatagatatagacacacactttaaaagacttaccaagcactttttaaaagaagaaactattttgcagtcctcccctacccactccctgcccttcccactgcagagatgacatcccctcttctcccactggccttttggcagagaatctggttctgtctcttttttaatgtaggaactaactatttttaacttcttcctggggcctgagcagggaagggtgggactggaaggcactaaggggaagggagaagccctcagggcaggccctgctccccctacctccttgccagggcaagggtggagtgtggaagacgtgggtcccccagagcaggcctggcccccagctgtgagggcctcagggaggcccgagggggagtgctgggggtctcagctggcttagctcctaagtttaccaaatgttaatttagtcttggggagaacagcaagggctggaggccagtgctgcagggccagccccactcctgacacctgggcccttgaagctccttgaggggcaaggcccaggagttccagccctcaggttcctgagggtccaccctcagtccttccccccgccgcccctccccggactccccacaagagcctccctggccccagggccgcctaccaggctggtactcattctatgaccaccgcccccaaccagctgcccccagctctccctgccccctcccctctctggcagctagcagggcaattggcggggaggagtgcggactgaggactgaggaccaagggggcccaggccctgccctcctacccggaggggctccgtttgcattccttggtgctctctgagtgcagctggtgtcccgccctgttctgggcggacgcctgtgtgcgtgtgtgtgtgcctgtccagtgtatattgtgtcttagcttccattttaaaaattgttctgtacagagagagatgcagcaggggcgggagggcagagtgggcggaggggagcagccgcacccccagcaccgggtgtctgcggtaggaacaagagggctgagagggtctggtcctggcccaggctcccccttgggctcagcacgaaagggctttcaatgaattaagtgaaaactttttccttttttacaaaaatgcaaaaatcaacaaagctccaaacctattggaaataaaatatgaacttgca

SEQ ID NO: 59422 - DNA, 2673 bp, Homo sapiens
agtagggggtggggaggaagaagggggtgtgtgcatgcatgtgaagaggggttgcatgtctgccaccacctgccccctggtacctgcagcctcagggtcagatggactcaggaccccccagcaccacattcatccactccctgaattttctctctcagggggagccaaattaaaaccccactcattagagcccaggagtcaagagcagcctctgcttcagcccaaacaggacatgctgggcatcctccccgcaggcagccccctgacctcaagcatctcttctagtatcacctccagcctggcagctaccccccctagcccagtgggcaccagcagcgtccccggcatgaatgcaaacgctctgcccttctaccccaccagcgacacggtagagtcagtcatagagtctgctttggatgacctggacctgaatgagtttggcgtggccgccctggagaagactttcgataacagcacagtgccccacccaggaagcatcaccatcggcggcagcttgctgcagagctctgcgcccgtgaacatccccggctccttgggcagctctgcctccttccactcagcatccccgtcccctcccgtcagcctctcctcgcatttcctgcagcagccccagggccacctgagtcagtcggaaaacacatttttgggaacctcagcatcacatggatctttgggtctgaacgggatgaacagcagcatctgggagcattttgcctctggaagcttctccccgggcacttcccccgctttcctatcagggccaggggctgccgagctggcccgacttcggcaagagctggatgaagccaacagcaccatcaagcagtgggaggagtcctggaagcaggccaagcaggcttgtgatgcctggaagaaagaggcggaggaggctggtgagcgggccagtgcggcgggcgccgagtgcgagctggcccgggagcagcgggatgcactggaggtgcaggtgaagaagctccaggaggagctggagcggctacacgcggggcctgagccccaggccctgcccgccttctccgacctggaggcgctctcactctccaccctctactccctccagaaacaactgcgggcccacctggaacaagtggacaaggccgtgttccacatgcagtcggtgaaatgccttaagtgtcaggaacagaagcgggcagtgctgccgtgccaacacgctgcgctgtgtgagctctgcgctgagggcagcgagtgccccatctgccagcctggccgggcccacaccctccagtcgtgaccctgcaggcctggcccagcctggcccagatcttctcacctaggactttttaaagtatatatatatatatgaatatatatatatatgtgtatgtatgtatgtatatgtatatgattatgtatatgtatacatttccgtatgtatgtatatgtatacatttccgtatgtgtgcaggtatgcgtggtggtgtggacagtgtctgtgtgtatatctgtacatagatatagacacacactttaaaagacttaccaagcactttttaaaagaagaaactattttgcagtcctcccctacccactccctgcccttcccactgcagagatgacatcccctcttctcccactggccttttggcagagaatctggttctgtctcttttttaatgtaggaactaactatttttaacttcttcctggggcctgagcagggaagggtgggactggaaggcactaaggggaagggagaagccctcagggcaggccctgctccccctacctccttgccagggcaagggtggagtgtggaagacgtgggtcccccagagcaggcctggcccccagctgtgagggcctcagggaggcccgagggggagtgctgggggtctcagctggcttagctcctaagtttaccaaatgttaatttagtcttggggagaacagcaagggctggaggccagtgctgcagggccagccccactcctgacacctgggcccttgaagctccttgaggggcaaggcccaggagttccagccctcaggttcctgagggtccaccctcagtccttccccccgccgcccctccccggactccccacaagagcctccctggccccagggccgcctaccaggctggtactcattctatgaccaccgcccccaaccagctgcccccagctctccctgccccctcccctctctggcagctagcagggcaattggcggggaggagtgcggactgaggactgaggaccaagggggcccaggccctgccctcctacccggaggggctccgtttgcattccttggtgctctctgagtgcagctggtgtcccgccctgttctgggcggacgcctgtgtgcgtgtgtgtgtgcctgtccagtgtatattgtgtcttagcttccattttaaaaattgttctgtacagagagagatgcagcaggggcgggagggcagagtgggcggaggggagcagccgcacccccagcaccgggtgtctgcggtaggaacaagagggctgagagggtctggtcctggcccaggctcccccttgggctcagcacgaaagggctttcaatgaattaagtgaaaactttttccttttttacaaaaatgcaaaaatcaacaaagctccaaacctattggaaataaaatatgaacttgca

SEQ ID NO: 59423 - DNA, 1897 bp, Homo sapiens
cactaagcgatcaactgcagtgactgcagtcggttctcagacttcttaattttaatgccctcatgttaaaggaaaatgaaattctagtttagtgaaggtttgcaggagttttctggccacttggtgatttcttataggtcgacagagaataaatactttatagcttcatctatctaggcatcatttaaatttaggactggtttcctgggcatcgaattaaacaaagataatgtagcaatacttccatagataactcttttcaggcagttttgtcagtttatgtattacgtaaatgtcattaacttcacttgattgcatctgattgtattttggaaaatcctggacatgaacatgtatttaagtcattattgcaaattacaataaaatcgtgcatgcattagtagagtactacttgttgcacaacagaagtcattggaagcgttgctgagcaacctcagtgagaacgagctacattaccaataaacatttctggatcttatttacttgtttatcaagtagaactaatttcttgcaggacagaaattaggagctcattgtagccttcagttgatcccacaaaatccccgttaagtgttaagtgcccttgctaagggtagattcttaaacttaacacctagttgatatttgctattatctaaattattaaagtcaagatttgcttaatggttaagtttttttgttttaatccagctatgttagatactaaagaaggcttccccacaacccatatgcatctgctttgactggtggtttctatcatcctacaaagactgtgacttattggtgagggcagctggacaactctgagagcaacttagagaaatccatcttgggcacactctataaaggagctccttctctgcaaatagcaccccagataagtgcacaaaagcaagataccctcgtggacctacacgtcctcccgcttttcaacaccctgatgcctgaagctatggttgatactaaaggaggttttcccactatccgtatgcatcttctctgttttgagattgcaactatggacagttatggctaatcctagtagattgtcttcccttttaacatcttggatgaatttgggtcacactaattgttatgtgaagatggatgttgaattgtgtagaatttgacagcagtatcaagagctgaggagaaggagaagatggaaaggagtctagcaacttaaaaatctcacagcattctctgtgaggtgaccttttttcctgttggtggctcaatttctttaggacataaagaagatactgaggcctgtgacagcctgtgaccagtatcatcaagtcgtatctgaacttattgaactgtttcctccccttccttattctttattcacagtttgcttttcatgtgcataagttgactcatttgtttcctgttagcatttgaaacaccatatagccaccataagtcctgacaaaatgacttttaataaggagggggaaggtccatgtcccaccttcctatgaaattttggcctattcacaagtctacccccacataagagaagtagttatgttctgtaaagaagaggttgataaaaacctttagcatggtgttttgtgacttagaagttttaagtagtcgttcttatatctaagcatttattaattttggtaagaacattactatacgtttctgatgtcacttttactgttaagaggtgccaggcatctggtgacctgtcacttcaggatttgtgtgaatcagaccatctaaatataatataaattagagactggtacttgtatttcctgattaaaaacaaagtaacgtctgttttactattgaagtaagagtactttataatgaatacaaaaatgtatattaaatatccagtagagcatgctaaaaaaaaaat

SEQ ID NO: 59424 - DNA, 3968 bp, Homo sapiens
  misc_feature (1191)..(1191): n is a, c, g, or t
aggcgcactgggtcctcggcgcggaccgcgcagactgaataataaaaggggagcggcgaagaggcaggaagacaagaccatgtcgaagggccccgggcccggcggctccgcagcttcctcggcgcccccggccgctaccgctcaggtgctgcaggcacagcccgagaaaccgcagcactacacggcagaggagagagaccagtgaaggttgggaggaggcggccaaaaggagacagcttcatgcccccaggacataaatagcccggctgctgcaggtacctgaaagaattccgcacagagcagtgcccactctttgtgcaacacaaatgcacgcagcatcggccctacacctgcttccactggcacttcgtgaaccagcggcgccgccggtccatccgccgtcgggacggcaccttcaattacagccctgacgtctactgcaccaagtacgacgaggctacaggcctctgcccggagggcgacgagtgcccattcctgcacagaaccacaggggacactgagcgcaggtaccaccttcgttactacaaaactggaatctgcatccacgagacagactcgaaaggcaactgcaccaaaaacggcctgcactgcgcttttgcccacgggccccatgacctccgctcccctgtctacgacatcagggagcttcaggccatggaggccttgcagaatggccagaccacggtagaggggagcatagagggccagtcggctggggctgcgagccatgccatgatagaaaagatcctcagcgaggagcctcggtggcaagagactgcttatgtgctggggaactataagacggagccttgcaagaagcccccgcggctgtgccgccaaggctatgcctgtccctactaccacaacagcaaggaccggcggcggagcccccggaagcacaaatacaggtcgtctccatgtccaaacgtcaagcacggggatgagtggggagaccctggcaagtgtgagaacggagacgcctgccagtactgccacacccgcaccgagcagcagttccaccccgagatctacaagtccaccaagtgcaacgacatgcagcagtcgggcagctgtccccgaggacccttctgcgcctttgcccacgtagaacagccacccctgagtgacgacctgcagccttcctcagctgtgtccagccccacccagccnggtcctgtcctgtacatgccatctgccgccggagactcggtgcctgtgagcccctccagcccgcatgcccctgacctcagtgccctcctctgtagaaacagcagcctaggcagcccgtctaacctctgcggctccccaccgggctccatcaggaagcccccaaacctggagggcatcgtcttccctggggagtctggcctggcccctggcagctataagaaggctcccggcttcgagagggaagaccaggtgggagccgagtacctgaaaaatttcaaatgccaggccaaattaaaaccccactcattagagcccaggagtcaagagcagcctctgcttcagcccaaacaggacatgctgggcatcctccccgcaggcagccccctgacctcaagcatctcttctagtatcacctccagcctggcagctaccccccctagcccagtgggcaccagcagcgtccccggcatgaatgcaaacgctctgcccttctaccccaccagcgacacggtagagtcagtcatagagtctgctttggatgacctggacctgaatgagtttggcgtggccgccctggagaagactttcgataacagcacagtgccccacccaggaagcatcaccatcggcggcagcttgctgcagagctctgcgcccgtgaacatccccggctccttgggcagctctgcctccttccactcagcatccccgtcccctcccgtcagcctctcctcgcatttcctgcagcagccccagggccacctgagtcagtcggaaaacacatttttgggaacctcagcatcacatggatctttgggtctgaacgggatgaacagcagcatctgggagcattttgcctctggaagcttctccccgggcacttcccccgctttcctatcagggccaggggctgccgagctggcccgacttcggcaagagctggatgaagccaacagcaccatcaagcagtgggaggagtcctggaagcaggccaagcaggcttgtgatgcctggaagaaagaggcggaggaggctggtgagcgggccagtgcggcgggcgccgagtgcgagctggcccgggagcagcgggatgcactggaggtgcaggtgaagaagctccaggaggagctggagcggctacacgcggggcctgagccccaggccctgcccgccttctccgacctggaggcgctctcactctccaccctctactccctccagaaacaactgcgggcccacctggaacaagtggacaagtcggtgaaatgccttaagtgtcaggaacagaagcgggcagtgctgccgtgccaacacgctgcgctgtgtgagctctgcgctgagggcagcgagtgccccatctgccagcctggccgggcccacaccctccagtcgtgaccctgcaggcctggcccagcctggcccagatcttctcacctaggactttttaaagtatatatatatatatgaatatatatatatatgtgtatgtatgtatgtatatgtatatgattatgtatatgtatacatttccgtatgtatgtatatgtatacatttccgtatgtgtgcaggtatgcgtggtggtgtggacagtgtctgtgtgtatatctgtacatagatatagacacacactttaaaagacttaccaagcactttttaaaagaagaaactattttgcagtcctcccctacccactccctgcccttcccactgcagagatgacatcccctcttctcccactggccttttggcagagaatctggttctgtctcttttttaatgtaggaactaactatttttaacttcttcctggggcctgagcagggaagggtgggactggaaggcactaaggggaagggagaagccctcagggcaggccctgctccccctacctccttgccagggcaagggtggagtgtggaagacgtgggtcccccagagcaggcctggcccccagctgtgagggcctcagggaggcccgagggggagtgctgggggtctcagctggcttagctcctaagtttaccaaatgttaatttagtcttggggagaacagcaagggctggaggccagtgctgcagggccagccccactcctgacacctgggcccttgaagctccttgaggggcaaggcccaggagttccagccctcaggttcctgagggtccaccctcagtccttccccccgccgcccctccccggactccccacaagagcctccctggccccagggccgcctaccaggctggtactcattctatgaccaccgcccccaaccagctgcccccagctctccctgccccctcccctctctggcagctagcagggcaattggcggggaggagtgcggactgaggactgaggaccaagggggcccaggccctgccctcctacccggaggggctccgtttgcattccttggtgctctctgagtgcagctggtgtcccgccctgttctgggcggacgcctgtgtgcgtgtgtgtgtgcctgtccagtgtatattgtgtcttagcttccattttaaaaattgttctgtacagagagagatgcagcaggggcgggagggcagagtgggcggaggggagcagccgcacccccagcaccgggtgtctgcggtaggaacaagagggctgagagggtctggtcctggcccaggctcccccttgggctcagcacgaaagggctttcaatgaattaagtgaaaactttttccttttttacaaaaatgcaaaaatcaacaaagctccaaacctattggaaataaaatatgaacttgca

SEQ ID NO: 59425 - DNA, 3462 bp, Homo sapiens
  misc_feature (1191)..(1191): n is a, c, g, or t
aggcgcactgggtcctcggcgcggaccgcgcagactgaataataaaaggggagcggcgaagaggcaggaagacaagaccatgtcgaagggccccgggcccggcggctccgcagcttcctcggcgcccccggccgctaccgctcaggtgctgcaggcacagcccgagaaaccgcagcactacacggcagaggagagagaccagtgaaggttgggaggaggcggccaaaaggagacagcttcatgcccccaggacataaatagcccggctgctgcaggtacctgaaagaattccgcacagagcagtgcccactctttgtgcaacacaaatgcacgcagcatcggccctacacctgcttccactggcacttcgtgaaccagcggcgccgccggtccatccgccgtcgggacggcaccttcaattacagccctgacgtctactgcaccaagtacgacgaggctacaggcctctgcccggagggcgacgagtgcccattcctgcacagaaccacaggggacactgagcgcaggtaccaccttcgttactacaaaactggaatctgcatccacgagacagactcgaaaggcaactgcaccaaaaacggcctgcactgcgcttttgcccacgggccccatgacctccgctcccctgtctacgacatcagggagcttcaggccatggaggccttgcagaatggccagaccacggtagaggggagcatagagggccagtcggctggggctgcgagccatgccatgatagaaaagatcctcagcgaggagcctcggtggcaagagactgcttatgtgctggggaactataagacggagccttgcaagaagcccccgcggctgtgccgccaaggctatgcctgtccctactaccacaacagcaaggaccggcggcggagcccccggaagcacaaatacaggtcgtctccatgtccaaacgtcaagcacggggatgagtggggagaccctggcaagtgtgagaacggagacgcctgccagtactgccacacccgcaccgagcagcagttccaccccgagatctacaagtccaccaagtgcaacgacatgcagcagtcgggcagctgtccccgaggacccttctgcgcctttgcccacgtagaacagccacccctgagtgacgacctgcagccttcctcagctgtgtccagccccacccagccnggtcctgtcctgtacatgccatctgccgccggagactcggtgcctgtgagcccctccagcccgcatgcccctgacctcagtgccctcctctgtagaaacagcagcctaggcagcccgtctaacctctgcggctccccaccgggctccatcaggaagcccccaaacctggagggcatcgtcttccctggggagtctggcctggcccctggcagctataagaaggctcccggcttcgagagggaagaccaggtgggagccgagtacctgaaaaatttcaaatgccaggccaaattaaaaccccactcattagagcccaggagtcaagagcagcctctgcttcagcccaaacaggacatgctgggcatcctccccgcaggcagccccctgacctcaagcatctcttctagtatcacctccagcctggcagctaccccccctagcccagtgggcaccagcagcgtccccggcatgaatgcaaacgctctgcccttctaccccaccagcgacacggtagagtcagtcatagagtctgctttggatgacctggacctgaatgagtttggcgtggccgccctggagaagactttcgataacagcacagtgccccacccaggaagcatcaccatcggcggcagcttgctgcagagctctgcgcccgtgaacatccccggctccttgggcagctctgcctccttccactcagcatccccgtcccctcccgtcagcctctcctcgcatttcctgcagcagccccagggccacctgagtcagtcggaaaacacatttttgggaacctcagcatcacatggatctttgggtctgaacgggatgaacagcagcatctgggagcattttgcctctggaagcttctccccgggcacttcccccgctttcctatcagggccaggggctgccgagctggcccgacttcggcaagagctggatgaagccaacagcaccatcaagcagtgggaggagtcctggaagcaggccaagcaggcttgtgatgcctggaagaaagaggcggaggaggctggtgagcgggccagtgcggcgggcgccgagtgcgagctggcccgggagcagcgggatgcactggaggtgcaggtgaagaagctccaggaggagctggagcggctacacgcggggcctgagccccaggccctgcccgccttctccgacctggaggcgctctcactctccaccctctactccctccagaaacaactgcgggcccacctggaacaagtggacaaggccgtgttccacatgcagtcggtgaaatgccttaagtgtcaggaacagaagcgggcagtgctgccgtgccaacacgctgcgctgtgtgagctctgcgctgagggcagcgagtgccccatctgccagcctggccgggcccacaccctccagtcgtgaccctgcaggcctggcccagcctggcccagatcttctcacctaggactttttaaagtatatatatatatatgaatatatatatatatgtgtatgtatgtatgtatatgtatatgattatgtatatgtatacatttccgtatgtatgtatatgtatacatttccgtatgtgtgcaggtatgcgtggtggtgtggacagtgtctgtgtgtatatctgtacatagatatagacacacactttaaaagacttaccaagcactttttaaaagaagaaactattttgcagtcctcccctacccactccctgcccttcccactgcagagatgacatcccctcttctcccactggccttttggcagagaatctggttctgtctcttttttaatgtaggaactaactatttttaacttcttcctggggcctgagcagggaagggtgggactggaaggcactaaggggaagggagaagccctcagggcaggccctgctccccctactcctgacacctgggcccttgaagctccttgaggggcaaggcccaggagttccagccctcaggttcctgagggtccaccctcagtccttccccccgccgcccctccccggactccccacaagagcctccctggccccagggccgcctaccaggctggtactcattctatgaccaccgcacccccagcaccgggtgtctgcggtaggaacaagagggctgagagggtctggtcctggcccaggctcccccttgggctcagcacgaaagggctttcaatgaattaagtgaaaactttttccttttttacaaaaatgcaaaaatcaacaaagctccaaacctattggaaataaaatatgaacttgca

SEQ ID NO: 59426 - DNA, 1819 bp, Homo sapiens
actaagggatcactgcgaatttatccttagtctgcaaatgctttttctagattaatgatttttcactcattagggtactagacacatcagcctaaagtggcatcatttaaatttaggactggtttcctgggcatcgaattaaacaaagataatgtagcaatacttccatagataactcttttcaggcagttttgtcagtttatgtattacgtaaatgtcattaacttcacttgattgcatctgattgtattttggaaaatcctggacatgaacatgtatttaagtcattattgcaaattacaataaaatcgtgcatgcattagtagagtactacttgttgcacaacagaagtcattggaagcgttgctgagcaacctcagtgagaacgagctacattaccaataaacatttctggatcttatttacttgtttatcaagtagaactaatttcttgcaggacagaaattaggagctcattgtagccttcagttgatcccacaaaatccccgttaagtgttaagtgcccttgctaagggtagattcttaaacttaacacctagttgatatttgctattatctaaattattaaagtcaagatttgcttaatggttaagtttttttgttttaatccagctatgttagatactaaagaaggcttccccacaacccatatgcatctgctttgactggtggtttctatcatcctacaaagactgtgacttattggtgagggcagctggacaactctgagagcaacttagagaaatccatcttgggcacactctataaaggagctccttctctgcaaatagcaccccagataagtgcacaaaagcaagataccctcgtggacctacacgtcctcccgcttttcaacaccctgatgcctgaagctatggttgatactaaaggaggttttcccactatccgtatgcatcttctctgttttgagattgcaactatggacagttatggctaatcctagtagattgtcttcccttttaacatcttggatgaatttgggtcacactaattgttatgtgaagatggatgttgaattgtgtagaatttgacagcagtatcaagagctgaggagaaggagaagatggaaaggagtctagcaacttaaaaatctcacagcattctctgtgaggtgaccttttttcctgttggtggctcaatttctttaggacataaagaagatactgaggcctgtgacagcctgtgaccagtatcatcaagtcgtatctgaacttattgaactgtttcctccccttccttattctttattcacagtttgcttttcatgtgcataagttgactcatttgtttcctgttagcatttgaaacaccatatagccaccataagtcctgacaaaatgacttttaataaggagggggaaggtccatgtcccaccttcctatgaaattttggcctattcacaagtctacccccacataagagaagtagttatgttctgtaaagaagaggttgataaaaacctttagcatggtgttttgtgacttagaagttttaagtagtcgttcttatatctaagcatttattaattttggtaagaacattactatacgtttctgatgtcacttttactgttaagaggtgccaggcatctggtgacctgtcacttcaggatttgtgtgaatcagaccatctaaatataatataaattagagactggtacttgtatttcctgattaaaaacaaagtaacgtctgttttactattgaagtaagagtactttataatgaatacaaaaatgtatattaaatatccagtagagcatgctaaaaaaaaaat

SEQ ID NO: 59427 - DNA, 2690 bp, Homo sapiens
  misc_feature (1191)..(1191): n is a, c, g, or t
aggcgcactgggtcctcggcgcggaccgcgcagactgaataataaaaggggagcggcgaagaggcaggaagacaagaccatgtcgaagggccccgggcccggcggctccgcagcttcctcggcgcccccggccgctaccgctcaggtgctgcaggcacagcccgagaaaccgcagcactacacggcagaggagagagaccagtgaaggttgggaggaggcggccaaaaggagacagcttcatgcccccaggacataaatagcccggctgctgcaggtacctgaaagaattccgcacagagcagtgcccactctttgtgcaacacaaatgcacgcagcatcggccctacacctgcttccactggcacttcgtgaaccagcggcgccgccggtccatccgccgtcgggacggcaccttcaattacagccctgacgtctactgcaccaagtacgacgaggctacaggcctctgcccggagggcgacgagtgcccattcctgcacagaaccacaggggacactgagcgcaggtaccaccttcgttactacaaaactggaatctgcatccacgagacagactcgaaaggcaactgcaccaaaaacggcctgcactgcgcttttgcccacgggccccatgacctccgctcccctgtctacgacatcagggagcttcaggccatggaggccttgcagaatggccagaccacggtagaggggagcatagagggccagtcggctggggctgcgagccatgccatgatagaaaagatcctcagcgaggagcctcggtggcaagagactgcttatgtgctggggaactataagacggagccttgcaagaagcccccgcggctgtgccgccaaggctatgcctgtccctactaccacaacagcaaggaccggcggcggagcccccggaagcacaaatacaggtcgtctccatgtccaaacgtcaagcacggggatgagtggggagaccctggcaagtgtgagaacggagacgcctgccagtactgccacacccgcaccgagcagcagttccaccccgagatctacaagtccaccaagtgcaacgacatgcagcagtcgggcagctgtccccgaggacccttctgcgcctttgcccacgtagaacagccacccctgagtgacgacctgcagccttcctcagctgtgtccagccccacccagccnggtcctgtcctgtacatgccatctgccgccggagactcggtgcctgtgagcccctccagcccgcatgcccctgacctcagtgccctcctctgtagaaacagcagcctaggcagcccgtctaacctctgcggctccccaccgggctccatcaggaagcccccaaacctggagggcatcgtcttccctggggagtctggcctggcccctggcagctataagaaggctcccggcttcgagagggaagaccaggtgggagccgagtacctgaaaaatttcaaatgccaggccaaattaaaaccccactcattagagcccaggagtcaagagcagcctctgcttcagcccaaacaggacatgctgggcatcctccccgcaggcagccccctgacctcaagcatctcttctagtatcacctccagcctggcagctaccccccctagcccagtgggcaccagcagcgtccccggcatgaatgcaaacgctctgcccttctaccccaccagcgacacggtagagtcagtcatagagtctgctttggatgacctggacctgaatgagtttggcgtggccgccctggagaagactttcgataacagcacagtgccccacccaggaagcatcaccatcggcggcagcttgctgcagagctctgcgcccgtgaacatccccggctccttgggcagctctgcctccttccactcagcatccccgtcccctcccgtcagcctctcctcgcatttcctgcagcagccccagggccacctgagtcagtcggaaaacacatttttgggaacctcagcatcacatggatctttgggtctgaacgggatgaacagcagcatctgggagcattttgcctctggaagcttctccccgggcacttcccccgctttcctatcagggccaggggctgccgagctggcccgacttcggcaagagctggatgaagccaacagcaccatcaagcagtgggaggagtcctggaagcaggccaagcaggcttgtgatgcctggaagaaagaggcggaggaggctggtgagcgggccagtgcggcgggcgccgagtgcgagctggcccgggagcagcgggatgcactggaggtgcaggtgaagaagctccaggaggagctggagcggctacacgcggggcctgagccccaggccctgcccgccttctccgacctggaggcgctctcactctccaccctctactccctccagaaacaactgcgggcccacctggaacaagtggacaaggccgtgttccacatgcagtcggtgaaatgccttaagtgtcaggaacagaagcgggcagtgctgccgtgccaacacgctgcgctgtgtgagctctgcgctgagggcagcgagtgccccatgctcccccttgggctcagcacgaaagggctttcaatgaattaagtgaaaactttttccttttttacaaaaatgcaaaaatcaacaaagctccaaacctattggaaataaaatatgaacttgca

SEQ ID NO: 59428 - DNA, 703 bp, Homo sapiens
gtgacttattggtgagggcagctggacaactctgagagcaacttagagaaatccatcttgggcacactctataaaggagctccttctctgcaaatagcaccccagataagtgcacaaaagcaagataccctcgtggacctacacgtcctcccgcttttcaacaccctgatgcctgaaggtgaggtctctttcctgtgtgtcttagaagccatgagcacgcttaggtaactagagccctgccacagcctgagcagcacagcacacatctgcaggctttcctgccagacctttacctaaaggtaatttttctcattaggagagactccaggtcaagagtgatgacagtaaggttgcatttaaagctgcattacattaaatagtggactggtctagtgattattttcccacactgggcaatatttgcttaatgattaagtttttttgtttttgtttttgttttttttaatccagctatggttgatactaaaggaggttttcccactatccgtatgcatcttctctgttttgagattgcaactatggacagttatggctaatcctagtagattgtcttcccttttaacatcttggatgaatttgggtcacactaattgttatgtgaagatggatgttgaatgtaagtttctctgccattcttagccaatatataaaaattacattagcctaattgctaacaatgcca

SEQ ID NO: 59429 - DNA, 360 bp, Homo sapiens
gggcaggggagcccagtctaggagaccccccaacctagacacatgtagcaaacaaaaacccagatgtaagggggtaagtgggtctggggccttccactgggtggaatgtgggagaagagatttgggagtgtcttggctgttacacatgcagggcagaggagagagaccagtgaaggttgggaggaggcggccaaaaggagacagcttcatgcccccaggacataaatagcccggctgctgcaggtactcacatgaggtgacacgactggggacagaacaggctggagcggcgggggcgggggcgggggcgggggggcgggtatcttcagaacttcagtatgagattttccccaagcacag

SEQ ID NO: 59430 - DNA, 3894 bp, Homo sapiens
  misc_feature (1099)..(1099): n is a, c, g, or t
aggcgcactgggtcctcggcgcggaccgcgcagactgaataataaaaggggagcggcgaagaggcaggaagacaagaccatgtcgaagggccccgggcccggcggctccgcagcttcctcggcgcccccggccgctaccgctcaggtgctgcaggcacagcccgagaaaccgcagcactacacgtacctgaaagaattccgcacagagcagtgcccactctttgtgcaacacaaatgcacgcagcatcggccctacacctgcttccactggcacttcgtgaaccagcggcgccgccggtccatccgccgtcgggacggcaccttcaattacagccctgacgtctactgcaccaagtacgacgaggctacaggcctctgcccggagggcgacgagtgcccattcctgcacagaaccacaggggacactgagcgcaggtaccaccttcgttactacaaaactggaatctgcatccacgagacagactcgaaaggcaactgcaccaaaaacggcctgcactgcgcttttgcccacgggccccatgacctccgctcccctgtctacgacatcagggagcttcaggccatggaggccttgcagaatggccagaccacggtagaggggagcatagagggccagtcggctggggctgcgagccatgccatgatagaaaagatcctcagcgaggagcctcggtggcaagagactgcttatgtgctggggaactataagacggagccttgcaagaagcccccgcggctgtgccgccaaggctatgcctgtccctactaccacaacagcaaggaccggcggcggagcccccggaagcacaaatacaggtcgtctccatgtccaaacgtcaagcacggggatgagtggggagaccctggcaagtgtgagaacggagacgcctgccagtactgccacacccgcaccgagcagcagttccaccccgagatctacaagtccaccaagtgcaacgacatgcagcagtcgggcagctgtccccgaggacccttctgcgcctttgcccacgtagaacagccacccctgagtgacgacctgcagccttcctcagctgtgtccagccccacccagccnggtcctgtcctgtacatgccatctgccgccggagactcggtgcctgtgagcccctccagcccgcatgcccctgacctcagtgccctcctctgtagaaacagcagcctaggcagcccgtctaacctctgcggctccccaccgggctccatcaggaagcccccaaacctggagggcatcgtcttccctggggagtctggcctggcccctggcagctataagaaggctcccggcttcgagagggaagaccaggtgggagccgagtacctgaaaaatttcaaatgccaggccaaattaaaaccccactcattagagcccaggagtcaagagcagcctctgcttcagcccaaacaggacatgctgggcatcctccccgcaggcagccccctgacctcaagcatctcttctagtatcacctccagcctggcagctaccccccctagcccagtgggcaccagcagcgtccccggcatgaatgcaaacgctctgcccttctaccccaccagcgacacggtagagtcagtcatagagtctgctttggatgacctggacctgaatgagtttggcgtggccgccctggagaagactttcgataacagcacagtgccccacccaggaagcatcaccatcggcggcagcttgctgcagagctctgcgcccgtgaacatccccggctccttgggcagctctgcctccttccactcagcatccccgtcccctcccgtcagcctctcctcgcatttcctgcagcagccccagggccacctgagtcagtcggaaaacacatttttgggaacctcagcatcacatggatctttgggtctgaacgggatgaacagcagcatctgggagcattttgcctctggaagcttctccccgggcacttcccccgctttcctatcagggccaggggctgccgagctggcccgacttcggcaagagctggatgaagccaacagcaccatcaagcagtgggaggagtcctggaagcaggccaagcaggcttgtgatgcctggaagaaagaggcggaggaggctggtgagcgggccagtgcggcgggcgccgagtgcgagctggcccgggagcagcgggatgcactggaggtgcaggtgaagaagctccaggaggagctggagcggctacacgcggggcctgagccccaggccctgcccgccttctccgacctggaggcgctctcactctccaccctctactccctccagaaacaactgcgggcccacctggaacaagtggacaaggccgtgttccacatgcagtcggtgaaatgccttaagtgtcaggaacagaagcgggcagtgctgccgtgccaacacgctgcgctgtgtgagctctgcgctgagggcagcgagtgccccatctgccagcctggccgggcccacaccctccagtcgtgaccctgcaggcctggcccagcctggcccagatcttctcacctaggactttttaaagtatatatatatatatgaatatatatatatatgtgtatgtatgtatgtatatgtatatgattatgtatatgtatacatttccgtatgtatgtatatgtatacatttccgtatgtgtgcaggtatgcgtggtggtgtggacagtgtctgtgtgtatatctgtacatagatatagacacacactttaaaagacttaccaagcactttttaaaagaagaaactattttgcagtcctcccctacccactccctgcccttcccactgcagagatgacatcccctcttctcccactggccttttggcagagaatctggttctgtctcttttttaatgtaggaactaactatttttaacttcttcctggggcctgagcagggaagggtgggactggaaggcactaaggggaagggagaagccctcagggcaggccctgctccccctacctccttgccagggcaagggtggagtgtggaagacgtgggtcccccagagcaggcctggcccccagctgtgagggcctcagggaggcccgagggggagtgctgggggtctcagctggcttagctcctaagtttaccaaatgttaatttagtcttggggagaacagcaagggctggaggccagtgctgcagggccagccccactcctgacacctgggcccttgaagctccttgaggggcaaggcccaggagttccagccctcaggttcctgagggtccaccctcagtccttccccccgccgcccctccccggactccccacaagagcctccctggccccagggccgcctaccaggctggtactcattctatgaccaccgcccccaaccagctgcccccagctctccctgccccctcccctctctggcagctagcagggcaattggcggggaggagtgcggactgaggactgaggaccaagggggcccaggccctgccctcctacccggaggggctccgtttgcattccttggtgctctctgagtgcagctggtgtcccgccctgttctgggcggacgcctgtgtgcgtgtgtgtgtgcctgtccagtgtatattgtgtcttagcttccattttaaaaattgttctgtacagagagagatgcagcaggggcgggagggcagagtgggcggaggggagcagccgcacccccagcaccgggtgtctgcggtaggaacaagagggctgagagggtctggtcctggcccaggctcccccttgggctcagcacgaaagggctttcaatgaattaagtgaaaactttttccttttttacaaaaatgcaaaaatcaacaaagctccaaacctattggaaataaaatatgaacttgca

SEQ ID NO: 59431 - DNA, 4163 bp, Homo sapiens
  misc_feature (1368)..(1368): n is a, c, g, or t
ttcctccttcctgcatcccagcctgggtcgaggatcccttttttggattgacttctgttcccttcatgcttctttctgcagtctccaagcctctggcaccatccttctcgatgacgttagatgtcctatcccaagccatttgttgcttgcatttttaggctcgagagactaaagagaactatactaactgcctgtccttctggggccaggggcaggggagcccagtctaggagaccccccaacctagacacatgtagcaaacaaaaacccagatgtaagggggtaagtgggtctggggccttccactgggtggaatgtgggagaagagatttgggagtgtcttggctgttacacatgcagggcagaggagagagaccagtgaaggttgggaggaggcggccaaaaggagacagcttcatgcccccaggacataaatagcccggctgctgcaggtacctgaaagaattccgcacagagcagtgcccactctttgtgcaacacaaatgcacgcagcatcggccctacacctgcttccactggcacttcgtgaaccagcggcgccgccggtccatccgccgtcgggacggcaccttcaattacagccctgacgtctactgcaccaagtacgacgaggctacaggcctctgcccggagggcgacgagtgcccattcctgcacagaaccacaggggacactgagcgcaggtaccaccttcgttactacaaaactggaatctgcatccacgagacagactcgaaaggcaactgcaccaaaaacggcctgcactgcgcttttgcccacgggccccatgacctccgctcccctgtctacgacatcagggagcttcaggccatggaggccttgcagaatggccagaccacggtagaggggagcatagagggccagtcggctggggctgcgagccatgccatgatagaaaagatcctcagcgaggagcctcggtggcaagagactgcttatgtgctggggaactataagacggagccttgcaagaagcccccgcggctgtgccgccaaggctatgcctgtccctactaccacaacagcaaggaccggcggcggagcccccggaagcacaaatacaggtcgtctccatgtccaaacgtcaagcacggggatgagtggggagaccctggcaagtgtgagaacggagacgcctgccagtactgccacacccgcaccgagcagcagttccaccccgagatctacaagtccaccaagtgcaacgacatgcagcagtcgggcagctgtccccgaggacccttctgcgcctttgcccacgtagaacagccacccctgagtgacgacctgcagccttcctcagctgtgtccagccccacccagccnggtcctgtcctgtacatgccatctgccgccggagactcggtgcctgtgagcccctccagcccgcatgcccctgacctcagtgccctcctctgtagaaacagcagcctaggcagcccgtctaacctctgcggctccccaccgggctccatcaggaagcccccaaacctggagggcatcgtcttccctggggagtctggcctggcccctggcagctataagaaggctcccggcttcgagagggaagaccaggtgggagccgagtacctgaaaaatttcaaatgccaggccaaattaaaaccccactcattagagcccaggagtcaagagcagcctctgcttcagcccaaacaggacatgctgggcatcctccccgcaggcagccccctgacctcaagcatctcttctagtatcacctccagcctggcagctaccccccctagcccagtgggcaccagcagcgtccccggcatgaatgcaaacgctctgcccttctaccccaccagcgacacggtagagtcagtcatagagtctgctttggatgacctggacctgaatgagtttggcgtggccgccctggagaagactttcgataacagcacagtgccccacccaggaagcatcaccatcggcggcagcttgctgcagagctctgcgcccgtgaacatccccggctccttgggcagctctgcctccttccactcagcatccccgtcccctcccgtcagcctctcctcgcatttcctgcagcagccccagggccacctgagtcagtcggaaaacacatttttgggaacctcagcatcacatggatctttgggtctgaacgggatgaacagcagcatctgggagcattttgcctctggaagcttctccccgggcacttcccccgctttcctatcagggccaggggctgccgagctggcccgacttcggcaagagctggatgaagccaacagcaccatcaagcagtgggaggagtcctggaagcaggccaagcaggcttgtgatgcctggaagaaagaggcggaggaggctggtgagcgggccagtgcggcgggcgccgagtgcgagctggcccgggagcagcgggatgcactggaggtgcaggtgaagaagctccaggaggagctggagcggctacacgcggggcctgagccccaggccctgcccgccttctccgacctggaggcgctctcactctccaccctctactccctccagaaacaactgcgggcccacctggaacaagtggacaaggccgtgttccacatgcagtcggtgaaatgccttaagtgtcaggaacagaagcgggcagtgctgccgtgccaacacgctgcgctgtgtgagctctgcgctgagggcagcgagtgccccatctgccagcctggccgggcccacaccctccagtcgtgaccctgcaggcctggcccagcctggcccagatcttctcacctaggactttttaaagtatatatatatatatgaatatatatatatatgtgtatgtatgtatgtatatgtatatgattatgtatatgtatacatttccgtatgtatgtatatgtatacatttccgtatgtgtgcaggtatgcgtggtggtgtggacagtgtctgtgtgtatatctgtacatagatatagacacacactttaaaagacttaccaagcactttttaaaagaagaaactattttgcagtcctcccctacccactccctgcccttcccactgcagagatgacatcccctcttctcccactggccttttggcagagaatctggttctgtctcttttttaatgtaggaactaactatttttaacttcttcctggggcctgagcagggaagggtgggactggaaggcactaaggggaagggagaagccctcagggcaggccctgctccccctacctccttgccagggcaagggtggagtgtggaagacgtgggtcccccagagcaggcctggcccccagctgtgagggcctcagggaggcccgagggggagtgctgggggtctcagctggcttagctcctaagtttaccaaatgttaatttagtcttggggagaacagcaagggctggaggccagtgctgcagggccagccccactcctgacacctgggcccttgaagctccttgaggggcaaggcccaggagttccagccctcaggttcctgagggtccaccctcagtccttccccccgccgcccctccccggactccccacaagagcctccctggccccagggccgcctaccaggctggtactcattctatgaccaccgcccccaaccagctgcccccagctctccctgccccctcccctctctggcagctagcagggcaattggcggggaggagtgcggactgaggactgaggaccaagggggcccaggccctgccctcctacccggaggggctccgtttgcattccttggtgctctctgagtgcagctggtgtcccgccctgttctgggcggacgcctgtgtgcgtgtgtgtgtgcctgtccagtgtatattgtgtcttagcttccattttaaaaattgttctgtacagagagagatgcagcaggggcgggagggcagagtgggcggaggggagcagccgcacccccagcaccgggtgtctgcggtaggaacaagagggctgagagggtctggtcctggcccaggctcccccttgggctcagcacgaaagggctttcaatgaattaagtgaaaactttttccttttttacaaaaatgcaaaaatcaacaaagctccaaacctattggaaataaaatatgaacttgca

SEQ ID NO: 59432 - DNA, 3094 bp, Homo sapiens
  misc_feature (299)..(299): n is a, c, g, or t
agaggtgggaccacggggagaggtgggaccacggggaggggccgggaacacagggcaagagatgactaagccagcgcactcatgctggaggaaggggagcctgcccggccttcccttcaggcctgagcctgacttgcctgtgctctgccctccagatctacaagtccaccaagtgcaacgacatgcagcagtcgggcagctgtccccgaggacccttctgcgcctttgcccacgtagaacagccacccctgagtgacgacctgcagccttcctcagctgtgtccagccccacccagccnggtcctgtcctgtacatgccatctgccgccggagactcggtgcctgtgagcccctccagcccgcatgcccctgacctcagtgccctcctctgtagaaacagcagcctaggcagcccgtctaacctctgcggctccccaccgggctccatcaggaagcccccaaacctggagggcatcgtcttccctggggagtctggcctggcccctggcagctataagaaggctcccggcttcgagagggaagaccaggtgggagccgagtacctgaaaaatttcaaatgccaggccaaattaaaaccccactcattagagcccaggagtcaagagcagcctctgcttcagcccaaacaggacatgctgggcatcctccccgcaggcagccccctgacctcaagcatctcttctagtatcacctccagcctggcagctaccccccctagcccagtgggcaccagcagcgtccccggcatgaatgcaaacgctctgcccttctaccccaccagcgacacggtagagtcagtcatagagtctgctttggatgacctggacctgaatgagtttggcgtggccgccctggagaagactttcgataacagcacagtgccccacccaggaagcatcaccatcggcggcagcttgctgcagagctctgcgcccgtgaacatccccggctccttgggcagctctgcctccttccactcagcatccccgtcccctcccgtcagcctctcctcgcatttcctgcagcagccccagggccacctgagtcagtcggaaaacacatttttgggaacctcagcatcacatggatctttgggtctgaacgggatgaacagcagcatctgggagcattttgcctctggaagcttctccccgggcacttcccccgctttcctatcagggccaggggctgccgagctggcccgacttcggcaagagctggatgaagccaacagcaccatcaagcagtgggaggagtcctggaagcaggccaagcaggcttgtgatgcctggaagaaagaggcggaggaggctggtgagcgggccagtgcggcgggcgccgagtgcgagctggcccgggagcagcgggatgcactggaggtgcaggtgaagaagctccaggaggagctggagcggctacacgcggggcctgagccccaggccctgcccgccttctccgacctggaggcgctctcactctccaccctctactccctccagaaacaactgcgggcccacctggaacaagtggacaaggccgtgttccacatgcagtcggtgaaatgccttaagtgtcaggaacagaagcgggcagtgctgccgtgccaacacgctgcgctgtgtgagctctgcgctgagggcagcgagtgccccatctgccagcctggccgggcccacaccctccagtcgtgaccctgcaggcctggcccagcctggcccagatcttctcacctaggactttttaaagtatatatatatatatgaatatatatatatatgtgtatgtatgtatgtatatgtatatgattatgtatatgtatacatttccgtatgtatgtatatgtatacatttccgtatgtgtgcaggtatgcgtggtggtgtggacagtgtctgtgtgtatatctgtacatagatatagacacacactttaaaagacttaccaagcactttttaaaagaagaaactattttgcagtcctcccctacccactccctgcccttcccactgcagagatgacatcccctcttctcccactggccttttggcagagaatctggttctgtctcttttttaatgtaggaactaactatttttaacttcttcctggggcctgagcagggaagggtgggactggaaggcactaaggggaagggagaagccctcagggcaggccctgctccccctacctccttgccagggcaagggtggagtgtggaagacgtgggtcccccagagcaggcctggcccccagctgtgagggcctcagggaggcccgagggggagtgctgggggtctcagctggcttagctcctaagtttaccaaatgttaatttagtcttggggagaacagcaagggctggaggccagtgctgcagggccagccccactcctgacacctgggcccttgaagctccttgaggggcaaggcccaggagttccagccctcaggttcctgagggtccaccctcagtccttccccccgccgcccctccccggactccccacaagagcctccctggccccagggccgcctaccaggctggtactcattctatgaccaccgcccccaaccagctgcccccagctctccctgccccctcccctctctggcagctagcagggcaattggcggggaggagtgcggactgaggactgaggaccaagggggcccaggccctgccctcctacccggaggggctccgtttgcattccttggtgctctctgagtgcagctggtgtcccgccctgttctgggcggacgcctgtgtgcgtgtgtgtgtgcctgtccagtgtatattgtgtcttagcttccattttaaaaattgttctgtacagagagagatgcagcaggggcgggagggcagagtgggcggaggggagcagccgcacccccagcaccgggtgtctgcggtaggaacaagagggctgagagggtctggtcctggcccaggctcccccttgggctcagcacgaaagggctttcaatgaattaagtgaaaactttttccttttttacaaaaatgcaaaaatcaacaaagctccaaacctattggaaataaaatatgaacttgca

SEQ ID NO: 59433 - DNA, 3546 bp, Homo sapiens
  misc_feature (1191)..(1191): n is a, c, g, or t
aggcgcactgggtcctcggcgcggaccgcgcagactgaataataaaaggggagcggcgaagaggcaggaagacaagaccatgtcgaagggccccgggcccggcggctccgcagcttcctcggcgcccccggccgctaccgctcaggtgctgcaggcacagcccgagaaaccgcagcactacacggcagaggagagagaccagtgaaggttgggaggaggcggccaaaaggagacagcttcatgcccccaggacataaatagcccggctgctgcaggtacctgaaagaattccgcacagagcagtgcccactctttgtgcaacacaaatgcacgcagcatcggccctacacctgcttccactggcacttcgtgaaccagcggcgccgccggtccatccgccgtcgggacggcaccttcaattacagccctgacgtctactgcaccaagtacgacgaggctacaggcctctgcccggagggcgacgagtgcccattcctgcacagaaccacaggggacactgagcgcaggtaccaccttcgttactacaaaactggaatctgcatccacgagacagactcgaaaggcaactgcaccaaaaacggcctgcactgcgcttttgcccacgggccccatgacctccgctcccctgtctacgacatcagggagcttcaggccatggaggccttgcagaatggccagaccacggtagaggggagcatagagggccagtcggctggggctgcgagccatgccatgatagaaaagatcctcagcgaggagcctcggtggcaagagactgcttatgtgctggggaactataagacggagccttgcaagaagcccccgcggctgtgccgccaaggctatgcctgtccctactaccacaacagcaaggaccggcggcggagcccccggaagcacaaatacaggtcgtctccatgtccaaacgtcaagcacggggatgagtggggagaccctggcaagtgtgagaacggagacgcctgccagtactgccacacccgcaccgagcagcagttccaccccgagatctacaagtccaccaagtgcaacgacatgcagcagtcgggcagctgtccccgaggacccttctgcgcctttgcccacgtagaacagccacccctgagtgacgacctgcagccttcctcagctgtgtccagccccacccagccnggtcctgtcctgtacatgccatctgccgccggagactcggtgcctgtgagcccctccagcccgcatgcccctgacctcagtgccctcctctgtagaaacagcagcctaggcagcccgtctaacctctgcggctccccaccgggctccatcaggaagcccccaaacctggagggcatcgtcttccctggggagtctggcctggcccctggcagctataagaaggctcccggcttcgagagggaagaccaggtgggagccgagtacctgaaaaatttcaaatgccaggccaaattaaaaccccactcattagagcccaggagtcaagagcagcctctgcttcagcccaaacaggacatgctgggcatcctccccgcaggcagccccctgacctcaagcatctcttctagtatcacctccagcctggcagctaccccccctagcccagtgggcaccagcagcgtccccggcatgaatgcaaacgctctgcccttctaccccaccagcgacacggtagagtcagtcatagagtctgctttggatgacctggacctgaatgagtttggcgtggccgccctggagaagactttcgataacagcacagtgccccacccaggaagcatcaccatcggcggcagcttgctgcagagctctgcgcccgtgaacatccccggctccttgggcagctctgcctccttccactcagcatccccgtcccctcccgtcagcctctcctcgcatttcctgcagcagccccagggccacctgagtcagtcggaaaacacatttttgggaacctcagcatcacatggatctttgggtctgaacgggatgaacagcagcatctgggagcattttgcctctggaagcttctccccgggcacttcccccgctttcctatcagggccaggggctgccgagctggcccgacttcggcaagagctggatgaagccaacagcaccatcaagcagtgggaggagtcctggaagcaggccaagcaggcttgtgatgcctggaagaaagaggcggaggaggctggtgagcgggccagtgcggcgggcgccgagtgcgagctggcccgggagcagcgggatgcactggaggtgcaggtgaagaagctccaggaggagctggagcggctacacgcggggcctgagccccaggccctgcccgccttctccgacctggaggcgctctcactctccaccctctactccctccagaaacaactgcgggcccacctggaacaagtggacaaggccgtgttccacatgcagtcggtgaaatgccttaagtgtcaggaacagaagcgggcagtgctgccgtgccaacacgctgcgctgtgtgagctctgcgctgagggcagcgagtgccccatctgccagcctggccgggcccacaccctccagtcgtgaccctgcaggcctggcccagcctggcccagatcttctcacctaggactttttaaagtatatatatatatatgaatatatatatatatgtgtatgtatgtatgtatatgtatatgattatgtatatgtatacatttccgtatgtatgtatatgtatacatttccgtatgtgtgcaggtatgcgtggtggtgtggacagtgtctgtgtgtatatctgtacatagatatagacacacactttaaaagacttaccaagcactttttaaaagaagaaactattttgcagtcctcccctacccactccctgcccttcccactgcagagatgacatcccctcttctcccactggccttttggcagagaatctggttctgtctcttttttaatgtaggaactaactatttttaacttcttcctggggcctgagcagggaagggtgggactggaaggcactaaggggaagggagaagccctcagggcaggccctgctccccctacctccttgccagggcaagggtggagtgtggaagacgtgggtcccccaggccctgccctcctacccggaggggctccgtttgcattccttggtgctctctgagtgcagctggtgtcccgccctgttctgggcggacgcctgtgtgcgtgtgtgtgtgcctgtccagtgtatattgtgtcttagcttccattttaaaaattgttctgtacagagagagatgcagcaggggcgggagggcagagtgggcggaggggagcagccgcacccccagcaccgggtgtctgcggtaggaacaagagggctgagagggtctggtcctggcccaggctcccccttgggctcagcacgaaagggctttcaatgaattaagtgaaaactttttccttttttacaaaaatgcaaaaatcaacaaagctccaaacctattggaaataaaatatgaacttgca

SEQ ID NO: 59434 - DNA, 978 bp, Homo sapiens
ctagttgatcaagaaaagcagtgccgtcgtttaatattcgacggcagtactataacggtctaaggtacgaggctgggtggcggctcccctactccttgccagggcaagggtggagtgtggaagacgtgggtcccccagagcaggcctggcccccagctgtgagggcctcagggaggcccgagggggagtgctgggggtctcagctggcttagctcctaagtttaccaaatgttaatttagtcttggggagaacagcaagggctggaggccagtgctgcagggccagccccactcctgacacctgggcccttgaagctccttgaggggcaaggcccaggagttccagccctcaggttcctgagggtccaccctcagtccttccccccgccgcccctccccggactccccacaagagcctccctggccccagggccgcctaccaggctggtactcattctatgaccaccgcccccaaccagctgcccccagctctccctgccccctcccctctctggcagctagcagggcaattggcggggaggagtgcggactgaggactgaggaccaagggggcccaggccctgccctcctacccggaggggctccgtttgcattccttggtgctctctgagtgcagctggtgtcccgccctgttctgggcggacgcctgtgtgcgtgtgtgtgtgcctgtccagtgtatattgtgtcttagcttccattttaaaaattgttctgtacagagagagatgcagcaggggcgggagggcagagtgggcggaggggagcagccgcacccccagcaccgggtgtctgcggtaggaacaagagggctgagagggtctggtcctggcccaggctcccccttgggctcagcacgaaagggctttcaatgaattaagtgaaaactttttccttttttacaaaaatgcaaaaatcaacaaagctccaaacctattggaaataaaatatgaacttgca

SEQ ID NO: 59435 - DNA, 209 bp, Homo sapiens
gcctccgtatgcaggcctaccattgcttctcctcttccctctctcgttgcaggacatgctgggcatcctccccgcaggcagccccctgacctcaagcatctcttctagtatcacctccagcctggcagctaccccccctagcccagtgggcaccagcagcgtccccggcatgaatgcaaacgctctgcccttctaccccaccagcgaca

SEQ ID NO: 59436 - DNA, 1493 bp, Homo sapiens
gcggaaatagtgtttgcaaacaggaagtgtggcactccagctaccgaagcactggagagtgtcatggaggcctacgagcaggtccaaaagggacccctgaagctgaaaggcgtcgcagagctgggagtgaccaagcggaagaagaaaaagaaggacaaagacaaagcgaaactcctggaagcaatgggaacgagcaaaaagaacgaggaggagaagcggcgcggcctggacaagcggaccccggcccaggcggccttcgagaaaatgcaggagaagcggcaaatggaaaggatcctaaagaaggcatccaaaacccacaagcagagagtggaggacttcaacagacacctggacacactcacggagcattacgacattcccaaagtcagctggacgaagtagccgcctgcccccagtatggagcagcatcgagggttcgcaaaaggccacactggggttgtgtgtgtttcctttggtatattctggaaacatggctacacacacccttgcatcttctgctacagactgcttttcgaagctgtgtaccctcattctggaacttgattaaagtaagatcgtccttgtactcagtttaggcttcttggcaacatacagaagatacacccttttcgtttggatggaaagtttctaagtttatccagaggtaaagcccattgtgtgtctgtgtcatgtaaaaatgttttcacccgagttgcatgtaacgctctgaggccagccagctgtcttctcctggatgagacagactccagagggtaaggagctagcgccatggtggcctgcagtatgcagagccccgcaggacccagcgtgggcgcccttccaagcttcctctagctttgggcctatgctgtcccctgcaggccctagggaagccacttgcaactatgcggccttcagacttcctcctcagccacctggccactgagacagcatagcctgggtaacggaacagccacctaaggcaagaatggaacggacacaccttgctcctttctgagcccgtttcccaaaaccccccttccaggtgcttctaatgggtgttgccatagcagacgctgctaatgcatcacagcattctttgaaatggaaccagacacagcctgcctctcaatcctcagctgggggctcctagcagcctcttgtatttactcagagttgacacatcacacagatcctgtttggcattcctaccttacggacgtctcaggggtgacaggaccagggcagagccccggtacaaacagacaaggctgcagtcaaatgggagggtccaggtgtccgtgttggagggctgggatcttgtagggcctgtgcgtcctggctgaggatcaaaccacatatgttattgggagaaacgatttctgttgacgtagatattgaaagaataatgaaggcagaagagaaaaacgaagtgtggaatttggggttgtcctgtgtaaattacacaataaagcaaaagtcagttattgtaa

SEQ ID NO: 59437 - DNA, 1079 bp, Homo sapiens
gcggaaatagtgtttgcaaacaggaagtgtggcactccagctaccgaagcactggagagtgtcatggaggcctacgagcaggtccaaaagggacccctgaagctgaaaggcgtcgcagagctgggagtgaccaagcggtgaggcccgagggcccgcgggattccgtcttcatcccccttagaccttttctcgggacccctggccctgatcctccgacccgccgcctcctcatgtctttttccaggaagaagaaaaagaaggacaaagacaaagcgaaactcctggaagcaatgggaacgagcaaaaagaacgaggaggagaagcggcgcggcctggacaagcggaccccggcccaggcggccttcgagaaaatgcaggagaagcggcaaatggaaaggatcctaaagaaggcatccaaaacccacaagcagagagtggaggacttcaacagacacctggacacactcacggagcattacgacattcccaaagtcagctggacgaagtagccgcctgcccccagtatggagcagcatcgagggttcgcaaaaggccacactggggttgtgtgtgtttcctttggtatattctggaaacatggctacacacacccttgcatcttctgctacagactgcttttcgaagctgtgtaccctcattctggaacttgattaaagtaagatcgtccttgtactcagtttaggcttcttggcaacatacagaagatacacccttttcgtttggatggaaagtttctaagtttatccagaggtaaagcccattgtgtgtctgtgtcatgtaaaaatgttttcacccgagttgcatgtaacgctctgaggccagccagctgtcttctcctggatgagacagactccagagggtaaggagctagcgccatggtggcctgcagtatgcagagccccgcaggacccagcgtgggcgcccttccaagcttcctctagctttgggcctatgctgtcccctgcaggccctagggaagcacttgcattttgggctcggacttctctcaggcctggcctgaaagttccgggttgggacgccctaggcgatgggggcct

SEQ ID NO: 59438 - DNA, 467 bp, Homo sapiens
gttttagaattagtgaatcccccggctgcaggaattcggcaggagtcggcacggagagcaggtccaaaagggacccctgaagctgaaaggcgtcgcagagctgggagtgaccaagcggaagaagaaaaagaaggacaaagacaaagcgaaactcctggaagcaatgggaacgagcaaaaagaacgaggaggagaagcggcgcggcctggacaagcggaccccggcccaggcggccttcgagaaaatgcaggagaagcggagatgcggtttcaccatgttggccaggctgatctcgaacttctgatctcaagtgatccgcccgcctcagcttcccaaagtgctgggattacaggcgtgagccaccgcacccagtctcagctgttgatattgaatggccatgcccatgacgactttgtttgtattgtattataaggctccgataaattattttttcttaacaccataaa

SEQ ID NO: 59439 - DNA, 1658 bp, Homo sapiens
gcggaaatagtgtttgcaaacaggaagtgtggcactccagctaccgaagcactggagagtgtcatggaggcctacgagcaggtccaaaagggacccctgaagctgaaaggcgtcgcagagctgggagtgaccaagcggaagaagaaaaagaaggacaaagacaaagcgaaactcctggaagcaatgggaacgagcaaaaagaacgaggaggagaagcggcgcggcctggacaagcggaccccggcccaggcggccttcgagaaaatgcaggagaagcggcaaatggaaaggatcctaaagaaggcatccaaaacccacaagcagagagtggaggacttcaacagacacctggacacactcacggagcattacgacattcccaaagtcagctggacgaagtagccgcctgcccccagtatggagcagcatcgagggttcgcaaaaggccacactggggttgtgtgtgtttcctttggtatattctggaaacatggctacacacacccttgcatcttctgctacagactgcttttcgaagctgtgtaccctcattctggaacttgattaaagtaagatcgtccttgtactcagtttaggcttcttggcaacatacagaagatacacccttttcgtttggatggaaagtttctaagtttatccagaggtaaagcccattgtgtgtctgtgtcatgtaaaaatgttttcacccgagttgcatgtaacgctctgaggccagccagctgtcttctcctggatgagacagactccagagggtaaggagctagcgccatggtggcctgcagtatgcagagccccgcaggacccagcgtgggcgcccttccaagcttcctctagctttgggcctatgctgtcccctgcaggccctagggaagccacttgcaactatgcggccttcagacttcctcctcagccacctggccactgagacagcatagcctgggtaacggaacagccacctaaggcaagaatggaacggacacaccttgctcctttctgagcccgtttcccaaaaccccccttccaggtgcttctaatgggtgttgccatagcagacgctgctaatgcatcacagcattctttgaaatggaaccagacacagcctgcctctcaatcctcagctgggggctcctagcagcctcttgtatttactcagagttgacacatcacacagatcctgtttggcattcctaccttacggacgtctcaggggtgacaggaccagggcagagccccggtacaaacagacaaggctgcagtcaaatgggagggtccaggtgtccgtgttggagggctgggatcttgtagggcctgtgcgtcctggctgaggatcaaaccacatatgttattgggagaaacgatttctgttgacgtagatattgaaagaataatgaaggcagaagagaaaaacgaagtgtggaatttggggttgtcctgtgtaaattacacaataaagcaaaagtcagttattgtaaaaaaaaagaaaccatcatataaagaaaacaaaaaaaaagaggggggggggggtaaaaaaatctcccgggggggccattttcggacaccttttttttgaaagggggcccacagggggggtttaaagaggggggggggtaaacaaggtgggggaaacaggtcggggt

SEQ ID NO: 59440 - DNA, 1600 bp, Homo sapiens
gcggaaatagtgtttgcaaacaggaagtgtggcactccagctaccgaagcactggagagtgtcatggaggcctacgagcaggtccaaaagggacccctgaagctgaaaggcgtcgcagagctgggagtgaccaagcggtgaggcccgagggcccgcgggattccgtcttcatcccccttagaccttttctcgggacccctggccctgatcctccgacccgccgcctcctcatgtctttttccaggaagaagaaaaagaaggacaaagacaaagcgaaactcctggaagcaatgggaacgagcaaaaagaacgaggaggagaagcggcgcggcctggacaagcggaccccggcccaggcggccttcgagaaaatgcaggagaagcggcaaatggaaaggatcctaaagaaggcatccaaaacccacaagcagagagtggaggacttcaacagacacctggacacactcacggagcattacgacattcccaaagtcagctggacgaagtagccgcctgcccccagtatggagcagcatcgagggttcgcaaaaggccacactggggttgtgtgtgtttcctttggtatattctggaaacatggctacacacacccttgcatcttctgctacagactgcttttcgaagctgtgtaccctcattctggaacttgattaaagtaagatcgtccttgtactcagtttaggcttcttggcaacatacagaagatacacccttttcgtttggatggaaagtttctaagtttatccagaggtaaagcccattgtgtgtctgtgtcatgtaaaaatgttttcacccgagttgcatgtaacgctctgaggccagccagctgtcttctcctggatgagacagactccagagggtaaggagctagcgccatggtggcctgcagtatgcagagccccgcaggacccagcgtgggcgcccttccaagcttcctctagctttgggcctatgctgtcccctgcaggccctagggaagccacttgcaactatgcggccttcagacttcctcctcagccacctggccactgagacagcatagcctgggtaacggaacagccacctaaggcaagaatggaacggacacaccttgctcctttctgagcccgtttcccaaaaccccccttccaggtgcttctaatgggtgttgccatagcagacgctgctaatgcatcacagcattctttgaaatggaaccagacacagcctgcctctcaatcctcagctgggggctcctagcagcctcttgtatttactcagagttgacacatcacacagatcctgtttggcattcctaccttacggacgtctcaggggtgacaggaccagggcagagccccggtacaaacagacaaggctgcagtcaaatgggagggtccaggtgtccgtgttggagggctgggatcttgtagggcctgtgcgtcctggctgaggatcaaaccacatatgttattgggagaaacgatttctgttgacgtagatattgaaagaataatgaaggcagaagagaaaaacgaagtgtggaatttggggttgtcctgtgtaaattacacaataaagcaaaagtcagttattgtaa

SEQ ID NO: 59441 - DNA, 1147 bp, Homo sapiens
  misc_feature (1122)..(1122): n is a, c, g, or t
gcggaaatagtgtttgcaaacaggaagtgtggcactccagctaccgaagcactggagagtgtcatggaggcctacgagcaggtccaaaagggacccctgaagctgaaaggcgtcgcagagctgggagtgaccaagcggaagaagaaaaagaaggacaaagacaaagcgaaactcctggaagcaatgggaacgagcaaaaagaacgaggaggagaagcggcgcggcctggacaagcggaccccggcccaggcggccttcgagaaaatgcaggagaagcggcaaatggaaaggatcctaaagaaggcatccaaaacccacaagcagagagtggaggacttcaacagacacctggacacactcacggagcattacgacattcccaaagtcagctggacgaagtagccgcctgcccccagtatggagcagcatcgagggttcgcaaaaggccacactggggttgtgtgtgtttcctttggtatattctggaaacatggctacacacacccttgcatcttctgctacagactgcttttcgaagctgtgtaccctcattctggaacttgattaaagtaagatcgtccttgtactcagtttaggcttcttggcaacatacagaagatacacccttttcgtttggatggaaagtttctaagtttatccagaggtaaagcccattgtgtgtctgtgtcatgtaaaaatgttttcacccgagttgcatgtaacgctctgaggccagccagctgtcttctcctggatgagacagactccagagggtaaggagctagcgccatggtggcctgcagtatgcagagccccgcaggacccagcgtgggcgcccttccaagcttcctctagctttgggcctatgctgtcccctgcaggccctagggaagccacttgcaactatgcggccttcagacttcctcctcagccacctggccactgagacagcatagcctgggtaacggaacagccacctaaggcaagaatggaacggacacaccttgctcctttctgagcccgtttcccaaaaccccccttccaggtgcttctaatgggtgttgccatagcagacgctgctaatgcatcacagcattctttgaaatggtcgccaatccgggngatcctctcagcagtcgcactgcag

SEQ ID NO: 59442 - DNA, 1617 bp, Homo sapiens
gcggaaatagtgtttgcaaacaggaagtgtggcactccagctaccgaagcactggagagtgtcatggaggcctacgagcaggtccaaaagggacccctgaagctgaaaggcgtcgcagagctgggagtgaccaagcggaagaagaaaaagaaggacaaagacaaagcgaaactcctggaagcaatgggaacgagcaaaaagaacgaggaggagaagcggcgcggcctggacaagcggaccccggcccaggcggccttcgagaaaatgcaggagaagcggcagggccatcagacttcctgcacagcaactggcttccaagggcacaaagctaatgctgccaggtcttatgcatggacccagaactggtactgtgttccttcgagttaactgagtccacggccagcaaatggaaaggatcctaaagaaggcatccaaaacccacaagcagagagtggaggacttcaacagacacctggacacactcacggagcattacgacattcccaaagtcagctggacgaagtagccgcctgcccccagtatggagcagcatcgagggttcgcaaaaggccacactggggttgtgtgtgtttcctttggtatattctggaaacatggctacacacacccttgcatcttctgctacagactgcttttcgaagctgtgtaccctcattctggaacttgattaaagtaagatcgtccttgtactcagtttaggcttcttggcaacatacagaagatacacccttttcgtttggatggaaagtttctaagtttatccagaggtaaagcccattgtgtgtctgtgtcatgtaaaaatgttttcacccgagttgcatgtaacgctctgaggccagccagctgtcttctcctggatgagacagactccagagggtaaggagctagcgccatggtggcctgcagtatgcagagccccgcaggacccagcgtgggcgcccttccaagcttcctctagctttgggcctatgctgtcccctgcaggccctagggaagccacttgcaactatgcggccttcagacttcctcctcagccacctggccactgagacagcatagcctgggtaacggaacagccacctaaggcaagaatggaacggacacaccttgctcctttctgagcccgtttcccaaaaccccccttccaggtgcttctaatgggtgttgccatagcagacgctgctaatgcatcacagcattctttgaaatggaaccagacacagcctgcctctcaatcctcagctgggggctcctagcagcctcttgtatttactcagagttgacacatcacacagatcctgtttggcattcctaccttacggacgtctcaggggtgacaggaccagggcagagccccggtacaaacagacaaggctgcagtcaaatgggagggtccaggtgtccgtgttggagggctgggatcttgtagggcctgtgcgtcctggctgaggatcaaaccacatatgttattgggagaaacgatttctgttgacgtagatattgaaagaataatgaaggcagaagagaaaaacgaagtgtggaatttggggttgtcctgtgtaaattacacaataaagcaaaagtcagttattgtaa

SEQ ID NO: 59443 - DNA, 765 bp, Homo sapiens
tcgactcaagatcggtcgactctagaggatcacagactccagagggtaaggagctagcgccatggtggcctgcagtatgcagagccccgcaggacccagcgtgggcgcccttccaagcttcctctagctttgggcctatgctgtcccctgcaggccctagggaagccacttgcaactatgcggccttcagacttcctcctcagccacctggccactgagacagcatagcctgggtaacggaacagccacctaaggcaagaatggaacggacacaccttgctcctttctgagcccgtttcccaaaaccccccttccaggtgcttctaatgggtgttgccatagcagacgctgctaatgcatcacagcattctttgaaatggaaccagacacagcctgcctctcaatcctcagctgggggctcctagcagcctcttgtatttactcagagttgacacatcacacagatcctgtttggcattcctaccttacggacgtctcaggggtgacaggaccagggcagagccccggtacaaacagacaaggctgcagtcaaatgggagggtccaggtgtccgtgttggagggctgggatcttgtagggcctgtgcgtcctggctgaggatcaaaccacatatgttattgggagaaacgatttctgttgacgtagatattgaaagaataatgaaggcagaagagaaaaacgaagtgtggaatttggggttgtcctgtgtaaattacacaataaagcaaaagtcagttattgtaa

SEQ ID NO: 59444 - DNA, 682 bp, Homo sapiens
gttttagaattagtgaatcccccggctgcaggaattcggcaggagtcggcacggagagcaggtccaaaagggacccctgaagccacttgcaactatgcggccttcagacttcctcctcagccacctggccactgagacagcatagcctgggtaacggaacagccacctaaggcaagaatggaacggacacaccttgctcctttctgagcccgtttcccaaaaccccccttccaggtgcttctaatgggtgttgccatagcagacgctgctaatgcatcacagcattctttgaaatggaaccagacacagcctgcctctcaatcctcagctgggggctcctagcagcctcttgtatttactcagagttgacacatcacacagatcctgtttggcattcctaccttacggacgtctcaggggtgacaggaccagggcagagccccggtacaaacagacaaggctgcagtcaaatgggagggtccaggtgtccgtgttggagggctgggatcttgtagggcctgtgcgtcctggctgaggatcaaaccacatatgttattgggagaaacgatttctgttgacgtagatattgaaagaataatgaaggcagaagagaaaaacgaagtgtggaatttggggttgtcctgtgtaaattacacaataaagcaaaagtcagttattgtaa

SEQ ID NO: 59445 - DNA, 693 bp, Homo sapiens
aaggggaggtgatgctagccctcacccagagaagtcctgccttgggccaaaggcgcacaaatgcacctaacccgacccccttttcagggccttttactctgtccacctgtaaatgttcctgtctcgtcactctgggaaccccaattcgccagcgtcctgtcccccctgcacccgtcgatcgcttttctatgctgggcctctggagactgtactcctgccgtgcaagcctgccaccccccttccaggtgcttctaatgggtgttgccatagcagacgctgctaatgcatcacagcattctttgaaatggaaccagacacagcctgcctctcaatcctcagctgggggctcctagcagcctcttgtatttactcagagttgacacatcacacagatcctgtttggcattcctaccttacggacgtctcaggggtgacaggaccagggcagagccccggtacaaacagacaaggctgcagtcaaatgggagggtccaggtgtccgtgttggagggctgggatcttgtagggcctgtgcgtcctggctgaggatcaaaccacatatgttattgggagaaacgatttctgttgacgtagatattgaaagaataatgaaggcagaagagaaaaacgaagtgtggaatttggggttgtcctgtgtaaattacacaataaagcaaaagtcagttattgtaa

SEQ ID NO: 59446 - DNA, 292 bp, Homo sapiens
gatgttatgagttaaaagctcaaaatgaaataataacaaatttttttagaaacataatgaccaagagagaagtttgttctttttgtagtgctctcagatgtcctgggcccgactgaggcaagagtgttgacctttctgaaatccatccttgaggtccccttgacttcaaaagcagcttttccaggcgttttccctctggcctaatgctgaagcgtcctcattacccagctgtcacactcagttggcctgattgaccagagccattcccgaacacatgcctgacctgctcacc

SEQ ID NO: 59447 - DNA, 434 bp, Homo sapiens
gcaggatctagaattaagttgcaaacatttttgtggcagtactgacaaccatcacaagagaatttttaaaagttacaagatttactttgtccagaaggagaaagcacataaaatcgttgatatcagtaaatatttcctgggcatccagtgtgaagaaatgtctctgatggatcttcctcttcctcttcagtttttgtgtgccagcatatggacccagtgaacagtaatctttaaggaaatgtgggagatataaaaggcacagctaggaaacttaaaatctcttctttataaaaagaacataatagtgcttaaacaagggttattgtgcagattattatgttaatatatgtaaaatttgtagaatgatacatagcacatagtaagaagtctgtttttctttatgagtatcatcatttaatttgtagcacaatttc

SEQ ID NO: 59448 - DNA, 679 bp, Homo sapiens
ctgaatcaggaactctgggggtggagcccaggcatctggggcccaacaagcccgccccccagctgatgctaacgcatgctcaagtttgagagccacagtcctgtagtaagagtgacaagagaagcaggcattgcgggccccctggggtgtgagtgaaaggaagccaatgggcacttagccttcacccatgccacgcacctcatttacatcccctattcttatcatcttcacgaccaccttgagagccaggggttcagagcccctctttcctaatgagggctcccaggacaggatgaggtgcctgcctgaggtcacacggcagggagtgcagctccccctgccccgacctgctgagccccatcacttccgcagatcctggcattctctcagaagctgtactacgacaaggaacagacagtgagcatgaaggacaatgtcaggcccctgcagcagctggggcagcgcacggtgataaagtccggggccccgggtcggccgctgccctgggccctgcctgccctgctgggccccatgctggcctgcctgctggccggcttcctgcgatgatggctcacttctgcacgcagcctctctgttgcctcagctctccaagttccaggcttccggtccttagccttcccaggtgggactttaggcatgattaaaatatggacatatt

SEQ ID NO: 59449 - DNA, 1110 bp, Homo sapiens
cgcggcggcctcctcggtgcgcgacccccggctcagaggactctttgctgtcccgcaagatgcggatgctgctggcgctcctggccctctccgcggcgcggccatcggccagtgcagagtcacactggtgctacgaggttcaagccgagtcctccaactacccctgcttggtgccagtcaagtggggtggaaactgccagaaggaccgccagtcccccatcaacatcgtcaccaccaaggcaaaggtggacaaaaaactgggacgcttcttcttctctggctacgataagaagcaaacgtggactgtccaaaataacgggcactcagtgatgatgttgctggagaacaaggccagcatttctggaggaggactgcctgccccataccaggccaaacagttgcacctgcactggtccgacttgccatataagggctcggagcacagcctcgatggggagcactttgccatggagatgcacatagtacatgagaaagagaaggggacatcgaggaatgtgaaagaggcccaggaccctgaagacgaaattgcggtgctggcctttctggtggaggctggaacccaggtgaacgagggcttccagccactggtggaggcactgtctaatatccccaaacctgagatgagcactacgatggcagagagcagcctgttggacctgctccccaaggaggagaaactgaggcactacttccgctacctgggctcactcaccacaccgacctgcgatgagaaggtcgtctggactgtgttccgggagcccattcagcttcacagagaacagatcctggcattctctcagaagctgtactacgacaaggaacagacagtgagcatgaaggacaatgtcaggcccctgcagcagctggggcagcgcacggtgataaagtccggggccccgggtcggccgctgccctgggccctgcctgccctgctgggccccatgctggcctgcctgctggccggcttcctgcgatgatggctcacttctgcacgcagcctctctgttgcctcagctctccaagttccaggcttccggtccttagccttcccaggtgggactttaggcatgattaaaatatggacatatt

SEQ ID NO: 59450 - DNA, 546 bp, Homo sapiens
tttacgggttaacccccgggtaacaaaggtttcccaaccctttgtggaagcccctttttaaaattccccaaccttagatgagcactacgatggcagagagcagcctgttggacctgctccccaaggaggagaaactgaggcactacttccgctacctgggctcactcaccacaccgacctgcgatgagaaggtcgtctggactgtgttccgggagcccattcagcttcacagagaacagatcctggcattctctcagaagctgtactacgacaaggaacagacagtgagcatgaaggacaatgtcaggcccctgcagcagctggggcagcgcacggtgataaagtccggggccccgggtcggccgctgccctgggccctgcctgccctgctgggccccatgctggcctgcctgctggccggcttcctgcgatgatggctcacttctgcacgcagcctctctgttgcctcagctctccaagttccaggcttccggtccttagccttcccaggtgggactttaggcatgattaaaatatggacatatt

SEQ ID NO: 59451 - DNA, 809 bp, Homo sapiens
aagggggagtatgattcagagtagaaaaaacagcagctagactgcagaagtgatttgctgccaaattgcatggcctggtgtgttgctgatctatttatcccaccacagacattttgaaacatgcttctgcatgctcatcagaggcactttgctcttctagttcatttttatttattttctaccttccactttgaaaataagaactccgtggtagcatagatcatgtcagacttgtttacctctatatctccaacacctacagctgtgcctaccatgtagcaagttattaataaaaacttgttgaaataattgggcatgacaaacaaaaacattattcattctgttttccaattattaaaacagcttatattaaagggttttacattgtagaattctcttttctttaaattatctggtccaattctataaataatgtttattaagtttataattgtcttgtatttgtatgtgtgagaaaagatagaatttttgacagggtctcatattcagtatattctttttataaaatatatttattcgtggctcacgcctgtaatcccagcactttgggaggccgaggcgggcggatcacgaggtcaggagatcgagaccatcccggctaaaacggtgaaaccccgtctctactaaaaatacaaaaaattagctgggcgtagtggcaggcgcctatagtcccagctacttgggaggctgaggcaggagaatggcatgaacccgggaggcggagcttgcagtgagccgagatcccgccactgcactccagcctgggcgacagagcgagactccgtctc

SEQ ID NO: 59452 - DNA, 107 bp, Homo sapiens
gggatatgtccttaacagatgtccctgtcctttatatattagatggtggagatggatagccagaaacagacataatatatcagatgtgaaataatgccataaagaag

SEQ ID NO: 59453 - DNA, 251 bp, Homo sapiens
tacgttttatatttctaatatttctactagctacgtatgagagtgcttgttcttccacatccccatcgccaccagataagatcagttttttaagttttagctattctaataggtgtatggtggtatctgattgtgatttttatcttacaattccctaataataatattaaatgttttttttgtacttatctgtcataaatatgtcttctttggtgaagtgtgtttcaaatctgtttaaaatttttttattg

SEQ ID NO: 59454 - DNA, 696 bp, Homo sapiens
tgaactaccgcgcccggccaagttttatatatgtattgaaaagttatacacgcacacacacacgactatatgtatgactcttattgagacaataaaatgtttctatgaataagaaattaatactaaaaaataatttttaagaaatgacacagaagagcaagtacaaaatatttacctcattagtgctcagagaaatgcagacacaacaaaattatattctacattattaaattagaaaaaactttaaaaccttgatcataacaagtgttggtatggatgtgaatcagtttgaagtctcatatactgtctggggagtgttaatttggaaatcagttttggattccctgctaaagttggccatatggaagtcttaaggcccagaactcctaacatgtgcatgaggaagggtgttcatgaatgtttgcagttctattgttcatgatggcaaaaatctaaatgtccatcaggagaagaacaaataagaaactggtatatttatacaataaagtattgcacagcagtgaggatgaacaaactgtagctacatgcaggatgatggctaaatctaaaattcataacactgcatgatagaagtgagtctcagaagaatgcctaggtatgattagagtcgtatgaagtttagaaacaacaactaccaaaacagagttaatttattaatacatacataggcggtta

SEQ ID NO: 59455 - DNA, 786 bp, Homo sapiens
ataaaataaaaatttactctcttctccttccctcaaaaagtataaagagggatgcccaataaataattggtaaatgaaaaggatcatttttctgtgcttttctaccaatcctgcattcttttcactctcttagttgcccaacatcactggtttctcctcttttctatcaaaatatgttttcagacaaggatcagaaactttttcaccctgaggctcagataactaatatgagttgcatgtgctactatgcctagggacaaaagtctaaaaccaaaagtgttaaactctaataaaattagttttagtctcctttctgtggaactaatcctgttagcttcacctttaagttatgtacagtatcagaacactttattggcttctactgctatctctcactctggtctaaaccaccaccatttggactatgcctcctaaatgatctctttggctgctccctcttttatattttgcccacacagccaaaatttatgcttttaaagtcaggtcataccacaactctgatgaaacccttctagtactttctcatttctttcagtcaaagagtaaatatccttataatgcctctctgttctcctcgcctcttattctcacttttattcatcttcctctagccacattcaaacctaacttgcttggccaggctactacgtagtgtcattatgggactccatgaacattatgggactacatgaacgagtctgtacccatgctgatagaacaagatgccatcaggtatagagctgaaaagtaagcttttaacttaaa

SEQ ID NO: 59456 - DNA, 800 bp, Homo sapiens
aaagtaaaagttggaaaattcatggccaaacttgctgaacatatgttcccaaagagccaggaataacaccttgattttgtaatttagaagcaacacacattgtaaactattcattttctccaccttgtttatatggtaaaggaatcctttcagctgccagttttgaataatgaatatcatattgtatcatcaatgctgatatttaactgagttggtctttaggtttaagatggataaatgaatatcactacttgttctgaaaacatgtttgttgctttttatctcgctgcctagattgaaatattttgctatttcttctgcataagtgacagtgaaccaattcatcatgagtaagctcccttctgtcattttcattgatttaatttgtgtgtcatcaataaaattgtatgttaatgctggaaagaaaaaaagaagaaagaaagaaaccatccctgtccttcagtttataatctagttggagagataagaaacgtacaaaccaaaagataacagaatatctgaagcatgtactcattgtcagatgttccctctgagagcacagaggaggcaaaagcttctgtgggatgtgctagtcggctaaagcttcacagaggaggtggcaattgaaaatgagtcctgaatggggtagggtggttagggaattccatgagacaagacaaggggggcatggtgtgagaaaggcatggaagtaggaaccctcttcctatgacaggagatcattctgcttagagtggagagtgtggagagtgggagtagataattttggaaagctgggtgaa

SEQ ID NO: 59457 - DNA, 550 bp, Homo sapiens
gtgaaaaaaaagtttagggattattattaaacattaccagagaaccagtttctctcgcaaatatttctttttatttatttatttattttttatttgagatggagtctcccttctgtcattttcattgatttaatttgtgtgtcatcaataaaattgtatgttaatgctggaaagaaaaaaagaagaaagaaagaaaccatccctgtccttcagtttataatctagttggagagataagaaacgtacaaaccaaaagataacagaatatctgaagcatgtactcattgtcagatgttccctctgagagcacagaggaggcaaaagcttctgtgggatgtgctagtcggctaaagcttcacagaggaggtggcaattgaaaatgagtcctgaatggggtagggtggttagggaattccatgagacaagacaaggggggcatggtgtgagaaaggcatggaagtaggaaccctcttcctatgacaggagatcattctgcttagagtggagagtgtggagagtgggagtagataattttggaaagctgggtgaa

SEQ ID NO: 59458 - DNA, 1506 bp, Homo sapiens
attcatcaaccaggtactcatgtttataattacttaagtggtttctgtaaaaaggcagctgatgtctgccatttatcaaactttttctcttataattgaatttagtgattctttagaaaattgagtagcaggtgattttctcatatgtataactaatttacaaggggaggccaaaaatctttggcaaagaagggttatgtcttcaatgttgttgataaatgtaatcttactttctacgtagcagaaaaactctgttgagagcttccttctccccatacattacaaaagacctggaaatttggtttcaaaaatgagaaggggaaacactgttcacagtaactgcagtgccccattctgccaatggaatttgatgacacttctatcattcatgaatttgttcaatagctctgtttggctgtgtatacctgtgtgcatgctgttcttttctgcctaggatggattgccatcaacattatatgctcagagtctaattcattcttttactcagtgggacagtcttctggggtgcattccctgacttcacagagatgtaggaagtcttttctccatgatgcctttctatcttcatcagaacaacattactctcgaaatgatttgtttacctgccaggtgctgagggtgaaaaggtaaatgagacagagtgccccccaactccccgcctacaggtagtgtatctcaatgaataagtgatattttaataaatgagttgaagaaagataaaacaagtaagacataatacttgctcttgagagtttgtgacaagcttgaaaaataagacatatataaatagatataattataataaatggacgtttgtgccaaatgtcacaaggcagcaaagaaactagtttgagaatccagaagagaatggagctgagtcagccagctgaagcaagtttggaaaggaaaaactcaaattgtaagctgatttagggtgaaatattgatggaattatccattctatcatgataagaatcaacagcagttgtaaattgttttctatatggtagacattgtaccaagggctatacatacattgtctagtttaatcgctccaggcagactcctaattcatttgagtaatggcccctaactacttcatgtgtttgttttgtgaataaatgggcatgttaatgcactttggaaatgatagagcataaaacaaaaatctacataattattctgaaaagaatggatgacaagaaaaataggacttcacagagggaaggatgatcaaaaaattacgatattgggacagaacaaaaaggtgcactattggggctcaaacgcagatggcttacaaagaaagtctgaatttgaaggatgttgagaaataaaagtatctcaaagacagtcccttggtgacagtaaaaattgagaccacttggaatgaattaaagtggagcaatagtaagagaagctggagaacaggactgacatagaaatagtatttaaaagctgtgaaagcacttcagccaagccttt

SEQ ID NO: 59459 - DNA, 649 bp, Homo sapiens
ttaaaaaaaaaaaaaaaaagaagaaagaaaaggcaagaaaatctaaagaagtaagaggaaaaaaagggaaggaaggaaatagaaacaatgtctgtgataaataagaatgagagaaggttcatgtggtagggagtgccatccattatcagttggcatctcctcactgacagagctcccacatgtgtatagctccctttcttcagccatgattgacggcagagctactatttttgtgggaagaagactgtgacttcttgggttgaaagagccagattgaagttctctgtatgtgagtcttggaaccctgaaaaggtgcatgatgaaaaaacagcaattatgttacagaagccagtggaggaatctggcaggaatgggtatggacatatctttagcatgaaccaaggatgaaattttactctgtatttcacagtcaggtttccaagtctacttgagacatttggtgtctattcttgtttatattggcaaatcatagtttcctttgtgggtatgctttaataatgaacttgaagagaaaacagaaatacctctagagtttttggatggcaaatggatcttacaaaacatttttaaataatctaagtataaaggattcaaaagcatatagattgaatttctcaaaaaatcaagc

SEQ ID NO: 59460 - DNA, 158 bp, Homo sapiens
gcactccagcctgggcaatagagggagactccttctcaaaaacaaaacaaaacaaaacatatgaatggataaacaaaatgtggcctatccataatacagtgcataattacaccataatgcagtggtgtgtttttcagccatggtaaaaactaaaattc

SEQ ID NO: 59461 - DNA, 417 bp, Homo sapiens
tagacagagcctcactctgccaccaaggctggagcacagtggcatgatcttcgctcattgtaacctctgcctcctgggttcaagtgattctcatacctcagcctcccgagtagctgggattacaggcgtgcaccaccacatccagctaatttttgtagttttagcagtgatggggtttcaccatgttggccaggccggtcttgaactcctggcctcaagtgatccgcccatctcagcctcccaaagtgttgggattacaggtgtgagccactgcgcccagtccactttaggtatccttaacccaattttaaagataagcaatggaggcacaaagaaacaacctgcccacaactaaatagaaggtaacagctggtaacgtgacagatttgtacccaggaagactggggttacttctat

SEQ ID NO: 59462 - DNA, 418 bp, Homo sapiens
ccctgggttgaacccaagaagctctggactcagagatagctggagctaagagatgtatgaggcatcattctaaaacaggaaactattttagaattaaataaagcctcttctttgaggtgtgagatacccaggctcctcccttcttgaatcctagaattagaaaggagtttgtaaacgtaatttctgcagctattggcacaagagaggagctcttcagagactgacattttgggatttgcaaacaaaatggccaggtcaccaactgaacaccctacttacctgttagcaaacctgcccatgcagaatgggctttcaactagcttttcaaagtcttactcttaaatatggataaacaaagattatgtatgattgaagaaagctttgaacttaatgagaaagtcaaaatgacaaacaggat

SEQ ID NO: 59463 - DNA, 577 bp, Homo sapiens
ccttggcatatatttccaaacttttaaaggtttctcatattctagaaactcaagagttgtttgtataggaaacaggggcctggagttattggtgcatattccaatggcctcataccttctttctagaattttgttttatgtaatgcagtttaagaagatgcactttcatcatggtgactaacccaaatcctgatagtgacttttgggacatgatataaattttgtatttatgtaaatataagtatacattcatataatataaaacatattagatatatattattttgcatatcagtataaacattaatatatatttatatagttctattccacagtgatgaagttttacaaggatggagcaagaagtgccagaattaaaatttcaaagtgatcagtataattgattagtaattaagttgcagaaaatatggatagtaactggcaacataatgctctaattattcctattagtttttcaaagaatggcaacaactaaatatgcttctgagtgtctcccctactattttgtcttttttaccaaattgagttctttaagggtttcaattacctattaaac

SEQ ID NO: 59464 - DNA, 3225 bp, Homo sapiens
ttccattggcccggagaggcggaggcctcgggcggccagccgcgcctcggacgaccccgggacagatccgggccgcgtccccgcgttgggagagggatggggactgaggccggagacgcctagacgccgcggatagcgaagtctgagttcctctgagccagggggcaccgaccgtcacgagctaacttcctggaagagctttccgtctattttcaaattctttaccgaagcctcagaggccaagaccagctccctgaagccggctgtgacgcgccgctcccaccgcatcaagcacgaagagctgtaagaggagcgagcgcgacgggggaggccgccctggcgcacccacccgcacgcctcctcactgcttgtgtcgagcggactcccagcccctcattagattgttttcttcccagagcccagggtcgtgatatatacatctaaatagcgttttgcattatttctagatgagtgcaactgtcaaagcaatatgggttcactggtcgtgcttcctgcgggctgagcgcgggctgagcgctgccagtcagcgctcacattaaggctgacagcgccctgcctggctcggccggcgaagctctaattgccctgaaggagaccgcgcgggcgctgcgggtccggcggcgtcggcgcggtcctagcgcccgccgtagcggagccgctgctgcttccccctccttaatcatgtccatctttccccgctctcaactggagcaaacttctattccagacttcagatttccattttcactaggtttttccctgagggcatcttattacccacctcttttttttttttttttaaggaagttccacacacactccaaagccgatttcaaattcagaacctgaatgccatgatgtaccatgtagtttggggaatgcaaattgttctctccctgttttcatttcgggaccagaaaaaaaaacaactctgcataaaaatctataaagtactgaatccgcattactgctgaaaatccttttgccagctaattgtgagagtttacacaagtctctgatttcagaagagactgttaaaaccaaaacaatgatgggcagctcttttaagtgtaggtgtgaaggtcccattttcaatggaatttccaactgttatcactgggattgactttactttttaaacacataatgtgtactgtgtggcattgtaatttagatataacacacttaagttttgctttttaaatctctctgtggagaaaggttgttgttaatcctttccagaatgatctattctgagctttcctggagttaggcccttctagggagagaatttttttattgtcatcaggaaacgaaacctttgtgctctgcagcctttttcttctgaaaggctaagtggggctaaaattatccttttagttttctgctttaacaagaagagaaggacttggtgtgaaagaatttcttctctcagtccaatggtataatttttagcactccgcttcctctgtagggtttagccctacagtttgaacaattattttaatccagctaagatgtggccaacactgtgaaatacaggagatgttaaggttttgctgacttttagattaaaatcttaaaatttcacattatattttaattacttgaaaagtttaattacctagtaaagattgtttctaatagatgagaacataaatttaatagttttcatccttttttaaagtgtgtgcaacaattaatatgcctgccttatttgaggacatgataaaatgtacccaaaatgacttcgaactgtctaatgcctcagaaaagtaacttaaaatcaaccacttcgtgcttaaatgtttttatattatgaaccgatttcaacaagttttaaagctgttaatatctcattgctgtgtttgacatacaagtacattcattggttctatagtcttaatgatgacaaattaaagatgttttttcagtgctcaggtatgcatatattttcgtgttacttaagcaaaatcaactatataggaggaaaaatcaaaatggcattttattcagctaccagatggcttaaaatgagtaaaccccaacaacatcaagcacatttgtctgtgatattgaccctttttatccaatcattactattttagaagtagtggtgaactgtgtaaaataatggtatcttcagcagtgttccggaatcttagttgagggacaaacattccttccagtgagagattcaagaattgatgtgaattgaatatatttttcaaggtattataaattgtgttgtgttttcagtataagaaaatgttgacaggaaacaattttatagcatttataaaaaaccaacacttgtgcaatgctaaattggcgaagcttctgcacctgaattagagcacaataaatatgctgtttataaaccaaatcactgctattccttctctgaaatcatctctcctctttttaaacctttacttatagctagaataaatcactatttaattgcctctaatactttaaaactactggatggttaggcctggtttaactatttatggagagctatttgcaaacttaagttgtgtaaatgtaatttctacttgtgaatctgagctgtagcagcccagagggagctaggcaaactattccagaccaccaactgataagtgatcagattctttgtaatgtaggattttttaacctgttgattatgggtttgttgatataaatgtaataatgttcacctcgattttcctggagtaacaaccagcgttggtagtagcccacctgcatgaggacggccagtgttaacaatatttttgttctgatcttcttccccatttttgtttcctcaaacaggtttttaggagagtggagatttaaagtcaggatgtggcctttttattttaattatatacttaattcttagaacaagtagaatgggaaaggagtgactgataaatctaagattcaaaatagtcccgtcgaaacttaaaggccagattattgctttggagctttctataggtactagccatcccgtcgttaaatgttttcatggatatttgaaaagaagaccatgtacctttaataactgttcttttctcgagtttctgcctcgtgctttgacctggattgcattattattgtttatgcgaagtaaaaaaaaaaaaggaaagcacaagcttttcctgtatattatatttccatttccattttaaaataaaaacaattttcccaaca

SEQ ID NO: 59465 - DNA, 3223 bp, Homo sapiens
ctgtggcattgacagactctgttcacaatgtgtggcatcaagaagctggcaaaacgattcgagaatggatgagagagaactgttgtaattgggtctctagctcagaaccattagacacatcagtggagtccatgctacctgattgcccccgggtctcagcaggcaccgaccgtcacgagctaacttcctggaagagctttccgtctattttcaaattctttaccgaagcctcagaggccaagaccagctccctgaagccggctgtgacgcgccgctcccaccgcatcaagcacgaagagctgtaagaggagcgagcgcgacgggggaggccgccctggcgcacccacccgcacgcctcctcactgcttgtgtcgagcggactcccagcccctcattagattgttttcttcccagagcccagggtcgtgatatatacatctaaatagcgttttgcattatttctagatgagtgcaactgtcaaagcaatatgggttcactggtcgtgcttcctgcgggctgagcgcgggctgagcgctgccagtcagcgctcacattaaggctgacagcgccctgcctggctcggccggcgaagctctaattgccctgaaggagaccgcgcgggcgctgcgggtccggcggcgtcggcgcggtcctagcgcccgccgtagcggagccgctgctgcttccccctccttaatcatgtccatctttccccgctctcaactggagcaaacttctattccagacttcagatttccattttcactaggtttttccctgagggcatcttattacccacctcttttttttttttttttaaggaagttccacacacactccaaagccgatttcaaattcagaacctgaatgccatgatgtaccatgtagtttggggaatgcaaattgttctctccctgttttcatttcgggaccagaaaaaaaaacaactctgcataaaaatctataaagtactgaatccgcattactgctgaaaatccttttgccagctaattgtgagagtttacacaagtctctgatttcagaagagactgttaaaaccaaaacaatgatgggcagctcttttaagtgtaggtgtgaaggtcccattttcaatggaatttccaactgttatcactgggattgactttactttttaaacacataatgtgtactgtgtggcattgtaatttagatataacacacttaagttttgctttttaaatctctctgtggagaaaggttgttgttaatcctttccagaatgatctattctgagctttcctggagttaggcccttctagggagagaatttttttattgtcatcaggaaacgaaacctttgtgctctgcagcctttttcttctgaaaggctaagtggggctaaaattatccttttagttttctgctttaacaagaagagaaggacttggtgtgaaagaatttcttctctcagtccaatggtataatttttagcactccgcttcctctgtagggtttagccctacagtttgaacaattattttaatccagctaagatgtggccaacactgtgaaatacaggagatgttaaggttttgctgacttttagattaaaatcttaaaatttcacattatattttaattacttgaaaagtttaattacctagtaaagattgtttctaatagatgagaacataaatttaatagttttcatccttttttaaagtgtgtgcaacaattaatatgcctgccttatttgaggacatgataaaatgtacccaaaatgacttcgaactgtctaatgcctcagaaaagtaacttaaaatcaaccacttcgtgcttaaatgtttttatattatgaaccgatttcaacaagttttaaagctgttaatatctcattgctgtgtttgacatacaagtacattcattggttctatagtcttaatgatgacaaattaaagatgttttttcagtgctcaggtatgcatatattttcgtgttacttaagcaaaatcaactatataggaggaaaaatcaaaatggcattttattcagctaccagatggcttaaaatgagtaaaccccaacaacatcaagcacatttgtctgtgatattgaccctttttatccaatcattactattttagaagtagtggtgaactgtgtaaaataatggtatcttcagcagtgttccggaatcttagttgagggacaaacattccttccagtgagagattcaagaattgatgtgaattgaatatatttttcaaggtattataaattgtgttgtgttttcagtataagaaaatgttgacaggaaacaattttatagcatttataaaaaaccaacacttgtgcaatgctaaattggcgaagcttctgcacctgaattagagcacaataaatatgctgtttataaaccaaatcactgctattccttctctgaaatcatctctcctctttttaaacctttacttatagctagaataaatcactatttaattgcctctaatactttaaaactactggatggttaggcctggtttaactatttatggagagctatttgcaaacttaagttgtgtaaatgtaatttctacttgtgaatctgagctgtagcagcccagagggagctaggcaaactattccagaccaccaactgataagtgatcagattctttgtaatgtaggattttttaacctgttgattatgggtttgttgatataaatgtaataatgttcacctcgattttcctggagtaacaaccagcgttggtagtagcccacctgcatgaggacggccagtgttaacaatatttttgttctgatcttcttccccatttttgtttcctcaaacaggtttttaggagagtggagatttaaagtcaggatgtggcctttttattttaattatatacttaattcttagaacaagtagaatgggaaaggagtgactgataaatctaagattcaaaatagtcccgtcgaaacttaaaggccagattattgctttggagctttctataggtactagccatcccgtcgttaaatgttttcatggatatttgaaaagaagaccatgtacctttaataactgttcttttctcgagtttctgcctcgtgctttgacctggattgcattattattgtttatgcgaagtaaaaaaaaaaaaggaaagcacaagcttttcctgtatattatatttccatttccattttaaaataaaaacaattttcccaaca

SEQ ID NO: 59466 - DNA, 4064 bp, Homo sapiens
ttccattggcccggagaggcggaggcctcgggcggccagccgcgcctcggacgaccccgggacagatccgggccgcgtccccgcgttgggagagggatggggactgaggccggagacgcctagacgccgcggatagcgaagtctgagttcctctgagccagggggcaccgaccgtcacgagctaacttcctggaagagctttccgtctattttcaaattctttaccgaagcctcagaggccaagaccagctccctgaagccggctgtgacgcgccgctcccaccgcatcaagcacgaagagctgtaagaggagcgagcgcgacgggggaggccgccctggcgcacccacccgcacgcctcctcactgcttgtgtcgagcggactcccagcccctcattagattgttttcttcccagagcccagggtcgtgatatatacatctaaatagcgttttgcattatttctagatgagtgcaactgtcaaagcaatatgggttcactggtcgtgcttcctgcgggctgagcgcgggctgagcgctgccagtcagcgctcacattaaggctgacagcgccctgcctggctcggccggcgaagctctaattgccctgaaggagaccgcgcgggcgctgcgggtccggcggcgtcggcgcggtcctagcgcccgccgtagcggagccgctgctgcttccccctccttaatcatgtccatctttccccgctctcaactggagcaaacttctattccagacttcagatttccattttcactaggtttttccctgagggcatcttattacccacctcttttttttttttttttaaggaagttccacacacactccaaagccgatttcaaattcagaacctgaatgccatgatgtaccatgtagtttggggaatgcaaattgttctctccctgttttcatttcgggaccagaaaaaaaaacaactctgcataaaaatctataaagtactgaatccgcattactgctgaaaatccttttgccagctaattgtgagagtttacacaagtctctgatttcagaagagactgttaaaaccaaaacaatgatgggcagctcttttaagtgtaggtgtgaaggtcccattttcaatggaatttccaactgttatcactgggattgactttactttttaaacacataatgtgtactgtgtggcattgtaatttagatataacacacttaagttttgctttttaaatctctctgtggagaaaggttgttgttaatcctttccagaatgatctattctgagctttcctggagttaggcccttctagggagagaatttttttattgtcatcaggaaacgaaacctttgtgctctgcagcctttttcttctgaaaggctaagtggggctaaaattatccttttagttttctgctttaacaagaagagaaggacttggtgtgaaagaatttcttctctcagtccaatggtataatttttagcactccgcttcctctgtagggtttagccctacagtttgaacaattattttaatccagctaagatgtggccaacactgtgaaatacaggagatgttaaggttttgctgacttttagattaaaatcttaaaatttcacattatattttaattacttgaaaagtttaattacctagtaaagattgtttctaatagatgagaacataaatttaatagttttcatccttttttaaagtgtgtgcaacaattaatatgcctgccttatttgaggacatgataaaatgtacccaaaatgacttcgaactgtctaatgcctcagaaaagtaacttaaaatcaaccacttcgtgcttaaatgtttttatattatgaaccgatttcaacaagttttaaagctgttaatatctcattgctgtgtttgacatacaagtacattcattggttctatagtcttaatgatgacaaattaaagatgttttttcagtgctcaggtatgcatatattttcgtgttacttaagcaaaatcaactatataggaggaaaaatcaaaatggcattttattcagctaccagatggcttaaaatgagtaaaccccaacaacatcaagcacatttgtctgtgatattgaccctttttatccaatcattactattttagaagtagtggtgaactgtgtaaaataatggtatcttcagcagtgttccggaatcttagttgagggacaaacattccttccagtgagagattcaagaattgatgtgaattgaatatatttttcaaggtattataaattgtgttgtgttttcagtataagaaaatgttgacaggaaacaattttatagcatttataaaaaaccaacacttgtgcaatgctaaattggcgaagcttctgcacctgaattagagcacaataaatatgctgtttataaaccaaatcactgctattccttctctgaaatcatctctcctctttttaaacctttacttatagctagaataaatcactatttaattgcctctaatactttaaaactactggatggttaggcctggtttaactatttatggagagctatttgcaaacttaagttgtgtaaatgtaatttctacttgtgaatctgagctgtagcagcccagagggagctaggcaaactattccagaccaccaactgataagtgatcagattctttgtaatgtaggattttttaacctgttgattatgggtttgttgatataaatgtaataatgttcacctcgattttcctggagtaacaaccagcgttggtagtagcccacctgcatgaggacggccagtgttaacaatatttttgttctgatcttcttccccatttttgtttcctcaaacaggtttttaggagagtggagatttaaagtcaggatgtggcctttttattttaattatatacttaattcttagaacaagtagaatgggaaaggagtgactgataaatctaagattcaaaatagtcccgtcgaaacttaaaggccagattattgctttggagctttctataggtactagccatcccgtcgttaaatgttttcatggatatttgaaaagaagaccatgtacctttaataactgttcttttctcgagtttctgcctcgtgctttgacctggattgcattattattgtttatgcgaagtaaaaaaaaaaaaggaaagcacaagcttttcctgtatattatatttccatttccattttaaaataaaaacaattttcccaacaacagcggtgttattattcttgctcagaagaattcttgcttattcaccaattgcatagagattttttaaagcaaaaacataaaaggaaggatgagacagcatccgtcaatattttaaaccttctggctactttttatttctgttagtattgctgtaaggtaatatcctaactttagttgagtcactatttggcttgcaccttttacaaagctaacatttctaagacagttgtttttaatatctaaaatatctccttagcaaggaaatctgaacaacctatcaattaaattgttgttttataaaatacacttgaatatgccataaataaatgtgttttccaagaggagtctggtgagtttaagttgcctccaagtacatgtatataggttcttgatgtactgtgttcgatctgaaaataacttacatttcttttacagctttcttaaaacctttagccccttttagagatatgctaactgtattatccgtgctaataagttagattttgtttgtttctctggattatctgcggttcaatccaaacacgtgtgtctcttgttataatcatattttttactgtaaactgacaggttcctgttggtgtctgtaatcctaattcatttaagaaagagtactactacagaaagtgtaaaaatttctcaaaaactttccacatgcctctgtggagaaaaaaaaatgtctttaaatgtgagacactctcatctttgaaatatgggtggcaaaaagggggatgatggtggtggttattttattattacttattagtggccataataatataaaataaaagactccaggaggtactccctttcaaaaatt

SEQ ID NO: 59467 - DNA, 3171 bp, Homo sapiens
ttccattggcccggagaggcggaggcctcgggcggccagccgcgcctcggacgaccccgggacagatccgggccgcgtccccgcgttgggagagggatggggactgaggccggagacgcctagacgccgcggatagcgaagtctgagttcctctgagccagggggcaccgaccgtcacgagctaacttcctggaagagctttccgtctattttcaaattctttaccgaagcctcagaggccaagaccagctccctgaagccggctgtgacgcgccgctcccaccgcatcaagcacgaagagctgtaagaggagcgagcgcgacgggggaggccgccctggcgcacccacccgcacgcctcctcactgcttgtgtcgagcggactcccagcccctcattagattgttttcttcccagagcccagggtcgtgatatatacatctaaatagcgttttgcattatttctagatgagtgcaactgtcaaagcaatatgggttcactggtcgtgcttcctgcgggctgagcgcgggctgagcgctgccagtcagcgctcacattaaggctgacagcgccctgcctggctcggccggcgaagctctaattgccctgaaggagaccgcgcgggcgctgcgggtccggcggcgtcggcgcggtcctagcgcccgccgtagcggagccgctgctgcttccccctccttaatcatgtccatctttccccgctctcaactggagcaaacttctattccagacttcagatttccattttcactaggtttttccctgagggcatcttattacccacctcttttttttttttttttaaggaagttccacacacactccaaagccgatttcaaattcagaacctgaatgccatgatgtaccatgtagtttggggaatgcaaattgttctctccctgttttcatttcgggaccagaaaaaaaaacaactctgcataaaaatctataaagtactgaatccgcattactgctgaaaatccttttgccagctaattgtgagagtttacacaagtctctgatttcagaagagactgttaaaaccaaaacaatgatgggcagctcttttaagtgtaggtgtgaaggtcccattttcaatggaatttccaactgttatcactgggattgactttactttttaaacacataatgtgtactgtgtggcattgtaatttagatataacacacttaagttttgctttttaaatctctctgtggagaaaggttgttgttaatcctttccagaatgatctattctgagctttcctggagttaggcccttctagggagagaatttttttattgtcatcaggaaacgaaacctttgtgctctgcagcctttttcttctgaaaggctaagtggggctaaaattatccttttagttttctgctttaacaagaagagaaggacttggtgtgaaagaatttcttctctcagtccaatggtataatttttagcactccgcttcctctgtagggtttagccctacagtttgaacaattattttaatccagctaagatgtggccaacactgtgaaatacaggagatgttaaggttttgctgacttttagattaaaatcttaaaatttcacattatattttaattacttgaaaagtttaattacctagtaaagattgtttctaatagatgagaacataaatttaatagttttcatccttttttaaagtgtgtgcaacaattaatatgcctgccttatttgaggacatgataaaatgtacccaaaatgacttcgaactgtctaatgcctcagaaaagtaacttaaaatcaaccacttcgtgcttaaatgtttttatattatgaaccgatttcaacaagttttaaagctgttaatatctcattgctgtgtttgacatacaagtacattcattggttctatagtcttaatgatgacaaattaaagatgttttttcagtgctcaggtatgcatatattttcgtgttacttaagcaaaatcaactatataggaggaaaaatcaaaatggcattttattcagctaccagatggcttaaaatgagtaaaccccaacaacatcaagcacatttgtctgtgatattgaccctttttatccaatcattactattttagaagtagtggtgaactgtgtaaaataatggtatcttcagcagtgttccggaatcttagttgagggacaaacattccttccagtgagagattcaagaattgatgtgaattgaatatatttttcaaggtattataaattgtgttgtgttttcagtataagaaaatgttgacaggaaacaattttatagcatttataaaaaaccaacacttgtgcaatgctaaattggcgaagcttctgcacctgaattagagcacaataaatatgctgtttataaaccaaatcactgctattccttctctgaaatcatctctcctctttttaaacctttacttatagctagaataaatcactatttaattgcctctaatactttaattaagttgtgtaaatgtaatttctacttgtgaatctgagctgtagcagcccagagggagctaggcaaactattccagaccaccaactgataagtgatcagattctttgtaatgtaggattttttaacctgttgattatgggtttgttgatataaatgtaataatgttcacctcgattttcctggagtaacaaccagcgttggtagtagcccacctgcatgaggacggccagtgttaacaatatttttgttctgatcttcttccccatttttgtttcctcaaacaggtttttaggagagtggagatttaaagtcaggatgtggcctttttattttaattatatacttaattcttagaacaagtagaatgggaaaggagtgactgataaatctaagattcaaaatagtcccgtcgaaacttaaaggccagattattgctttggagctttctataggtactagccatcccgtcgttaaatgttttcatggatatttgaaaagaagaccatgtacctttaataactgttcttttctcgagtttctgcctcgtgctttgacctggattgcattattattgtttatgcgaagtaaaaaaaaaaaaggaaagcacaagcttttcctgtatattatatttccatttccattttaaaataaaaacaattttcccaaca

SEQ ID NO: 59468 - DNA, 1960 bp, Homo sapiens
ttccattggcccggagaggcggaggcctcgggcggccagccgcgcctcggacgaccccgggacagatccgggccgcgtccccgcgttgggagagggatggggactgaggccggagacgcctagacgccgcggatagcgaagtctgagttcctctgagccagggggcaccgaccgtcacgagctaacttcctggaagagctttccgtctattttcaaattctttaccgaagcctcagaggccaagaccagctccctgaagccggctgtgacgcgccgctcccaccgcatcaagcacgaagagctgtaagaggagcgagcgcgacgggggaggccgccctggcgcacccacccgcacgcctcctcactgcttgtgtcgagcggactcccagcccctcattagattgttttcttcccagagcccagggtcgtgatatatacatctaaatagcgttttgcattatttctagatgagtgcaactgtcaaagcaatatgggttcactggtcgtgcttcctgcgggctgagcgcgggctgagcgctgccagtcagcgctcacattaaggctgacagcgccctgcctggctcggccggcgaagctctaattgccctgaaggagaccgcgcgggcgctgcgggtccggcggcgtcggcgcggtcctagcgcccgccgtagcggagccgctgctgcttccccctccttaatcatgtccatctttccccgctctcaactggagcaaacttctattccagacttcagatttccattttcactaggtttttccctgagggcatcttattacccacctcttttttttttttttttaaggaagttccacacacactccaaagccgatttcaaattcagaacctgaatgccatgatgtaccatgtagtttggggaatgcaaattgttctctccctgttttcatttcgggaccagaaaaaaaaacaactctgcataaaaatctataaagtactgaatccgcattactgctgaaaatccttttgccagctaattgtgagagtttacacaagtctctgatttcagaagagactgttaaaaccaaaacaatgatgggcagctcttttaagtgtaggtgtgaaggtcccattttcaatggaatttccaactgttatcactgggattgactttactttttaaacacataatgtgtactgtgtggcattgtaatttagatataacacacttaagttttgctttttaaatctctctgtggagaaaggttgttgttaatcctttccagaatgatctattctgagctttcctggagttaggcccttctagggagagaatttttttattgtcatcaggaaacgaaacctttgtgctctgcagcctttttcttctgaaaggctaagtggggctaaaattatccttttagttttctgctttaacaagaagagaaggacttggtgtgaaagaatttcttctctcagtccaatggtataatttttagcactccgcttcctctgtagggtttagccctacagtttgaacaattattttaatccagctaagatgtggccaacactgtgaaatacaggagatgttaaggttttgctgacttttagattaaaatcttaaaatttcacattatattttaattacttgaaaagtttaattacctagtaaagattgtttctaatagatgagaacataaatttaatagttttcatccttttttaaagtgtgtgcaacaattaatatgcctgccttatttgaggacatgataaaatgtacccaaaatgacttcgaactgtctaatgcctcagaaaagtaacttaaaatcaaccacttcgtgcttaaatgtttttatattatgaaccgatttcaacaagttttaaagctgttaatatctcattgctgtgtttgacatacaagtacattcattggttctatagtcttaatgatgacaaattaaagatgttttttcagtgctc

SEQ ID NO: 59469 - DNA, 2405 bp, Homo sapiens
ttccattggcccggagaggcggaggcctcgggcggccagccgcgcctcggacgaccccgggacagatccgggccgcgtccccgcgttgggagagggatggggactgaggccggagacgcctagacgccgcggatagcgaagtctgagttcctctgagccagggggcaccgaccgtcacgagctaacttcctggaagagctttccgtctattttcaaattctttaccgaagcctcagaggccaagaccagctccctgaagccggctgtgacgcgccgctcccaccgcatcaagcacgaagagctgtaagaggagcgagcgcgacgggggaggccgccctggcgcacccacccgcacgcctcctcactgcttgtgtcgagcggactcccagcccctcattagattgttttcttcccagagcccagggtcgtgatatatacatctaaatagcgttttgcattatttctagatgagtgcaactgtcaaagcaatatgggttcactggtcgtgcttcctgcgggctgagcgcgggctgagcgctgccagtcagcgctcacattaaggctgacagcgccctgcctggctcggccggcgaagctctaattgccctgaaggagaccgcgcgggcgctgcgggtccggcggcgtcggcgcggtcctagcgcccgccgtagcggagccgctgctgcttccccctccttaatcatgtccatctttccccgctctcaactggagcaaacttctattccagacttcagatttccattttcactaggtttttccctgagggcatcttattacccacctcttttttttttttttttaaggaagttccacacacactccaaagccgatttcaaattcagaacctgaatgccatgatgtaccatgtagtttggggaatgcaaattgttctctccctgttttcatttcgggaccagaaaaaaaaacaactctgcataaaaatctataaagtactgaatccgcattactgctgaaaatccttttgccagctaattgtgagagtttacacaagtctctgatttcagaagagactgttaaaaccaaaacaatgatgggcagctcttttaagtgtaggtgtgaaggtcccattttcaatggaatttccaactgttatcactgggattgactttactttttaaacacataatgtgtactgtgtggcattgtaatttagatataacacacttaagttttgctttttaaatctctctgtggagaaaggttgttgttaatcctttccagaatgatctattctgagctttcctggagttaggcccttctagggagagaatttttttattgtcatcaggaaacgaaacctttgtgctctgcagcctttttcttctgaaaggctaagtggggctaaaattatccttttagttttctgctttaacaagaagagaaggacttggtgtgaaagaatttcttctctcagtccaatggtataatttttagcactccgcttcctctgtagggtttagccctacagtttgaacaattattttaatccagctaagatgtggccaacactgtgaaatacaggagatgttaaggttttgctgacttttagattaaaatcttaaaatttcacattatattttaattacttgaaaagtttaattacctagtaaagattgtttctaatagatgagaacataaatttaatagttttcatccttttttaaagtgtgtgcaacaattaatatgcctgccttatttgaggacatgataaaatgtacccaaaatgacttcgaactgtctaatgcctcagaaaagtaacttaaaatcaaccacttcgtgcttaaatgtttttatattatgaaccgatttcaacaagttttaaagctgttaatatctcattgctgtgtttgacatacaagtacattcattggttctatagtcttaatgatgacaaattaaagatgttttttcagtgctcaggtatgcatatattttcgtgttacttaagcaaaatcaactatataggaggaaaaatcaaaatggcattttattcagctaccagatggcttaaaatgagtaaaccccaacaacatcaagcacatttgtctgtgatattgaccctttttatccaatcattactattttagaagtagtggtgaactgtgtaaaataatggtatcttcagcagtgttccggaatcttagttgagggacaaacattccttccagtgagagattcaagaattgatgtgaattgaatatatttttcaaggtattataaattgtgttgtgttttcagtataagaaaatgttgacaggaaacaattttatagcatttataaaaaaccaacacttgtgcaatgctaaattggcgaagcttctgcacctgaattagagcacaataaatatgctgtttataaacca

SEQ ID NO: 59470 - DNA, 3313 bp, Homo sapiens
  misc_feature (1505)..(1505): n is a, c, g, or t
  misc_feature (1533)..(1533): n is a, c, g, or t
ccagggccggtgtctccaggagagggccgagcgcacagcagctctaggacctcgcaggcgcctcggcgcggcactcacgtagagcccaaggagcagtccccgacctctcctcggagggccgtgcaggcttccccggcggtccctacctgcgcctccgcccgccagcggcgctggggaaggggaggagcggcccggacgctgcccgccgcgcgcagggagccgcccgccgcaggccttgccgccgcccgcccgcgctctccccgcgagccccggagggcgggtctgcggccgagccagcggcggcggaggggcagcgcagacctctgcggcccgggcgggcgcggcgcgggagtcctgggccgctggcgggcaacgcctctgcccgacctcgctggggaaggctggcgctgctgcccggccggagccaggggcaggctgcgcaaaggtgacttagggagaccttgcgggccgccctgggtcgcgcctcccggatcggctcgcctcggctcgactggaggggaggaggaggagcaggccgagcgcattcgcgctggagcttgcgaggagcgcagggtggagcgcgccagccggggtcctcggatctggcccaggtgaggaattttaaattggaacaagagcaagaaaaaaacaaaatcttgtcagaagcactggagacgctggccactgaacatcatgaattagagcagtctctggtgaaaggctctccacccgccagcatccttagcgaggacgagttctatgatgcgctgtcagattccgagtccgaaaggtccctgagtagattggaagcagtgacagcacgctcctttgaagaggaaggagagcatttgggcagtagaaaacacagaatgtccgaagaaaaagactgtggtggcggagatgctctctccaatggcatcaagaaacacagaacaagtttgccttctcctatgttttccagaaatgacttcagtatctggagcatcctcagaaaatgtattggaatggaactatccaagatcacgatgccagttatatttaatgagcctctgagcttcctacagcgcctaactgaatacatggagcatacttacctcatccacaaggccagttcactctctgatcctgtggaaaggatgcagtgtgtagctgcgtttgctgtatctgctgttgcttctcagtgggaacggactggaaaacctttcaacccactgctgggagagacttatgaattagtgcgagatgaccttggatttagactcatctccgaacaggtcagccatcacccaccaatcagtgcatttcatgctgaaggattaaacaatgacttcatctttcatggctctatctatcccaaactgaaattctgggggaagagtgtagaagcagaacccaaaggaaccatcaccttggagctccttgaacacaatgaggcatatacatggacaaatcccacctgctgtgtgcataatatcattgtgggtaaactgtggatcgaacagtanggcaatgtggaaattataaaccacaagnctggggacaaatgtgtgttgaattttaagccatgtggcctttttggtaaggaattacacaaagttgaaggctacattcaagataaaagcaaaaagaagctctgtgccctctatgggaagtggactgaatgtttatacagtgttgaccctgccacgtttgacgcttacaaaaaaaatgataagaaaaatacagaagagaagaagaacagcaaacagatgagcacctctgaggagttggatgaaatgccagtgccggattctgaaagtgtattcattatccctggaagcgttcttctatggcgaatagccccacggcctccaaattctgcccagatgtataattttactagttttgcaatggttttgaatgaagtagacaaagacatggagagtgtgattcccaagacagactgcaggttacggcctgacatcagagccatggaaaatggagagatagatcaagctagtgaagaaaaaaaacgacttgaggaaaaacaaagagcagcccgcaaaaacaggtccaagtcagaagaggactggaagacgaggtggttccatcaaggtcctaatccctacaatggagcacaggactggatttactctggcagctactgggacagaaattacttcaatttgcctgacatttattaaaatgcatacaagtcagggtgtttggctaatctacaaataagtcttaaacctatgtttttaaatttttttcccttggtttctacttatcttttaaaaaaaaaaatgaaaaaacactcatgagataactgcatttcacccaacaaaagcagggtataaggcgatattggtgatgaaagtcttaggaaaaatgcataattttgctataaaatgtacttatttggaatactattttatatagaggtaagagaacactgctggggaatatgctttttatggttgctgttgccatatttactgaaggtttatacctaaatgtaactttagctttatggaactatatagtaatcccaaatcaagttattttgaatatttttatgctgtcatgcttgaatgttttagatgtaacctttgacatatttagaactctcctcctatacaatgtttattctcagatatagaggttatgtcattttataaagacttcattgataagatggcttttattcatactaatcctcccaatgttaccccttccatcttccaagaagaaaaaaaatgcctgaatattcagaatagatatttctgatttgaaaattctaaagaattaaactggaaaagtatttcatttacttagtgctctgaatttacttttacagttttctgcagtcagtatcattaaaatggttaagtttacatttgaactgaaaatatgtataaaatctagcaattcacaaaaatgccctagaaatatagattttaatcaccattacataatgacaaaccttgttaaatgcttccacttccagtggcaaatgccactagggaaagtaagttgcactcatgtaagtatcaaactatataaaaggaggccttgtgcatttcaagtttgcaaagtacctgtgtacttaaaatatgtgtggagacctactgtacagtagttttgcccctttaattggggcacattcatcttaaatcttatagtatttatccacccaaaccccagactgagatactgctcccaggggcctaggtagctgccagtccgtgattttaattgctgtcttgaagttaacaagtgttataatgaaataatctacctgatgctaaataaaggctttagaatgttcccc

SEQ ID NO: 59471 - DNA, 331 bp, Homo sapiens
tttatttttttctttatagaaatgcttccatcatttcttcagaaagttgaagttgtctcagaagcttctagagaaacttgtgtagctttgactgattgccttaatctcttcaccaaacaagaaggggtgaggaattttaaattggaacaagagcaagaaaaaaacaaaatcttgtcagaagcactggagacgctggccactgaacatcatgaattagagcagtctctggtgaaaggctctccacccgccagcatccttagcgaggacgagttctatgatgcgctgtcaggtaactctgggatccttccctctgcattgttggtgatttaga

SEQ ID NO: 59472 - DNA, 3340 bp, Homo sapiens
  misc_feature (1532)..(1532): n is a, c, g, or t
  misc_feature (1560)..(1560): n is a, c, g, or t
agagataaggtaaagcatcattaatgaatggagaagtcttctgaagtgacaccagtgccttatccctagaggaatatcagcatagaaagcacagtcatgccaacagcgactagatagggaaatttccaactttctcaaaatgattaaggagtgtgacatggctaaagttctcaagagttgactataaatagcctacaaggctgggcgctgtggctcacacctgtaatcctggcactttgggaggccgaggcggtggatcacctgaggtcaggagttcaagaccagcacggtcaacatggtgaaaccccgtttctactaaagatacaaaaattagctgggcgtggtggcacgtgcctgtaaccatctactcaagaggctgaggcaggagagttgcttgaacccggaaggcggatattgcagtgacccaagatcgcgccactgcactccagcctgggcaacagagggagactctgtctcaaaaaaaagaaaaataaatagcctacaaatcaaacttaagtattgagaaataagaaatgcttccatcatttcttcagaaagttgaagttgtctcagaagcttctagagaaacttgtgtagctttgactgattgccttaatctcttcaccaaacaagaaggggtgaggaattttaaattggaacaagagcaagaaaaaaacaaaatcttgtcagaagcactggagacgctggccactgaacatcatgaattagagcagtctctggtgaaaggctctccacccgccagcatccttagcgaggacgagttctatgatgcgctgtcagattccgagtccgaaaggtccctgagtagattggaagcagtgacagcacgctcctttgaagaggaaggagagcatttgggcagtagaaaacacagaatgtccgaagaaaaagactgtggtggcggagatgctctctccaatggcatcaagaaacacagaacaagtttgccttctcctatgttttccagaaatgacttcagtatctggagcatcctcagaaaatgtattggaatggaactatccaagatcacgatgccagttatatttaatgagcctctgagcttcctacagcgcctaactgaatacatggagcatacttacctcatccacaaggccagttcactctctgatcctgtggaaaggatgcagtgtgtagctgcgtttgctgtatctgctgttgcttctcagtgggaacggactggaaaacctttcaacccactgctgggagagacttatgaattagtgcgagatgaccttggatttagactcatctccgaacaggtcagccatcacccaccaatcagtgcatttcatgctgaaggattaaacaatgacttcatctttcatggctctatctatcccaaactgaaattctgggggaagagtgtagaagcagaacccaaaggaaccatcaccttggagctccttgaacacaatgaggcatatacatggacaaatcccacctgctgtgtgcataatatcattgtgggtaaactgtggatcgaacagtanggcaatgtggaaattataaaccacaagnctggggacaaatgtgtgttgaattttaagccatgtggcctttttggtaaggaattacacaaagttgaaggctacattcaagataaaagcaaaaagaagctctgtgccctctatgggaagtggactgaatgtttatacagtgttgaccctgccacgtttgacgcttacaaaaaaaatgataagaaaaatacagaagagaagaagaacagcaaacagatgagcacctctgaggagttggatgaaatgccagtgccggattctgaaagtgtattcattatccctggaagcgttcttctatggcgaatagccccacggcctccaaattctgcccagatgtataattttactagttttgcaatggttttgaatgaagtagacaaagacatggagagtgtgattcccaagacagactgcaggttacggcctgacatcagagccatggaaaatggagagatagatcaagctagtgaagaaaaaaaacgacttgaggaaaaacaaagagcagcccgcaaaaacaggtccaagtcagaagaggactggaagacgaggtggttccatcaaggtcctaatccctacaatggagcacaggactggatttactctggcagctactgggacagaaattacttcaatttgcctgacatttattaaaatgcatacaagtcagggtgtttggctaatctacaaataagtcttaaacctatgtttttaaatttttttcccttggtttctacttatcttttaaaaaaaaaaatgaaaaaacactcatgagataactgcatttcacccaacaaaagcagggtataaggcgatattggtgatgaaagtcttaggaaaaatgcataattttgctataaaatgtacttatttggaatactattttatatagaggtaagagaacactgctggggaatatgctttttatggttgctgttgccatatttactgaaggtttatacctaaatgtaactttagctttatggaactatatagtaatcccaaatcaagttattttgaatatttttatgctgtcatgcttgaatgttttagatgtaacctttgacatatttagaactctcctcctatacaatgtttattctcagatatagaggttatgtcattttataaagacttcattgataagatggcttttattcatactaatcctcccaatgttaccccttccatcttccaagaagaaaaaaaatgcctgaatattcagaatagatatttctgatttgaaaattctaaagaattaaactggaaaagtatttcatttacttagtgctctgaatttacttttacagttttctgcagtcagtatcattaaaatggttaagtttacatttgaactgaaaatatgtataaaatctagcaattcacaaaaatgccctagaaatatagattttaatcaccattacataatgacaaaccttgttaaatgcttccacttccagtggcaaatgccactagggaaagtaagttgcactcatgtaagtatcaaactatataaaaggaggccttgtgcatttcaagtttgcaaagtacctgtgtacttaaaatatgtgtggagacctactgtacagtagttttgcccctttaattggggcacattcatcttaaatcttatagtatttatccacccaaaccccagactgagatactgctcccaggggcctaggtagctgccagtccgtgattttaattgctgtcttgaagttaacaagtgttataatgaaataatctacctgatgctaaataaaggctttagaatgttcccc

SEQ ID NO: 59473 - DNA, 3459 bp, Homo sapiens
  misc_feature (1651)..(1651): n is a, c, g, or t
  misc_feature (1679)..(1679): n is a, c, g, or t
aggaaatacacccttgcattgtgcagcttaccgggcccataaacaatgtgccttaaagcttctaagaagtggagcagaccctaatctgaagaacaaaaatgatcagaaacctcttgaccttgcccagggtgctgaaatgaaacacattcttgttggtaataaggtcatctacaaagcattgaaacgatatgagggccctctctggaagagttcaagattttttggctggagattattctgggtagtgttagagcatggagtcctttcatggtataggaaacagcctgatgcagttcataatatttatcgccagggatgcaaacacctgactcaagcagtatgcacggtaaaatccactgatagctgcctcttctttattaaatgctttgatgacaccattcatggcttccgggttcctaagaatagccttcagcagtcaagagaggactggctggaagcaatagaagaacattctgcttacagcactcactactgttcccaggaccagctgactgatgaggaggaggaagatacggtttctgctgcagacctgaagaaatcattagagaaagcacagtcatgccaacagcgactagatagggaaatttccaactttctcaaaatgattaaggagtgtgacatggctaaagaaatgcttccatcatttcttcagaaagttgaagttgtctcagaagcttctagagaaacttgtgtagctttgactgattgccttaatctcttcaccaaacaagaaggggtgaggaattttaaattggaacaagagcaagaaaaaaacaaaatcttgtcagaagcactggagacgctggccactgaacatcatgaattagagcagtctctggtgaaaggctctccacccgccagcatccttagcgaggacgagttctatgatgcgctgtcagattccgagtccgaaaggtccctgagtagattggaagcagtgacagcacgctcctttgaagaggaaggagagcatttgggcagtagaaaacacagaatgtccgaagaaaaagactgtggtggcggagatgctctctccaatggcatcaagaaacacagaacaagtttgccttctcctatgttttccagaaatgacttcagtatctggagcatcctcagaaaatgtattggaatggaactatccaagatcacgatgccagttatatttaatgagcctctgagcttcctacagcgcctaactgaatacatggagcatacttacctcatccacaaggccagttcactctctgatcctgtggaaaggatgcagtgtgtagctgcgtttgctgtatctgctgttgcttctcagtgggaacggactggaaaacctttcaacccactgctgggagagacttatgaattagtgcgagatgaccttggatttagactcatctccgaacaggtcagccatcacccaccaatcagtgcatttcatgctgaaggattaaacaatgacttcatctttcatggctctatctatcccaaactgaaattctgggggaagagtgtagaagcagaacccaaaggaaccatcaccttggagctccttgaacacaatgaggcatatacatggacaaatcccacctgctgtgtgcataatatcattgtgggtaaactgtggatcgaacagtanggcaatgtggaaattataaaccacaagnctggggacaaatgtgtgttgaattttaagccatgtggcctttttggtaaggaattacacaaagttgaaggctacattcaagataaaagcaaaaagaagctctgtgccctctatgggaagtggactgaatgtttatacagtgttgaccctgccacgtttgacgcttacaaaaaaaatgataagaaaaatacagaagagaagaagaacagcaaacagatgagcacctctgaggagttggatgaaatgccagtgccggattctgaaagtgtattcattatccctggaagcgttcttctatggcgaatagccccacggcctccaaattctgcccagatgtataattttactagttttgcaatggttttgaatgaagtagacaaagacatggagagtgtgattcccaagacagactgcaggttacggcctgacatcagagccatggaaaatggagagatagatcaagctagtgaagaaaaaaaacgacttgaggaaaaacaaagagcagcccgcaaaaacaggtccaagtcagaagaggactggaagacgaggtggttccatcaaggtcctaatccctacaatggagcacaggactggatttactctggcagctactgggacagaaattacttcaatttgcctgacatttattaaaatgcatacaagtcagggtgtttggctaatctacaaataagtcttaaacctatgtttttaaatttttttcccttggtttctacttatcttttaaaaaaaaaaatgaaaaaacactcatgagataactgcatttcacccaacaaaagcagggtataaggcgatattggtgatgaaagtcttaggaaaaatgcataattttgctataaaatgtacttatttggaatactattttatatagaggtaagagaacactgctggggaatatgctttttatggttgctgttgccatatttactgaaggtttatacctaaatgtaactttagctttatggaactatatagtaatcccaaatcaagttattttgaatatttttatgctgtcatgcttgaatgttttagatgtaacctttgacatatttagaactctcctcctatacaatgtttattctcagatatagaggttatgtcattttataaagacttcattgataagatggcttttattcatactaatcctcccaatgttaccccttccatcttccaagaagaaaaaaaatgcctgaatattcagaatagatatttctgatttgaaaattctaaagaattaaactggaaaagtatttcatttacttagtgctctgaatttacttttacagttttctgcagtcagtatcattaaaatggttaagtttacatttgaactgaaaatatgtataaaatctagcaattcacaaaaatgccctagaaatatagattttaatcaccattacataatgacaaaccttgttaaatgcttccacttccagtggcaaatgccactagggaaagtaagttgcactcatgtaagtatcaaactatataaaaggaggccttgtgcatttcaagtttgcaaagtacctgtgtacttaaaatatgtgtggagacctactgtacagtagttttgcccctttaattggggcacattcatcttaaatcttatagtatttatccacccaaaccccagactgagatactgctcccaggggcctaggtagctgccagtccgtgattttaattgctgtcttgaagttaacaagtgttataatgaaataatctacctgatgctaaataaaggctttagaatgttcccc

SEQ ID NO: 59474 - DNA, 614 bp, Homo sapiens
ggacctgggaaggagcataggacagggcaaggcgggataaggaggggcaccacagcccttaaggcacgagggaacctcactgcgcatgctcctttggtgcccacctcagtgcgcatgttcactgggcgtcttcccatcggccccttcgccagtgtggggaacgcggcggagctgtgagccggcgactcgggtccctgaggtctggattctttctccgctactgagacacggcggacacacacaaacacagaaccacacagccagtcccaggagcccagtaatggagagccccaaaaagaagaaccagcagctgaaagtcgggatcctacacctgggcagcagacagaagaagatcaggatacagctgagatcccagtgcgcgacatggaaggtgatctgcaagagctgcatcagtcaaacaccggggataaatctggatttgggttccggcgtcaaggtgaagataatacctaaagaggaacactgtaaaatgccagaagcaggtgaagagcaaccacaagtttaaatgaagacaagctgaaacaacgcaagctggttttatattagatatttgacttaaactatctcaataaagttttgcagctttcaccaaa

SEQ ID NO: 59475 - DNA, 648 bp, Homo sapiens
  misc_feature (632)..(632): n is a, c, g, or t
ggacctgggaaggagcataggacagggcaaggcgggataaggaggggcaccacagcccttaaggcacgagggaacctcactgcgcatgctcctttggtgcccacctcagtgcgcatgttcactgggcgtcttcccatcggccccttcgccagtgtggggaacgcggcggagctgtgagccggcgactcgggtccctgaggtctggattctttctccgctactgagacacggcggacacacacaaacacagaaccacacagccagtcccaggagcccagtaatggagagccccaaaaagaagaaccagcagctgaaagtcgggatcctacacctgggcagcagacagaagaagatcaggatacagctgagatcccagtgcgcgacatggaaggtgatctgcaagagctgcatcagtcaaacaccggggataaatctggatttgggttccggcgtcaaggtgaagataatacctaaagaggaacactgtaaaatgccagaagcaggtgaagagcaaccacaagtttaaatgaagacaagctgaaacaacgcaagctggttttatattagatatttgacttaaactatctcaataaagttttgcagctttcaccaaaaaaaagtcgaccggccgngaatttagtagtagta

SEQ ID NO: 59476 - DNA, 934 bp, Homo sapiens
ggacctgggaaggagcataggacagggcaaggcgggataaggaggggcaccacagcccttaaggcacgagggaacctcactgcgcatgctcctttggtgcccacctcagtgcgcatgttcactgggcgtcttcccatcggccccttcgccagtgtggggaacgcggcggagctgtgagccggcgactcgggtccctgaggtctggattctttctccgctactgagacacggcgggtaggtccacaggcagatccaactgggagttgaagtgtgagtgagagtgaagaggaaccagcaggcttccggagggttgtgtggtcagtgactcagagtgagaaggccctcgaagtcgtcgtccctctcatgcggtgccacgcccatggaccttcttgtctcgtcacggccataactagggaggaaggagggccgaggagtggaggggctcaggcgaagctggggtgctgttgggggtatccgagtcccagaagcacctggaaccccgacagaagattctggactccccagacgggaccaggagagggacggcatgagcgacacacacaaacacagaaccacacagccagtcccaggagcccagtaatggagagccccaaaaagaagaaccagcagctgaaagtcgggatcctacacctgggcagcagacagaagaagatcaggatacagctgagatcccagtgcgcgacatggaaggtgatctgcaagagctgcatcagtcaaacaccggggataaatctggatttgggttccggcgtcaaggtgaagataatacctaaagaggaacactgtaaaatgccagaagcaggtgaagagcaaccacaagtttaaatgaagacaagctgaaacaacgcaagctggttttatattagatatttgacttaaactatctcaataaagttttgcagctttcaccaaa

SEQ ID NO: 59477 - DNA, 476 bp, Homo sapiens
cctagactaaccacgtttgtgttggtcctccgctgagctgttaatccagggaagagttgcccttctgaagaatatgtggatttaatggagaccaagacacacacaaacacagaaccacacagccagtcccaggagcccagtaatggagagccccaaaaagaagaaccagcagctgaaagtcgggatcctacacctgggcagcagacagaagaagatcaggatacagctgagatcccagtgcgcgacatggaaggtgatctgcaagagctgcatcagtcaaacaccggggataaatctggatttgggttccggcgtcaaggtgaagataatacctaaagaggaacactgtaaaatgccagaagcaggtgaagagcaaccacaagtttaaatgaagacaagctgaaacaacgcaagctggttttatattagatatttgacttaaactatctcaataaagttttgcagctttcaccaaa

SEQ ID NO: 59478 - DNA, 1379 bp, Homo sapiens
  misc_feature (1081)..(1081): n is a, c, g, or t
  misc_feature (1379)..(1379): n is a, c, g, or t
ggacctgggaaggagcataggacagggcaaggcgggataaggaggggcaccacagcccttaaggcacgagggaacctcactgcgcatgctcctttggtgcccacctcagtgcgcatgttcactgggcgtcttcccatcggccccttcgccagtgtggggaacgcggcggagctgtgagccggcgactcgggtccctgaggtctggattctttctccgctactgagacacggcggacacacacaaacacagaaccacacagccagtcccaggagcccagtaatggagagccccaaaaagaagaaccagcagctgaaagtcgggatcctacacctgggcagcagacagaagaagatcaggatacagctgagatcccagtgcgcgacatggaaggtgatctgcaagagctgcatcagtcaaacaccggggataaatctggatttgggttccggcgtcaaggtgaagataatacctaaagaggaacactgtaaaatgccagaagcaggtgaagagcaaccacaagtttaaatgaagacaagctgaaacaacgcaagctggttttatattagatatttgacttaaactatctcaataaagttttgcagctttcaccaaaaaaaaaaaaaaaaaaaaaaaaaaaaagaaaaaaaaaaaaaaaaaaaaaaaacaaaagaaaaaaaaaagcgggggggcggacccaaaaaaaaagcccggagggagggaacaaggacatgagagcccacaccatgtgtggtacaagagaagcggcaccaaaaaggagaaccatactaaaacacacagcgcggcgcgcaagaaaaaaaaacaacgacaagagagaaggaaaaaagatcaagcaggagacaatctaggaagaaagaaccccccacaaacgaggggggggaaacacacagagggcgaaaaccacaacaagagaaaaaagcacgccgagagaaaaccataaccgcaccgcgcaacacacatacgtgcgtgacaaccacacaagcgacactgcccgcggcgggaaagaacaagcgtacgccacagacgcgcgcctgcttcatcaacaatacaaccgggaggagntacagacaaccaacacacaacaacacaaacaaagaccacacacagcaggcaaagcaagacacaaccactcacgccagaacagcagaaacaacaagagaaacgaaaagaacaacaaaaggaagagaaaacgaagaagaaaaagaaaaaaaaaaagaacgaagagaaaagaggagagagggagagacgaacaaggcagaaacagaaaacggaaacaaaagaggaacacaaagagcacagaccaaaccaacgagaccaacagaaacaaagaagaaagaagcgcacgaagaaagcacaaagn

SEQ ID NO: 59479 - DNA, 366 bp, Homo sapiens
gatcgacggcatgaaccactacgcctggctcaggctttatttcgtaacgcgaaggaagagaatattatcatttccttatttatatttcatgttggaatgcttaaatcgataacctttgtattttgaagtgcgcgacatggaaggtgatctgcaagagctgcatcagtcaaacaccggggataaatctggatttgggttccggcgtcaaggtgaagataatacctaaagaggaacactgtaaaatgccagaagcaggtgaagagcaaccacaagtttaaatgaagacaagctgaaacaacgcaagctggttttatattagatatttgacttaaactatctcaataaagttttgcagctttcaccaaa

SEQ ID NO: 59480 - DNA, 804 bp, Homo sapiens
ggacctgggaaggagcataggacagggcaaggcgggataaggaggggcaccacagcccttaaggcacgagggaacctcactgcgcatgctcctttggtgcccacctcagtgcgcatgttcactgggcgtcttcccatcggccccttcgccagtgtggggaacgcggcggagctgtgagccggcgactcgggtccctgaggtctggattctttctccgctactgagacacggcggacacacacaaacacagaaccacacagccagtcccaggagcccagtaatggagagccccaaaaagaagaaccagcagctgaaagtcgggatcctacacctgggcagcagacagaagaagatcaggatacagctgagatcccagtgcgcgacatggaaggtgatctgcaagagctgcatcagtcaaacaccggggataaatctggatttgggttccggcgtcaaggtgaagataatacctaaagaggaacactgtaaaatgccagaagcaggtgaagagcaaccacaagtttaaatgaagacaagctgaaacaacgcaagctggttttatattagatatttgacttaaactatctcaataaagttttgcagctttcaccaaaaagaagtcttgctcatctttggttcacttccttcccagacacacacaaactcagaaccacacagccagtctcaggagtccagtaatggagagccccaaaaagaagaaccagcagctgaaagtcgggatcctacacctgggcagcagacagaagaaggccaggatacagctgagatcccagctcggcgaca

SEQ ID NO: 59481 - DNA, 556 bp, Homo sapiens
gatcgacggcatgaaccactacgcctggctcaggctttatttcgtaacgcgaaggaagagaatattatcatttccttatttatatttcatgttggaatgcttaaatcgataacctttgtattttgaagtgcgcgacatggaaggtgatctgcaagagctgcatcagtcaaacaccggggataaatctggatttgggttccggcgtcaaggtgaagataatacctaaagaggaacactgtaaaatgccagaagcaggtgaagagcaaccacaagtttaaatgaagacaagctgaaacaacgcaagctggttttatattagatatttgacttaaactatctcaataaagttttgcagctttcaccaaaaagaagtcttgctcatctttggttcacttccttcccagacacacacaaactcagaaccacacagccagtctcaggagtccagtaatggagagccccaaaaagaagaaccagcagctgaaagtcgggatcctacacctgggcagcagacagaagaaggccaggatacagctgagatcccagctcggcgaca

SEQ ID NO: 59482 - DNA, 402 bp, Homo sapiens
cctcgtcatattttggaggcagagtctcgctctgtcacccgggctggagtgcagtggcgcaacctaggctcactgcaacttccacctcctgggttcaagcgattctcctgcctcagcctccagagtagctgggactacaggcgcccaccgccatgcccggctaattttttgtattttagtagacacggggtttcaccgtgttgcccaggctggtctcgaactgagctcaggcaatctgcctgcctcggcctcccaaagtgctgggattgaagacatgaaccactgcacctgtcctgatttcatgtttcttatgtgccatcactgtttctaatgttcccttctatgattatgcttacactaaattctgatcatttacctacgacccttcctattatagtctga

SEQ ID NO: 59483 - DNA, 418 bp, Homo sapiens
tgaccatagaggatcccgtgatgttatcgcccaacacacactctctcttgcagctatggatggccctgtatgttagttttggcccatgagataaaagtagaactctgatggggaaacttttgggaaagcttctgtttcttcataaaatgggacagatgcaactgatacagcctgtcctcatctccctaatttcctgccttaaacatggatgagatggcaggagctgcatcagccatcttgcagccctgagggagagagaaaggcaagtgcagagacatcagcattgagtactgaacctgtctctggatttcttgctatgtgggaaaagaaaaccttcttggcttaagctactgttggttttctgttacagtttcatgcattcttaaatgatagatccctgagctaggtgttgggcata

SEQ ID NO: 59484 - DNA, 331 bp, Homo sapiens
tatgatcctctgcaatctggcctcaacccatctctccagctgtttcccatcttcccaaactcttgacctcaggtatacgcatctttacatagtctccttgcaaaagacactgttgatcagctacctcagagccattctaaatattcttcttccttgctgctcctcactatagaggctacaaaacccaacacacactctctcttgcagctatggatggccctgtatgttagttttggcccatgagataaaagtagaactctgatggggaaacttttgggaaagcttctgtttcttcataaaatgggacagatgcaactgatacagcctgtcc

SEQ ID NO: 59485 - DNA, 417 bp, Homo sapiens
atggatggccctgtatgttagttttggcccatgagataaaagtagaactctgatggggaaacttttgggaaagcttctgtttcttcataaaatgggacagatgcaactgatacagcctgtcctcatctccctaatttcctgccttaaacatggatgagatggcaggagctgcatcagccatcttgcagccctgagggagagagaaaggcaagtgcagagacatcagcattgagtactgaacctgtctctggatttcttgctatgtgggaaaagaaaaccttcttggcttaagctactgttggttttctgttacagtttcatgcattcttaaatgatagatccctgagctaggtgttgggcatacaatggagaacaaagcaggtatggggctcctccttatcaaacttacagtcttgt

SEQ ID NO: 59486 - DNA, 586 bp, Homo sapiens
agctcactgcttattacctggtagatttgtttctatcacttaggcctgtttaattacataatacatggttgtagcttatttctttagtagtgataggttcttgaaccgtggaaatcaagcagccataaatgtttaaaaaggaatccgggccagatttattcaaaggaatccgacatttgtaatatgaagactattttaaaaataaccagccttttgtttaactattttgaagtccagagtttccttattgttttttaatgttgggcatttgtttatatcatttttattgatttgaaattaatccagtggtgtatatgcatgagggtagttgctaggctcggttttggagaaagatcttcactagaggaaaaggaaaacctaaagctctgtttaagtgagggaggaattttggacaggcatcctcagtgatctagtattttgttaagagtatgggaaagagatatatttttatcctggagtcattctgagtcttatgctcatcagaaattcccatgctttagtttgtgtgtgtgggaaagagatgagagagagaaagagagagagagagaaaaaaaaaagaaaaaag

SEQ ID NO: 59487 - DNA, 652 bp, Homo sapiens
tggagatcctgcagcagaaggtggccggggtgcaacgggaactggaggactttaagaaagaggcattgaagtccattcattaccttgaagacgccttctgcgagatgaatggagccctggtgcaacaggaggagcaggcggctcgcgtgaggcagcggctaagggaggaggaggaccgtggcatcgtgcgcaacaaggttctcaccttcctgttgccgcgcgagaaacagctccgggagcactgcaagcggctggaggacctgctgctggacaggggtcgtgacgccctgcgtgccaccaagaagagccaggctgactgagcctcgtgggtggcactagccaagcaccaagttgaagattttttttaacggaaggagaaaccccaagtccctacccccttgctttcccttcctcatttccattgctttccttctgcctaaataacaccttgctgagaggcaaaaagacttcaatattttttttggtgaaattccatttatccagcattctaaaggaaggaggcaccccagtactgagtcaggcccctgtaactttcacttgaactgttttcctgtttgtaatggtactattgctcaatgtatacctctttatttgtatagtatattcttaaactgattgtgttgaacattca

SEQ ID NO: 59488 - DNA, 865 bp, Homo sapiens
taaacagagaagagaaaaaccgtgttttgagatggattggaggcattttttgtccacacacttgctttggggatttttattaggtagacggtaattagaggtgtcagtcatatgaaagtaaatcactagtctttcgtattactgttttctcagtggtccttatcagttttttttgttgctctgtaatcattcatatggtaagacttaacttttagtcatgtaaatttgtttagggacaatttaaactattttgtcaaattagtcgttttattccaagttgtacgtcttatgcatttatttagtatagtgaaagccttatatacacatttaatataattagtctctggatatttggattattttttagtagtacttttttagagtgtgggttttttcttttcttttctgtttttgagacagtgtctggttctgtcacccaggctggagttcggtggcccagtcttggctcactacaacctcagactcccgggctcaagccatccttccacctcaccctcctgagtagctgggactacaggcacttgccaccgtgtctggctaattttaaaatattttttgtagagacaaggtttcatgtttcccaggctggtcttgaactcctaagctcaagtgatccacccactccccaaagtgttgggattgtaggcaggagccaccacacctggcagttttttccttcttgttttgagatggggccttgctccatcacccgagctggagtgtaggtagcatgatcatagctcgctgcaaccttgaaatcctgggctcaagcgatccccctgcctcagccttccaagtagtggggactattggtccatgccaccatgcttagctaattataaaa

SEQ ID NO: 59489 - DNA, 649 bp, Homo sapiens
agctcttatttttccctttctaccaaattgagagaatgggcagacacaggagccatattcctagtttcacagaaatgttacttgaattattattttcccttctttcccaggatttgcctgtaagcattcaaattgttttgaatttcattttgccttctctaagttagaggtatttaatgactgaagactggcaggagagaaagtatcaacaaactgagtaaactattcttgaggggcactgaaaagatgttctttgaaacttgatttatatatttttacttgcaaaagaatatactgtgttttgagtatgaaagtgtgattgggtctgttgtgggaaccactgactgatgccataatttgcacttaaaggctataaattacatagttagccgtactttagtactagaaacagtaaattgacatccttgaactaattcctaccttttttttgtttctgaagaaataaagagtatattaagcaaagggataatttatatttcaggttggacaatttaccctaaacaaattaaaccatggaaagtgcaaacacatgaatgaaacatttttttacatcaaagtatcatcaaagattcttgtttcatttgataaaattaatatttgaataaaaaaatttttaaatcaaaaaact

SEQ ID NO: 59490 - DNA, 364 bp, Homo sapiens
ggaggttgcagtgagccgagattacaccattgcacacagcccgggcaacaagagcaaaactccatctcaaaaaagaaaagagaccaagcgtaggcacttcagatgacaatcccagctcagcttccagctgatagtcagcatcaactacatgctgcataacaaacaacccaaaatctcagaggcttacaataatagagacatatttttttgctcacagctctgagggttatctagggtatctctgcagctgcagattgactgggctgcagctggagtctaggtctgctccacatgtctcttcattctctttggaccagtgactatttgagatatgctcagggggggggggggggggggggaattc

SEQ ID NO: 59491 - DNA, 388 bp, Homo sapiens
ggcgtgagccaccatgcctggcctagaattgaaaattttgaaatagatttggcatatattttataggcacagggaggaaaattttgatgacctctgtgtagtgaagggcgctatataaaatggcttaatgaataataaagtagatcaaatgtttagcattttcagtttatatttttatcttgtgtgagctgtttctggataatttccgtttttagtatgtcactgacttcttatgtcactaagatatctgacagaagctaaggtaatgctgttgaatctccaatgtggacagaaatcttagacaacctttcatgctattacaactttgaaggttagacttttaaggtttgacagactagaataccccttccacttgtctggttttggc

SEQ ID NO: 59492 - DNA, 384 bp, Homo sapiens
tgtttttaagacagtgtctcattctgttgcccaggctggagtgtagtggcaccagcccagctcactgcagcagactcaaacttgtggggcttaagcaaccttcccaactcagcctcccgagtagctgtgactacaggtgtgtgccaccacacctggctattttttaaattttttgtagagatgcattctccctatgttgcctaggctggtcttgaactcctgaactcaagcagtcctccctccttggactcccaaagtgctgggattataggtgtgagccaccacgcctgactgctgctattgtcaatagtgctatgctaaacgtgcaaatggaggcatccctttgatatacagatgcttattcctttgggtaaatactcaaca

SEQ ID NO: 59493 - DNA, 328 bp, Homo sapiens
aaaacttagaaatgacagcaagaggggcaagtgaaagagacagtggcagtcaaggctactggaaccagagagcatgaagggctgcatctgagagcgcaacagagctcagaaggtatgaagagaaggtgttggcacaaggcttcatgcactgtctgcagacccgtgagccaattaaacctcttttctctataaattaccccgtcctcaggcacttctttatagcaatgcaagaaccaacctagctcaactgtttatatagtcaattggcttgtgaaaccctgcctactctaagaagccttcctggattaagaggaaagggctggaatct

SEQ ID NO: 59494 - DNA, 754 bp, Homo sapiens
tcctattgtgttaataaaacaaagtcagacaaacgtaattgcctggctaggtgattttcttttctactcagtgcatttagtgtatagccatgaagtttaaaaaaagtgttaaaagtgtatctgtaaaaacaaccacctgaaaaagttattttagtagttgcagtgaaaagctagaattcatactgtttcatatagggaagtatttccagtgagtagtgttttttggtcagaactaaaaattgagctggtttattccattttaccatgcctgtactgtagaggaaaggggaagtatatggaatacacttgtgaatacagtgtgtaggatacattaacagttttctgagtgggctgctcttttttcctcaatactgtatatatttttcttaagctcttctttaaaagataaatatttttcatacttctcttaaatcctcaaggattaactctgagtcaccatttgtggtattttaaatccttttaaataaatctctgtatttgcaactgaatcaaaacagtaaaacatttcacagggtaggatctgatgaccattttataatcaacatttttagataccacaagaggtacttatgagcatccactgaaattatggcattatgtcatataaatatccaaaaattcatttttttattcttatgtttatatataagaaagaaaaggctgggcacggtggctccctgtaatcccagcactttgagaggccgaggcagatggatcactaagtcaggagatt

SEQ ID NO: 59495 - DNA, 329 bp, Homo sapiens
cttttctttctgaacactttgcttcacaccttctcatatccacggttatgaattctcctgactatatctattgtaacccaaaatattgactgtactcagagattcatcagagatttcatgtctatatgcccagagcctgatataatgccaccttattacacacataatatagaatctgaggactacgttaactgatacatgttaagtatcctgcagagagctggcacattggatgtgctcaataattgttagctttaagtatctacctcaaagggctactgtgtgactccaatgagataatgtgcaatgaagggtttcgtgtaatattg

SEQ ID NO: 59496 - DNA, 362 bp, Homo sapiens
gttctttatcttcctcctcttatgtgcactatgtaatgtcctcatcattttaaaagtgagttgctattgggcgggcgcggtggctcacgcctgtaatcccagaactttgggaggccaaggttggtggctcacttgaggtcaggagttcaagaccagcctggtcaacatggtgaaacccagtctctacaaaaaacacacacaaaaaattagctaggcatggtggcacacacctgtaatcccagctactcgggaggctgaggcacgagaattgcttgaacccaggaggcggaggttgcagtgagccaagatcgtgccactgcactccagcttgggtgacagaacgagactgtctcaaaacaaaa

SEQ ID NO: 59497 - DNA, 329 bp, Homo sapiens
agagcgtgtggagactcacactgtaatcttttgctccaagaaccaccagaggaatgtatcaggaaaaccaaaagaattcacagatcctttgaaagaggcagtacactgatgcaaattccatgaaatggtgaaaagctgtgagttcccagagtgtgacgggggaaaaccagcctccaaatacacattcctcctggggaatctgaaaatccagattatgggagaaggatttaaccttacctagagaagaaatgaatttagagagtagtgcaaaatataaaagtagaagtagcatcaggaaagtgccttgcaggtactcccagtatccagct

SEQ ID NO: 59498 - DNA, 329 bp, Homo sapiens
  misc_feature (129)..(129): n is a, c, g, or t
  misc_feature (137)..(137): n is a, c, g, or t
  misc_feature (233)..(233): n is a, c, g, or t
  misc_feature (236)..(236): n is a, c, g, or t
  misc_feature (241)..(241): n is a, c, g, or t
  misc_feature (247)..(247): n is a, c, g, or t
  misc_feature (252)..(253): n is a, c, g, or t
  misc_feature (258)..(258): n is a, c, g, or t
  misc_feature (275)..(275): n is a, c, g, or t
  misc_feature (281)..(282): n is a, c, g, or t
  misc_feature (290)..(290): n is a, c, g, or t
  misc_feature (295)..(295): n is a, c, g, or t
  misc_feature (304)..(305): n is a, c, g, or t
  misc_feature (312)..(312): n is a, c, g, or t
  misc_feature (317)..(317): n is a, c, g, or t
  misc_feature (326)..(326): n is a, c, g, or t
catatgcaaacctttactttatccagccattatgaccaatggactgtgcatccggctatgtaggtggtcttcttcatgctttaatccatgaaggatttttattcagactaaccttctgtaactccaacntagtacancacatttactgtgacattatcccattgtctaagatttcttgtactgattcttctattaattttctaatggtttttattttctcaggttcaattcangtnttcancattgngactnntcttntatcttatacatttgtnctcttnncaatcttnaaaangaaatctgnnaaaggtntaagnaaagccttntcc

SEQ ID NO: 59499 - DNA, 337 bp, Homo sapiens
cgcacccagccacaaaattaatacacaaataaatcaatagcttttctagatagttagaaaatataatggaaacaaagatctcatttataataaaaacaaaaaatgcctggcaacaaactaataataagtgtgcaagatccaattgctgaataaaaaacacctaaagttcgccagggatacaaaaggaaacttgaataactggaaaggcataccatattcttggataagaaatttcaatattaaacatttaacctccctaagttaacataaaatgtttcaacataatctcaatcataataccaatagtttttttgacaagaaaggctgttcatgtaaa

SEQ ID NO: 59500 - DNA, 1084 bp, Homo sapiens
cagacagcagggaacatcaccctcttcagactggagtcagtgggaacagacccaagatgttggggaggaacacttggaagacctcagctttctccttcttggttgagcagatgtgggcccctctctggagtcgttcgatgaggccagggcgatggtgttctcagcgttcctgtgcatggcaaaccagcaataacactttgcacccactctggacggtcccggtctccgtgccagggggcacccggcagtctcctattaacatccagtggagggacagcgtctatgacccccagctgaagccactcagggtctcctatgaagcggcatcctgcctgtacatctggaacactggctacctcttccaggtggaatttgacgatgccaccgaggcatcaggaattagtggtgggcccttggaaaaccactacagactgaagcaatttcacttccactggggagcagtgaacgaggggggctcagagcacacagtggacggccacgcgtaccccgcagagctgcatttagttcactggaattctgtgaaataccaaaattacaaggaagctgtcgtgggagagaatggtttggctgtgataggcgtgtttttaaagctcggggcccatcatcagacgctgcagaggctggtggacatcttgccggaaataaaacataaggacgcgcgggcggccatgcgccccttcgacccctccactctgctgcccacctgctgggattactggacctacgcgggctcgctcaccaccccgccgctgaccgagtcggtcacctggatcatccagaaggagcccgttgaagtggccccaagccagctctctgcatttcgtactctcctgttttctgcacttggtgaagaggagaagatgatggtgaacaactatcgcccacttcaacccttgatgaaccggaaggtctgggcgtccttccaggccactaatgagggcacaaggtcctagagacattaggtccacatgaatagcagaactgactttgaaggaaggaagcgttgtttcccaagtttcacaatgtgattgtacatgacttctgaaattaaaaagagagcatg

SEQ ID NO: 59501 - DNA, 312 bp, Homo sapiens
ccagggccttcagagggcaatctacttcgaaatctcacagttctaaccagcttgaacccaaaatctacagggaacaaaattctagggagcaactcccagcctaatgattcagccaaattagtcatcccatgtaatttgcatgtggaattttcatgaaccattgaaaagtttttttaaaaaagctttgttttgaggctgggcatagtggctcacacctgtaattccagcactttgggaggccaaggcaggtggatattgaaatcagaagttcaagaccagcccggccaacatggcaaaaccctgtctctacta

SEQ ID NO: 59502 - DNA, 787 bp, Homo sapiens
  misc_feature (722)..(722): n is a, c, g, or t
  misc_feature (724)..(724): n is a, c, g, or t
  misc_feature (728)..(729): n is a, c, g, or t
gtcgtacacatatcctccactcattcatggaggacctgcaatacagtacagcaaggagcgtaccctaggaaggcaggggaaaaaatctaccttttagagccctgtaatagagttccattatgtctatataagtgataagttgcatatatttttcattgttttaattattaataggtaacagttaatataataagtatcaaatgccctcagtgcatacaaacccaagtttaattatccaagtgaaaatgcttttgtggattgactttttaccccctcttcctcaacaacacatagtagcctcatacacaaccccttcccacactggtacacaagtatgcaaatagaaacacagacacctgcccataaacaaatcaccctggccaaatgccactgcctttgggtaatgcagggttcttcggcggaatatttcttcttctgctcctctggaatgtattccattccctgctgctctggaatgtaaccatgtgagatttcttcccctttttcatcacatggatgtctgttagaattccttttctggccgtgtttctcatgtgtaggcaatactttttatcatcttccacatttccgttttccttcctacttttgcctagttgctttatgaaaatctttatatctctccttagcccttggtcacttcatgactgttgtgaaccattttcctaccttagaagcatgatgtacacctaaaaattattttntncttnnccaaaaaaaatataaaattacctcacctaaaaaaacctttataacggaacgaggtcgg

SEQ ID NO: 59503 - DNA, 302 bp, Homo sapiens
aaaaaattgttcatggcatgcaaattagaaaatgagaaattggcggttcccattagcaacaaatattctgagaagagtttcatgggaggagaggccatatacatcacgtttataaatatttttacttcccagaaaaataggagctaggattgcagcagagccaagccctggcagccctttcgggcgtccccaggcagtgccctgaagcccaggctcgccttttgtgcttcctgcgtccgctccaggcgtgtctgcgcggtgcggaggcgcatccccgccaggggagggctgggagcggccgc

SEQ ID NO: 59504 - DNA, 454 bp, Homo sapiens
aagatcatgccacagcactccagcctgggccacagagcgagactctgtctccaaaaaaaaaaaaaaaaaagagggagctgagtgatgagtgcctgaataatgaaagatgaatagtgacagtacaaaatatgaccctcttttagggtgttacaacctctttcctctcacctcctccctagtgttctcaatgcccatcatacttctccctctatactacagtaatctggatactcccagctacactcttaccaggactgataagaagtgaagagacttaagcaaagggcaggacgagagcccaggactaggaatcctggtgctggggcacgcatgcccaagagagacagtaaagagattttcataggaacatcttgaccctggatgcccatagaaaatggtgggacagcatgggactacagtcttcccacggtattcaggggggattagttccaga

SEQ ID NO: 59505 - DNA, 353 bp, Homo sapiens
gttccctgaggagcccctggaagatgggggagggatgagtcctaacggctcaaggacccgaggctgctccctggggcacagtcaaccccaggatcctttctgaggctgtctgccttctccctccacagccacacgttgcttttagcttgctgggattcacacttgaatttacggggccaggaaggagtgaggcaggaagcgccagtgtggcttctgcagttggggaataataacccggccacttccaagcagacttggagcatgtagcgcccagctcagagatgagggcaggctctcctgagaggtcagggacttagcaccgtgatcatgattgtcagtcttatgtgatgatc

SEQ ID NO: 59506 - DNA, 779 bp, Homo sapiens
agcgtggagaaaatgcccctggaaagggttaagggccaggacaggaatggggcaggaggtgcacggatcctgctgggcactgggagcagggggcggccaaaggcagtgggtgggcaggtccatgcctcccctggccccccagctctgcagggcagtgttcctggttcctatcttgctgctgctgcaggtgaagcctctgaacgggagcccaggccccaaagatgggagccagacagagaaaacgccctctgcagaccagaatcaagaacagttcgaagagcactttgtggcctcctcagtgggtgagatgtggcaggtggtggacatggcccagcaggaagaagaccagtcgtccaagacggcagctgttcacaagcactctttccacctcagcttctgctttagtctggccagtgtcatggttttctcaggagggccattgaggcggacattcccaaatatccaactctgcttcatgctcactcactgaccctccctccctcctgggctccaggtcacaactcccaaaggagatgcaggcatggctctctgcctctgatcaccatcactgtatctcaaggttcagcagcagagataccagttgccatcagtgctaactgactgcctctccaggttcggagtttcatctcccagggccagagacagcagacccacatccttctctcccacacctctcctggttttgttcaggacagcagattagaggcaggaggcaatgacaataaaataacgataaaatcctgagaacaattaaagca

SEQ ID NO: 59507 - DNA, 750 bp, Homo sapiens
aatgacccactgtggtcatcttggaagcctcggcccatccctgctggctgtgctccattcttgtgcctcgccattggaacgctctagtgagccggaatgaagttcaggcccatggctgtgatgtcacagaacatgtgaagtcagaggtcctatggaaggtgaagcctctgaacgggagcccaggccccaaagatgggagccagacagagaaaacgccctctgcagaccagaatcaagaacagttcgaagagcactttgtggcctcctcagtgggtgagatgtggcaggtggtggacatggcccagcaggaagaagaccagtcgtccaagacggcagctgttcacaagcactctttccacctcagcttctgctttagtctggccagtgtcatggttttctcaggagggccattgaggcggacattcccaaatatccaactctgcttcatgctcactcactgaccctccctccctcctgggctccaggtcacaactcccaaaggagatgcaggcatggctctctgcctctgatcaccatcactgtatctcaaggttcagcagcagagataccagttgccatcagtgctaactgactgcctctccaggttcggagtttcatctcccagggccagagacagcagacccacatccttctctcccacacctctcctggttttgttcaggacagcagattagaggcaggaggcaatgacaataaaataacgataaaatcctgagaacaattaaagca

SEQ ID NO: 59508 - DNA, 662 bp, Homo sapiens
agcgtggagaaaatgcccctggaaagggttaagggccaggacaggaatggggcaggaggtgcacggatcctgctgggcactgggagcagggggcggccaaaggcagtgggtgggcaggtccatgcctcccctggccccccagctctgcagggcagtgttcctggttcctatcttgctgctgctgcaggtgaagcctctgaacgggagcccaggccccaaagatgggagccagacagagaaaacgccctctgcagaccagaatcaagaacagttcgaagagcactttgtggcctcctcagtgggtgagatgtggcaggtggtggacatggcccagcaggaagaagaccagtcgtccaagacggcagctgttcacaagcactctttccacctcagcttctgctttagtctggccagtgtcatggttttctcaggagggccattgaggcggacattcccaaatatccaactctgcttcatgctcactcactgaccctccctcccaaagatgggagccagacagagaaaacgccctttgcaggccagagacagcagacccacatccttctctcccacacctctcctggttttgttcaggacagcagattagaggcaggaggcaatgacaataaaataacgataaaatcctgagaacaattaaagca

SEQ ID NO: 59509 - DNA, 714 bp, Homo sapiens
aaatcctatgatgattacaatatttgatccatttgatatggatcacagaatttgaaagtttccagagatacagaccgtttggttttccttagactaaactcttatttgcttgtgtttgtcatattactttaaaactaaagctaacataggcctttacgttgtctgtccataagtgagccagtcaaacgatattctttgagcgattctgcattgaaacctaaatgaatgtcagcttttaattaatagagttttcataaaagagaaggtggtggtgggtgggatggaattgaccaagtaggtcattaactcttatagtaagtaatccttctgggtatatggttttgtgtttaggaagtgggaagcggggaacagtattattaccttcttttggaagtgttttagaaggctttgcacttagttttgtttgtggactaagtggctttgtattttcactaattcttggtttttaaatgattcatctctgaccagtactcccttttggctcattttctggtttaataaatgtctcttttagtgtatattttttaagatttctggttattgtaagttcttgtgcttatgcatgctgtgataggcgccactgatattaataagaaaaataacatggaattatccttgaggcaaagaattaaagctctgtataagattttctgtataaaatggtattaaagtattttggatttatatgcctac

SEQ ID NO: 59510 - DNA, 194 bp, Homo sapiens
aagaagagtcttctgcacaaacaaaaccatagtgttgacaaatagtcatggccaatggcaatctgatggtccagggccctggatgactcctctgcaggagcatcttcagggttctagggaagtcacaggggcaacatattggaaactagcaggcccagaagaccgccccgccccccatgccctggcgcagggcc

SEQ ID NO: 59511 - DNA, 1010 bp, Homo sapiens
taggaaaagcagcaaaccagatggagaaggaaggccaaaaagataagtagaaagctggaccatgagctccttgagggcagggactgaatggttactatgtccccagggcccagcatgaccttctcctggattcctcatcttccttctgtgacctgtgtctccatcagtttctcctccggcatctttttcttacaggattcttacctcaggaatagatggacatggcctggcagatgatgcagctgctgcttctggctttggtgactgctgcggggagtgcccagcccaggagtgcgcgggccaggacggacctgctcaatgtctgcatgaacgccaagcaccacaagacacagcccagccccgaggacgagctgtatggccagtgcagtccctggaagaagaatgcctgctgcacggccagcaccagccaggagctgcacaaggacacctcccgcctgtacaactttaactgggatcactgtggtaagatggaacccacctgcaagcgccactttatccaggacagctgtctctgagtgctcacccaacctggggccctggatccggcaggtcaaccagagctggcgcaaagagcgcattctgaacgtgcccctgtgcaaagaggactgtgagcgctggtgggaggactgtcgcacctcctacacctgcaaaagcaactggcacaaaggctggaattggacctcagggattaatgagtgtccggccggggccctctgcagcacctttgagtcctacttccccactccagccgccctttgtgaaggcctctggagccactccttcaaggtcagcaactatagtcgagggagcggccgctgcatccagatgtggtttgactcagcccagggcaaccccaatgaggaggtggccaagttctatgctgcggccatgaatgctggggccccgtctcgtgggattattgattcctgatccaagaagggtcctctggggttcttccaacaacctattctaatagacaaatccacatg

SEQ ID NO: 59512 - DNA, 900 bp, Homo sapiens
acagcagagatctgggcctgggagggagagagtacacaatcacatggctgttgcccctgtctcaggccttgtctacctctgactgtggctctctggcaggaatagatggacatggcctggcagatgatgcagctgctgcttctggctttggtgactgctgcggggagtgcccagcccaggagtgcgcgggccaggacggacctgctcaatgtctgcatgaacgccaagcaccacaagacacagcccagccccgaggacgagctgtatggccagtgcagtccctggaagaagaatgcctgctgcacggccagcaccagccaggagctgcacaaggacacctcccgcctgtacaactttaactgggatcactgtggtaagatggaacccacctgcaagcgccactttatccaggacagctgtctctgagtgctcacccaacctggggccctggatccggcaggtcaaccagagctggcgcaaagagcgcattctgaacgtgcccctgtgcaaagaggactgtgagcgctggtgggaggactgtcgcacctcctacacctgcaaaagcaactggcacaaaggctggaattggacctcagggattaatgagtgtccggccggggccctctgcagcacctttgagtcctacttccccactccagccgccctttgtgaaggcctctggagccactccttcaaggtcagcaactatagtcgagggagcggccgctgcatccagatgtggtttgactcagcccagggcaaccccaatgaggaggtggccaagttctatgctgcggccatgaatgctggggccccgtctcgtgggattattgattcctgatccaagaagggtcctctggggttcttccaacaacctattctaatagacaaatccacatg

SEQ ID NO: 59513 - DNA, 860 bp, Homo sapiens
gagcaagctggtgtcagagcctggacctacagcgctgttggtggaggtcctgcctccaggaatagatggacatggcctggcagatgatgcagctgctgcttctggctttggtgactgctgcggggagtgcccagcccaggagtgcgcgggccaggacggacctgctcaatgtctgcatgaacgccaagcaccacaagacacagcccagccccgaggacgagctgtatggccagtgcagtccctggaagaagaatgcctgctgcacggccagcaccagccaggagctgcacaaggacacctcccgcctgtacaactttaactgggatcactgtggtaagatggaacccacctgcaagcgccactttatccaggacagctgtctctgagtgctcacccaacctggggccctggatccggcaggtcaaccagagctggcgcaaagagcgcattctgaacgtgcccctgtgcaaagaggactgtgagcgctggtgggaggactgtcgcacctcctacacctgcaaaagcaactggcacaaaggctggaattggacctcagggattaatgagtgtccggccggggccctctgcagcacctttgagtcctacttccccactccagccgccctttgtgaaggcctctggagccactccttcaaggtcagcaactatagtcgagggagcggccgctgcatccagatgtggtttgactcagcccagggcaaccccaatgaggaggtggccaagttctatgctgcggccatgaatgctggggccccgtctcgtgggattattgattcctgatccaagaagggtcctctggggttcttccaacaacctattctaatagacaaatccacatg

SEQ ID NO: 59514 - DNA, 988 bp, Homo sapiens
gagcaagctggtgtcagagcctggacctacagcgctgttggtggaggtcctgcctccaggaatagatggacatggcctggcagatgatgcagctgctgcttctggctttggtgactgctgcggggagtgcccagcccaggagtgcgcgggccaggacggacctgctcaatgtctgcatgaacgccaagcaccacaagacacagcccagccccgaggacgagctgtatggccaggtgggagctcctcaagggccctccccaggaagtgttcctctggatgacctacctggggcagaggagccagaatatggaggagatggctgtggtggggagagacttagtcctgtgtcttccccacccagtgcagtccctggaagaagaatgcctgctgcacggccagcaccagccaggagctgcacaaggacacctcccgcctgtacaactttaactgggatcactgtggtaagatggaacccacctgcaagcgccactttatccaggacagctgtctctgagtgctcacccaacctggggccctggatccggcaggtcaaccagagctggcgcaaagagcgcattctgaacgtgcccctgtgcaaagaggactgtgagcgctggtgggaggactgtcgcacctcctacacctgcaaaagcaactggcacaaaggctggaattggacctcagggattaatgagtgtccggccggggccctctgcagcacctttgagtcctacttccccactccagccgccctttgtgaaggcctctggagccactccttcaaggtcagcaactatagtcgagggagcggccgctgcatccagatgtggtttgactcagcccagggcaaccccaatgaggaggtggccaagttctatgctgcggccatgaatgctggggccccgtctcgtgggattattgattcctgatccaagaagggtcctctggggttcttccaacaacctattctaatagacaaatccacatg

SEQ ID NO: 59515 - DNA, 543 bp, Homo sapiens
gggtggtggacgccctgccccctcccacagctctggtccccttcaagggtaaagctgctgagatacgtggctgacaggagtattctgtctcctccccactcaggtcaaccagagctggcgcaaagagcgcattctgaacgtgcccctgtgcaaagaggactgtgagcgctggtgggaggactgtcgcacctcctacacctgcaaaagcaactggcacaaaggctggaattggacctcagggattaatgagtgtccggccggggccctctgcagcacctttgagtcctacttccccactccagccgccctttgtgaaggcctctggagccactccttcaaggtcagcaactatagtcgagggagcggccgctgcatccagatgtggtttgactcagcccagggcaaccccaatgaggaggtggccaagttctatgctgcggccatgaatgctggggccccgtctcgtgggattattgattcctgatccaagaagggtcctctggggttcttccaacaacctattctaatagacaaatccacatg

SEQ ID NO: 59516 - DNA, 505 bp, Homo sapiens
gggtggtggacgccctgccccctcccacagctctggtccccttcaagggtaaagctgctgagatacgtggctgacaggagtattctgtctcctccccactcaggtcaaccagagctggcgcaaagagccgctggtgggaggactgtcgcacctcctacacctgcaaaagcaactggcacaaaggctggaattggacctcagggattaatgagtgtccggccggggccctctgcagcacctttgagtcctacttccccactccagccgccctttgtgaaggcctctggagccactccttcaaggtcagcaactatagtcgagggagcggccgctgcatccagatgtggtttgactcagcccagggcaaccccaatgaggaggtggccaagttctatgctgcggccatgaatgctggggccccgtctcgtgggattattgattcctgatccaagaagggtcctctggggttcttccaacaacctattctaatagacaaatccacatg

SEQ ID NO: 59517 - DNA, 454 bp, Homo sapiens
gtagagatcatatgggtagccagaacttccaccctggtccagtgataacagagactatatgtgaggtttcagtggaggtcagacgccaagtagaaaacctggacttctatctctacctggttagtaaggcagcatcacctgcctcctccgcttacatcccccgacaactttccttgccgtggtggtgtcagagaaagccagctaaaatagaaggttaaaataaggtctagagttttataatataaaaatgtccagtttcaataaagtatcactcaacataccaggaaagaaccaggaaaaactcaagaacaaaaaccttcaaaacaattaaaaagatacaatgaatagatgtcaaactcaagatgacagagatgttaaaattatttggaaaaaatttaaagcagccatagtaaaattattcagtggacaattacaaacacacatgaaataaatg

SEQ ID NO: 59518 - DNA, 763 bp, Homo sapiens
tgggcttcagtggcctataaactctgtaaattccattctaatttttgcacatttattgtgttccggttaattccagaagacatttcaaacatttttcttacaccatataataaaaatacttaactaaattgacagttataaaaataaatcagtgaaatgtaccttatactttaataaaaaatgttttcagaaatagataagtgaaagctgagtgtttctttgataggttcccctgtactataggagtgataattgcagctattgcaatagtagtaattgttaaatggatactaatgaatagcatagcatagtgggtaagagtttatatagcacaggctctagaatcagattaagtaggttcaaataccagttctgccagtaactggttttagaaccttgggcaagttaaagaatgtctcccagcctcagtttccctatttgtaaaatggaaataatggtagctacctcaaacctcattacgaattcaatgagttaaacttgaaaagacttattacagtagctggcacataaagacttgatagtagtttatatggatgctatctcatattagcatatatggaattaatagtgtatcactatactttttttttctttttttttttgaatagagatcagtctatcacccaggctggagtgcagtggtgacatcatagctcactgtaattctcccatactctaccaatcctcctgcctcagcctccagattggctgtgattgcaggtgtgcaccaccacacccagct

SEQ ID NO: 59519 - DNA, 1743 bp, Homo sapiens
cgcgggacgggcgcacgccgccttctcctagtcaagtatccgagccgccccgaaactcgggcggcgagtcggccacgggaagtttattctccggctccttttctaaaaggaagaaacagaagtttctcccagcggacagcttttctttccgcctttttggccctgtctgaaatcgggggtccccagggctggcaggccaggctcgctgggctcctaatcttttttttaatttccaatttttgattgggccgtgggtccccgctgagctccggctgcgcgcgggggcgggagggcgcgcgcaggggagggaccgagagacgcgccgactttttagagggagggatcgggtggacaactggtcccgcggcgctcgcagagccggaaagaagtgctgtaagggacgctcgggggacgctgttcctgaggtgtcgccgcctccctgtcctcgccctccgcggtgggggagaaacccaggagcgaagcccagagcccgcggcgcggccggcggacgaacgagcgcgcagcagccggtgcgcggccgcggcgagggcgggggaagaaaaacaccctgtttcctctccggcccccaccgcggatcatgtaccaggattatcccgggaactttgacacctcgtcccggggcagcagcggctctcctgcgcacgccgagtcctactccagcggcggcggcggccagcagaaattccgggtagatatgcctggctcaggcagtgcattcatccccaccatcaacgccatcacgaccagccaggacctgcagtggatggtgcagcccacagtgatcacctccatgtccaacccataccctcgctcgcacccctacagccccctgccgggcctggcctctgtccctggacacatggccctcccaagacctggcgtgatcaagaccattggcaccaccgtgggccgcaggaggagagatgagcagctgtctcctgaagaggaggagaagcgtcgcatccggcgggagaggaacaagctggctgcagccaagtgccggaaccgacgccgggagctgacagagaagctgcaggcggaagcctctcagaagctcatgacgttcgtcagacccttgagacagacggaaactgtttttcactccggaatatgctgtcctctgctgaacgaagcccttgcccgtatgtcctcactgatgaacaggaatccatgttagggaaaacgtggggaggaggctggtgacacacacctcttcccctcccacagcggcccctccacgtgcacttgctcgcttctgcttctctggctggggatgaaagaagggggctgaggtccttgcggggtgaccctggcatcctcacaggccctctcgggctgtcacgttacttctgtgtcaagcgtggtggctgaaccaaatgttctctgagggttctgggagtcctgaaatatgtgcttaagaaattggagcaaaaggccaggcgccgtggctcatgcctgtaatcccagcactttgggaggctgaggcgggtggatcacctgaggtcagaagttcaagaccagcctggtcgatgtggtgaaaccccatctctatgaaaaatacaaaattagccgggtgtggtggcaggtgcctgtagtctcagctactcgggaggctgagactggagaatagcttgaacccgggaggcagaggctgcagtgagccaaggtcatgccactgcactccagcctgggtaagacagagtgagactctgtctcaaaaaa

SEQ ID NO: 59520 - DNA, 882 bp, Homo sapiens
acctttctgtgattggcacttcaaggagctgtgccccatgtggcgctcctcaccacccgccccggaatagccctgccccctgaggctcctctactttccttccctcctcccagaggcctcacaccctactcccctgcctcccccacctcccccgccctctgacccagccacccaggcccctgagccacatcctccacaggaagcctctcagaagctcatgacgttcgtcagacccttgagacagacggaaactgtttttcactccggaatatgctgtcctctgctgaacgaagcccttgcccgtatgtcctcactgatgaacaggaatccatgttagggaaaacgtggggaggaggctggtgacacacacctcttcccctcccacagcggcccctccacgtgcacttgctcgcttctgcttctctggctggggatgaaagaagggggctgaggtccttgcggggtgaccctggcatcctcacaggccctctcgggctgtcacgttacttctgtgtcaagcgtggtggctgaaccaaatgttctctgagggttctgggagtcctgaaatatgtgcttaagaaattggagcaaaaggccaggcgccgtggctcatgcctgtaatcccagcactttgggaggctgaggcgggtggatcacctgaggtcagaagttcaagaccagcctggtcgatgtggtgaaaccccatctctatgaaaaatacaaaattagccgggtgtggtggcaggtgcctgtagtctcagctactcgggaggctgagactggagaatagcttgaacccgggaggcagaggctgcagtgagccaaggtcatgccactgcactccagcctgggtaagacagagtgagactctgtctcaaaaaa

SEQ ID NO: 59521 - DNA, 6448 bp, Homo sapiens
cgcgggacgggcgcacgccgccttctcctagtcaagtatccgagccgccccgaaactcgggcggcgagtcggccacgggaagtttattctccggctccttttctaaaaggaagaaacagaagtttctcccagcggacagcttttctttccgcctttttggccctgtctgaaatcgggggtccccagggctggcaggccaggctcgctgggctcctaatcttttttttaatttccaatttttgattgggccgtgggtccccgctgagctccggctgcgcgcgggggcgggagggcgcgcgcaggggagggaccgagagacgcgccgactttttagagggagggatcgggtggacaactggtcccgcggcgctcgcagagccggaaagaagtgctgtaagggacgctcgggggacgctgttcctgaggtgtcgccgcctccctgtcctcgccctccgcggtgggggagaaacccaggagcgaagcccagagcccgcggcgcggccggcggacgaacgagcgcgcagcagccggtgcgcggccgcggcgagggcgggggaagaaaaacaccctgtttcctctccggcccccaccgcggatcatgtaccaggattatcccgggaactttgacacctcgtcccggggcagcagcggctctcctgcgcacgccgagtcctactccagcggcggcggcggccagcagaaattccgggtagatatgcctggctcaggcagtgcattcatccccaccatcaacgccatcacgaccagccaggacctgcagtggatggtgcagcccacagtgatcacctccatgtccaacccataccctcgctcgcacccctacagccccctgccgggcctggcctctgtccctggacacatggccctcccaagacctggcgtgatcaagaccattggcaccaccgtgggccgcaggaggagagatgagcagctgtctcctgaagaggaggagaagcgtcgcatccggcgggagaggaacaagctggctgcagccaagtgccggaaccgacgccgggagctgacagagaagctgcaggcggagacagaggagctggaggaggagaagtcaggcctgcagaaggagattgctgagctgcagaaggagaaggagaagctggagttcatgttggtggctcacggcccagtgtgcaagattagccccgaggagcgccgatcgcccccagcccctgggctgcagcccatgcgcagtgggggtggctcggtgggcgctgtagtggtgaaacaggagcccctggaagaggacagcccctcgtcctcgtcggcggggctggacaaggcccagcgctctgtcatcaagcccatcagcattgctgggggcttctacggtgaggagcccctgcacacccccatcgtggtgacctccacacctgctgtcactccgggcacctcgaacctcgtcttcacctatcctagcgtcctggagcaggagtcacccgcatctccctccgaatcctgctccaaggctcaccgcagaagcagtagcagcggggaccaatcatcagactccttgaactcccccactctgctggctctgtaacccagtgcacctccctccccagctccggagggggtcctcctcgctcctccttcccagggaccagcaccttcaagcgctccagggccgtgagggcaagagggggacctgccaccagggagcttcctggctctgggggacccaggtgggacttagcagtgagtattggaagacttgggttgatctcttagaagccatgggacctcctccctcattcatcttgcaagcaaatcccatttcttgaaaagccttggagaactcggtttggtagacttggacatctctctggcttctgaagagcctgaagctggcctggaccattcctgtccctttgttaccatactgtctctggagtgatggtgtccttccctgccccaccacgcatgctcagtgccttttggtttcaccttccctcgacttgaccctttcctcccccagcgtcagtttcactccctcttggtttttatcaaatttgccatgacatttcatctgggtggtctgaatattaaagctcttcatttctggagatggggcagcaggtggctcttctgctggggctgacttgtccagaaggggacaaagtgcaatacagagccttccctaccctgacgcctcccagtcatcatctccagaactcccagcggggctccctgagctctcaaggagatgctgccatcactgggaggctcagaggacccttcctgcccaccttcggagacggcttctggaggaacggcttggccagaagacagggtgtgagtgagacagtggggcacaggttgggtttgccaaacgcctaattaccaggccaggaagcatgccaacaaagccacacgggtgtcctagccagcttcccttcacctggtgtcttgagtagggcgtctcctgtaattactgccttgccattctgcccctggacccttctctccggaccagggaggcgtccctccctaggagccacacattatactccaagtccctgccgggctccgcctttcccccaccctggctctcagggtgacgccacccacagagatttaatgagcgtgggcctggaccttccccagatgctgccaggcagcccctccccaagcctcaaagaagcatttgctgaggatggagaggcaggggagggaggcgggaggccgtcactggagtggcgtctgcagcagctgctgccccagcacccgctcagcctgtcctggctgctcacctccccgcagggcaccgggcctttcctgccctctgtggtcatctgccacctgctggatcaagtgctttctcttttacactcccctgtccccaccccagtgcactcttctggcccaggcagcaagcaagctgtgaacagctggcctgagctgtcgctgtggcttgtggctcatgcgccattcctggttgtctgttgaatctttctggctgctggaattggagataggatgttttgcttcccactgcaggagagctgccccctttcacggggttggggaagggtccccctggcctccagcaggagcacagctcagcagggtccctgctgcccacccctctgagccttttctccccagggtatggctcctgctgagtttcttgtccagcagggccttgacaggaatccagggagtagctcctggccagaaccagcctctgcggggcttgtgctctgcaaagactctgctgctggggattcagctctagaggtcacagtatcctcgtttgaaagataattaagatcccccgtggagaaagcagtgacacattcacacagctgttccctcgcatgttatttcatgaacatgacctgttttcgtgcactagacacacagagtggaacagccgtatgcttaaagtacatgggccagtgggactggaagtgacctgtacaagtgatgcagaaaggagggtttcaaagaaaaaggattttgtttaaaatactttaaaaatgttatttcctgcatcccttggctgtgatgcccctctcccgatttcccaggggctctgggagggacccttctaagaagattgggcagttgggtttctggcttgagatgaatccaagcagcagaatgagccaggagtagcaggagatgggcaaagaaaactggggtgcactcagctctcacaggggtaatcatctcaagtggtatttgtagccaagtgggagctattttcttttttgtgcatatagatatttcttaaatgaagctgctttcttgtcttttatttctaaaagcccccttataccccactttgtgcagcaaagatccccgtgcaggtcacagcctgatttgtggccaggctggacaaattcctgaggcacaacttggcttcagttcagatttcaagctgtgttggtgttgggaccagcagaaggcaaacgtccagccaacacacaggactgtaagaggactctgagctacgtgccctgtgaagacccccaggctttgtcataggaggtcgttcagcttccccaaagtcagaggtgatttgatttggggaagactgaatattcacacctaagtcgtgagcatatcctgagttttacttccttatggcttgccctccaagttctctctctcatacacacacacacccttgctccagaatcaccagacacctccatggctccagctatgggaacagctgcattggggctgcctttctgtttggcttaggaacttctgtgcttcttgtggctccactcgcgaggcagctcggaggtgtggactccgattgggctgcaggcagctctgggacggcacagggcgggcgctctgatcagctcgtgtaaaacacaccgtcttcttggcctcctggccagtctttctgcgaatagtcctctccctggccagttgaatgggggaagctgctggcacaggaaggagaggcgatcccggctgaggcttaggaaattgctggagccggctccaagcagataattcactggggaggttttcagagtcaaacatcattctgcctgtgttgggggccaggtgtgtcacacaagcatctcaaagtcaaaagccatctggggctgctgcttctctttctcaggctctggggaaaggaatctccctctcctctcacttgattccaagtgtggttgaattgtctggagcactgggactttttttctcttttccttgatggaccaacagtgcaaatgcaatctcgccatttaactttcaggtcgatttcctttcctgatcagacatctttgtgccccctttaggaaggaaaagaatacacctacgatgtgccaggcactgtgttaggcgcttttatatagatcctcgttaggatgagactaagggatgaggacatctctttataaaaggcccctaagtaatggataaacagaaacacttagaggtgagaaggtctgtcttcaagatccaaggtaagattgccttcagtctgatgtttgttctcaaggacttatcccctacaatattctcccactccatacttctccttctaccccaccatgtgctcccgtgcactcctcagatggtcagaggggtaacccaagtccttagagaatttggggaccaatagaatatgtgatgtgtgaattttctttaaaaaacttaaggagtctttgctaccttctgcttgttgagttgttttggcattcatattaaaagccagcatctcactatttattgacaggttgggctgtgtgtgtgcgcatgtgtgtatacatttccaggcgtgcctgtgtcctgtagctttttaaaaggaaacccagtcatcccactatgaatctggcatcttcttatgcttctagtgttttggccatacatcaaccaaggggtttaatttatccaatgcttgacgacatgttcaggaggggctggatcaaattttgagagggttatgggaaagggagggggagaagaaattgacatttattttattatttattttaaatgtttacatcttctttatgttgtatcaagcctgaatagaaactgatagcattaaaatactccgttcctctctctcttctcgcttcctttttttttttttttaaatttaggataacacatttttgtttctaaagtgatttgtgatttgtgctgtataaactgtataaaaggttctgtttttaaaggtggattttcattcctctggggacagtggtcgccaagacatctacattgtaagagaacacagtggaagatcctgtcctgattctcaaaaattattttctctgtatgattaaaagtttattccatttattttagtttgtgtttacttgattttgaggaagaaaatatttgactttgtgtaaagagtagggtatcagggtgtcttttctgccgtgggagatgtgtatatatatagtattttggtgtatagtagaaaataagctttgtgcatctgtatttgagatatgttaatgacgtggagtaaagtcagctgtaagactctggaggcaaacaagttgtatatggttcatatggctctatggggaatttaattacctttctgggcactttttttttttttttttttttaagtaatggtgaaatggtcccattggagagtctcctaaatagaccttccaggcagaaccgcaagctcaaaatctttgtatagttttgaaaattgaggagtagctttgtttggaagcctttctggtggtggtttttgttgttgttgttgttttgttgttttactatatgtaatacaagcctacagtatttgcactaaagaaagcttgttagaaaaagcttgctgctatggaagaaagaacatattaaaacttctttcccttgcgatttttttgggggaggggggttagcatttccactttcagttgagtagcattttgtagaataaaatgaattaagattgaaaaaaaaa

SEQ ID NO: 59522 - DNA, 5820 bp, Homo sapiens
cgcgggacgggcgcacgccgccttctcctagtcaagtatccgagccgccccgaaactcgggcggcgagtcggccacgggaagtttattctccggctccttttctaaaaggaagaaacagaagtttctcccagcggacagcttttctttccgcctttttggccctgtctgaaatcgggggtccccagggctggcaggccaggctcgctgggctcctaatcttttttttaatttccaatttttgattgggccgtgggtccccgctgagctccggctgcgcgcgggggcgggagggcgcgcgcaggggagggaccgagagacgcgccgactttttagagggagggatcgggtggacaactggtcccgcggcgctcgcagagccggaaagaagtgctgtaagggacgctcgggggacgctgttcctgaggtgtcgccgcctccctgtcctcgccctccgcggtgggggagaaacccaggagcgaagcccagagcccgcggcgcggccggcggacgaacgagcgcgcagcagccggtgcgcggccgcggcgagggcgggggaagaaaaacaccctgtttcctctccggcccccaccgcggatcatgtaccaggattatcccgggaactttgacacctcgtcccggggcagcagcggctctcctgcgcacgccgagtcctactccagcggcggcggcggccagcagaaattccgggtagatatgcctggctcaggcagtgcattcatccccaccatcaacgccatcacgaccagccaggacctgcagtggatggtgcagcccacagtgatcacctccatgtccaacccataccctcgctcgcacccctacagccccctgccgggcctggcctctgtccctggacacatggccctcccaagacctggcgtgatcaagaccattggcaccaccgtgggccgcaggaggagagatgagcagctgtctcctgaagaggaggagaagcgtcgcatccggcgggagaggaacaagctggctgcagccaagtgccggaaccgacgccgggagctgacagagaagctgcaggcggagacagaggagctggaggaggagaagtcaggcctgcagaaggagattgctgagctgcagaaggagaaggagaagctggagttcatgttggtggctcacggcccagtgtgcaagattagccccgaggagcgccgatcgcccccagcccctgggctgcagcccatgcgcagtgggggtggctcggtgggcgctgtagtggtgaaacaggagcccctggaagaggacagcccctcgtcctcgtcggcggggctggacaaggcccagcgctctgtcatcaagcccatcagcattgctgggggcttctacggtgaggagcccctgcacacccccatcgtggtgacctccacacctgctgtcactccgggcacctcgaacctcgtcttcacctatcctagcgtcctggagcaggagtcacccgcatctccctccgaatcctgctccaaggctcaccgcagaagcagtagcagcggggaccaatcatcagactccttgaactcccccactctgctggctctgtaacccagtgcacctccctccccagctccggagggggtcctcctcgctcctccttcccagggaccagcaccttcaagcgctccagggccgtgagggcaagagggggacctgccaccagggagcttcctggctctgggggacccaggtgggacttagcagtgagtattggaagacttgggttgatctcttagaagccatgggacctcctccctcattcatcttgcaagcaaatcccatttcttgaaaagccttggagaactcggtttggtagacttggacatctctctggcttctgaagagcctgaagctggcctggaccattcctgtccctttgttaccatactgtctctggagtgatggtgtccttccctgccccaccacgcatgctcagtgccttttggtttcaccttccctcgacttgaccctttcctcccccagcgtcagtttcactccctcttggtttttatcaaatttgccatgacatttcatctgggtggtctgaatattaaagctcttcatttctggagatggggcagcaggtggctcttctgctggggctgacttgtccagaaggggacaaagtgcaatacagagccttccctaccctgacgcctcccagtcatcatctccagaactcccagcggggctccctgagctctcaaggagatgctgccatcactgggaggctcagaggacccttcctgcccaccttcggagacggcttctggaggaacggcttggccagaagacagggtgtgagtgagacagtggggcacaggttgggtttgccaaacgcctaattaccaggccaggaagcatgccaacaaagccacacgggtgtcctagccagcttcccttcacctggtgtcttgagtagggcgtctcctgtaattactgccttgccattctgcccctggacccttctctccggaccagggaggcgtccctccctaggagccacacattatactccaagtccctgccgggctccgcctttcccccaccctggctctcagggtgacgccacccacagagatttaatgagcgtgggcctggaccttccccagatgctgccaggcagcccctccccaagcctcaaagaagcatttgctgaggatggagaggcaggggagggaggcgggaggccgtcactggagtggcgtctgcagcagctgctgccccagcacccgctcagcctgtcctggctgctcacctccccgcagggcaccgggcctttcctgccctctgtggtcatctgccacctgctggatcaagtgctttctcttttacactcccctgtccccaccccagtgcactcttctggcccaggcagcaagcaagctgtgaacagctggcctgagctgtcgctgtggcttgtggctcatgcgccattcctggttgtctgttgaatctttctggctgctggaattggagataggatgttttgcttcccactgcaggagagctgccccctttcacggggttggggaagggtccccctggcctccagcaggagcacagctcagcagggtccctgctgcccacccctctgagccttttctccccagggtatggctcctgctgagtttcttgtccagcagggccttgacaggaatccagggagtagctcctggccagaaccagcctctgcggggcttgtgctctgcaaagactctgctgctggggattcagctctagaggtcacagtatcctcgtttgaaagataattaagatcccccgtggagaaagcagtgacacattcacacagctgttccctcgcatgttatttcatgaacatgacctgttttcgtgcactagacacacagagtggaacagccgtatgcttaaagtacatgggccagtgggactggaagtgacctgtacaagtgatgcagaaaggagggtttcaaagaaaaaggattttgtttaaaatactttaaaaatgttatttcctgcatcccttggctgtgatgcccctctcccgatttcccaggggctctgggagggacccttctaagaagattgggcagttgggtttctggcttgagatgaatccaagcagcagaatgagccaggagtagcaggagatgggcaaagaaaactggggtgcactcagctctcacaggggtaatcatctcaagtggtatttgtagccaagtgggagctattttcttttttgtgcatatagatatttcttaaatgaagctgctttcttgtcttttatttctaaaagcccccttataccccactttgtgcagcaaagatccccgtgcaggtcacagcctgatttgtggccaggctggacaaattcctgaggcacaacttggcttcagttcagatttcaagctgtgttggtgttgggaccagcagaaggcaaacgtccagccaacacacaggactgtaagaggactctgagctacgtgccctgtgaagacccccaggctttgtcataggaggtcgttcagcttccccaaagtcagaggtgatttgatttggggaagactgaatattcacacctaagtcgtgagcatatcctgagttttacttccttatggcttgccctccaagttctctctctcatacacacacacacccttgctccagaatcaccagacacctccatggctccagctatgggaacagctgcattggggctgcctttctgtttggcttaggaacttctgtgcttcttgtggctccactcgcgaggcagctcggaggtgtggactccgattgggctgcaggcagctctgggacggcacagggcgggcgctctgatcagctcgtgtaaaacacaccgtcttcttggcctcctggccagtctttctgcgaatagtcctctccctggccagttgaatgggggaagctgctggcacaggaaggagaggcgatcccggctgaggcttaggaaattgctggagccggctccaagcagataattcactggggaggttttcagagtcaaacatcattctgcctgtgttgggggccaggtgtgtcacacaagcatctcaaagtcaaaagccatctggggctgctgcttctctttctcaggctctggggaaaggaatctccctctcctctcacttgattccaagtgtggttgaattgtctggagcactgggactttttttctcttttccttgatggaccaacagtgcaaatgcaatctcgccatttaactttcaggtcgatttcctttcctgatcagacatctttgtgccccctttaggaaggaaaagaatacacctacgatgtgccaggcactgtgttaggcgcttttatatagatcctcgttaggatgagactaagggatgaggacatctctttataaaaggcccctaagtaatggataaacagaaacacttagaggtgagaaggtctgtcttcaagatccaaggtaagattgccttcagtctgatgtttgttctcaaggacttatcccctacaatattctcccactccatacttctccttctaccccaccatgtgctcccgtgcactcctcagatggtcagaggggtaacccaagtccttagagaatttggggaccaatagaatatgtgatgtgtgaattttctttaaaaaacttaaggagtctttgctaccttctgcttgttgagttgttttggcattcatattaaaagccagcatctcactatttattgacaggttgggctgtgtgtgtgcgcatgtgtgtatacatttccaggcgtgcctgtgtcctgtagctttttaaaaggaaacccagtcatcccactatgaatctggcatcttcttatgcttctagtgttttggccatacatcaaccaaggggtttaatttatccaatgcttgacgacatgttcaggaggggctggatcaaattttgagagggttatgggaaagggagggggagaagaaattgacatttattttattatttattttaaatgtttacatcttctttatgttgtatcaagcctgaatagaaactgatagcattaaaatactccgttcctctctctcttctcgcttcctttttttttttttttaaatttaggataacacatttttgtttctaaagtgatttgtgatttgtgctgtataaactgtataaaaggttctgtttttaaaggtggattttcattcctctggggacagtggtcgccaagacatctacattgtaagagaacacagtggaagatcctgtcctgattctcaaaaattattttctctgtatgattaaaagtttattccattta

SEQ ID NO: 59523 - DNA, 6395 bp, Homo sapiens
cgcgggacgggcgcacgccgccttctcctagtcaagtatccgagccgccccgaaactcgggcggcgagtcggccacgggaagtttattctccggctccttttctaaaaggaagaaacagaagtttctcccagcggacagcttttctttccgcctttttggccctgtctgaaatcgggggtccccagggctggcaggccaggctcgctgggctcctaatcttttttttaatttccaatttttgattgggccgtgggtccccgctgagctccggctgcgcgcgggggcgggagggcgcgcgcaggggagggaccgagagacgcgccgactttttagagggagggatcgggtggacaactggtcccgcggcgctcgcagagccggaaagaagtgctgtaagggacgctcgggggacgctgttcctgaggtgtcgccgcctccctgtcctcgccctccgcggtgggggagaaacccaggagcgaagcccagagcccgcggcgcggccggcggacgaacgagcgcgcagcagccggtgcgcggccgcggcgagggcgggggaagaaaaacaccctgtttcctctccggcccccaccgcggatcatgtaccaggattatcccgggaactttgacacctcgtcccggggcagcagcggctctcctgcgcacgccgagtcctactccagcggcggcggcggccagcagaaattccgggtagatatgcctggctcaggcagtgcattcatccccaccatcaacgccatcacgaccagccaggacctgcagtggatggtgcagcccacagtgatcacctccatgtccaacccataccctcgctcgcacccctacagccccctgccgggcctggcctctgtccctggacacatggccctcccaagacctggcgtgatcaagaccattggcaccaccgtgggccgcaggaggagagatgagcagctgtctcctgaagaggaggagaagcgtcgcatccggcgggagaggaacaagctggctgcagccaagtgccggaaccgacgccgggagctgacagagaagctgcaggcggagacagaggagctggaggaggagaagtcaggcctgcagaaggagattgctgagctgcagaaggagaaggagaagctggagttcatgttggtggctcacggcccagtgtgcaagattagccccgaggagcgccgatcgcccccagcccctgggctgcagcccatgcgcagtgggggtggctcggtgggcgctgtagtggtgaaacaggagcccctggaagaggacagcccctcgtcctcgtcggcggggctggacaaggcccagcgctctgtcatcaagcccatcagcattgctgggggcttctacggtgaggagcccctgcacacccccatcgtggtgacctccacacctgctgtcactccgggcacctcgaacctcgtcttcacctatcctagcgtcctggagcaggagtcacccgcatctccctccgaatcctgctccaaggctcaccgcagaagcagtagcagcggggaccaatcatcagactccttgaactcccccactctgctggctctgtaacccagtgcacctccctccccagctccggagggggtcctcctcgctcctccttcccagggaccagcaccttcaagcgctccagggccgtgagggcaagagggggacctgccaccagggagcttcctggctctgggggacccaggtgggacttagcagtgagtattggaagacttgggttgatctcttagaagccatgggacctcctccctcattcatcttgcaagcaaatcccatttcttgaaaagccttggagaactcggtttggtagacttggacatctctctggcttctgaagagcctgaagctggcctggaccattcctgtccctttgttaccatactgtctctggagtgatggtgtccttccctgccccaccacgcatgctcagtgccttttggtttcaccttccctcgacttgaccctttcctcccccagcgtcagtttcactccctcttggtttttatcaaatttgccatgacatttcatctgggtggtctgaatattaaagctcttcatttctggagatggggcagcaggtggctcttctgctggggctgacttgtccagaaggggacaaagtgcaatacagagccttccctaccctgacgcctcccagtcatcatctccagaactcccagcggggctccctgagctctcaaggagatgctgccatcactgggaggctcagaggacccttcctgcccaccttcggagacggcttctggaggaacggcttggccagaagacagggtgtgagtgagacagtggggcacaggttgggtttgccaaacgcctaattaccaggccaggaagcatgccaacaaagccacacgggtgtcctagccagcttcccttcacctggtgtcttgagtagggcgtctcctgtaattactgccttgccattctgcccctggacccttctctccggaccagggaggcgtccctccctaggagccacacattatactccaagtccctgccgggctccgcctttcccccaccctggctctcagggtgacgccacccacagagatttaatgagcgtgggcctggaccttccccagatgctgccaggcagcccctccccaagcctcaaagaagcatttgctgaggatggagaggcaggggagggaggcgggaggccgtcactggagtggcgtctgcagcagctgctgccccagcacccgctcagcctgtcctggctgctcacctccccgcagggcaccgggcctttcctgccctctgtggtcatctgccacctgctggatcaagtgctttctcttttacactcccctgtccccaccccagtgcactcttctggcccaggcagcaagcaagctgtgaacagctggcctgagctgtcgctgtggcttgtggctcatgcgccattcctggttgtctgttgaatctttctggctgctggaattggagataggatgttttgcttcccactgcaggagagctgccccctttcacggggttggggaagggtccccctggcctccagcaggagcacagctcagcagggtccctgctgcccacccctctgagccttttctccccagggtatggctcctgctgagtttcttgtccagcagggccttgacaggaatccagggagtagctcctggccagaaccagcctctgcggggcttgtgctctgcaaagactctgctgctggggattcagctctagaggtcacagtatcctcgtttgaaagataattaagatcccccgtggagaaagcagtgacacattcacacagctgttccctcgcatgttatttcatgaacatgacctgttttcgtgcactagacacacagagtggaacagccgtatgcttaaagtacatgggccagtgggactggaagtgacctgtacaagtgatgcagaaaggagggtttcaaagaaaaaggattttgtttaaaatactttaaaaatgttatttcctgcatcccttggctgtgatgcccctctcccgatttcccaggggctctgggagggacccttctaagaagattgggcagttgggtttctggcttgagatgaatccaagcagcagaatgagccaggagtagcaggagatgggcaaagaaaactggggtgcactcagctctcacaggggtaatcatctcaagtggtatttgtagccaagtgggagctattttcttttttgtgcatatagatatttcttaaatgaagctgctttcttgtcttttatttctaaaagcccccttataccccactttgtgcagcaaagatccccgtgcaggtcacagcctgatttgtggccaggctggacaaattcctgaggcacaacttggcttcagttcagatttcaagctgtgttggtgttgggaccagcagaaggcaaacgtccagccaacacacaggactgtaagaggactctgagctacgtgccctgtgaagacccccaggctttgtcataggaggtcgttcagcttccccaaagtcagaggtgatttgatttggggaagactgaatattcacacctaagtcgtgagcatatcctgagttttacttccttatggcttgccctccaagttctctctctcatacacacacacacccttgctccagaatcaccagacacctccatggctccagctatgggaacagctgcattggggctgcctttctgtttggcttaggaacttctgtgcttcttgtggctccactcgcgaggcagctcggaggtgtggactccgattgggctgcaggcagctctgggacggcacagggcgggcgctctgatcagctcgtgtaaaacacaccgtcttcttggcctcctggccagtctttctgcgaatagtcctctccctggccagttgaatgggggaagctgctggcacaggaaggagaggcgatcccggctgaggcttaggaaattgctggagccggctccaagcagataattcactggggaggttttcagagtcaaacatcattctgcctgtgttgggggccaggtgtgtcacacaagcatctcaaagtcaaaagccatctggggctgctgcttctctttctcaggctctggggaaaggaatctccctctcctctcacttgattccaagtgtggttgaattgtctggagcactgggactttttttctcttttccttgatggaccaacagtgcaaatgcaatctcgccatttaactttcaggtcgatttcctttcctgatcagacatctttgtgccccctttaggaaggaaaagaatacacctacgatgtgccaggcactgtgttaggcgcttttatatagatcctcgttaggatgagactaagggatgaggacatctctttataaaaggcccctaagtaatggataaacagaaacacttagaggtgagaaggtctgtcttcaagatccaaggtaagattgccttcagtctgatgtttgttctcaaggacttatcccctacaatattctcccactccatacttctccttctaccccaccatgtgctcccgtgcactcctcagatggtcagaggggtaacccaagtccttagagaatttggggaccaatagaatatgtgatgtgtgaattttctttaaaaaacttaaggagtctttgctaccttctgcttgttgagttgttttggcattcatattaaaagccagcatctcactatttattgacaggttgggctgtgtgtgtgcgcatgtgtgtatacatttccaggcgtgcctgtgtcctgtagctttttaaaaggaaacccagtcatcccactatgaatctggcatcttcttatgcttctagtgttttggccatacatcaaccaaggggtttaatttatccaatgcttgacgacatgttcaggaggggctggatcaaattttgagagggttatgggaaagggagggggagaagaaattgacatttattttattatttattttaaatgtttacatcttctttatgttgtatcaagcctgaatagaaactgatagcattaaaatactccgttcctctctctcttctcgcttcctttttttttttttttaaatttaggataacacatttttgtttctaaagtgatttgtgatttgtgctgtataaactgtataaaaggttctgtttttaaaggtggattttcattcctctggggacagtggtcgccaagacatctacattgtaagagaacacagtggaagatcctgtcctgattctcaaaaattattttctctgtatgattaaaagtttattccatttattttagtttgtgtttacttgattttgaggaagaaaatatttgactttgtgtaaagagtagggtatcagggtgtcttttctgccgtgggagatgtgtatatatatagtattttggtgtatagtagtcagctgtaagactctggaggcaaacaagttgtatatggttcatatggctctatggggaatttaattacctttctgggcactttttttttttttttttttttaagtaatggtgaaatggtcccattggagagtctcctaaatagaccttccaggcagaaccgcaagctcaaaatctttgtatagttttgaaaattgaggagtagctttgtttggaagcctttctggtggtggtttttgttgttgttgttgttttgttgttttactatatgtaatacaagcctacagtatttgcactaaagaaagcttgttagaaaaagcttgctgctatggaagaaagaacatattaaaacttctttcccttgcgatttttttgggggaggggggttagcatttccactttcagttgagtagcattttgtagaataaaatgaattaagattgaaaaaaaaa

SEQ ID NO: 59524 - DNA, 6394 bp, Homo sapiens
cgcgggacgggcgcacgccgccttctcctagtcaagtatccgagccgccccgaaactcgggcggcgagtcggccacgggaagtttattctccggctccttttctaaaaggaagaaacagaagtttctcccagcggacagcttttctttccgcctttttggccctgtctgaaatcgggggtccccagggctggcaggccaggctcgctgggctcctaatcttttttttaatttccaatttttgattgggccgtgggtccccgctgagctccggctgcgcgcgggggcgggagggcgcgcgcaggggagggaccgagagacgcgccgactttttagagggagggatcgggtggacaactggtcccgcggcgctcgcagagccggaaagaagtgctgtaagggacgctcgggggacgctgttcctgaggtgtcgccgcctccctgtcctcgccctccgcggtgggggagaaacccaggagcgaagcccagagcccgcggcgcggccggcggacgaacgagcgcgcagcagccggtgcgcggccgcggcgagggcgggggaagaaaaacaccctgtttcctctccggcccccaccgcggatcatgtaccaggattatcccgggaactttgacacctcgtcccggggcagcagcggctctcctgcgcacgccgagtcctactccagcggcggcggcggccagcagaaattccgggtagatatgcctggctcaggcagtgcattcatccccaccatcaacgccatcacgaccagccaggacctgcagtggatggtgcagcccacagtgatcacctccatgtccaacccataccctcgctcgcacccctacagccccctgccgggcctggcctctgtccctggacacatggccctcccaagacctggcgtgatcaagaccattggcaccaccgtgggccgcaggaggagagatgagcagctgtctcctgaagaggaggagaagcgtcgcatccggcgggagaggaacaagctggctgcagccaagtgccggaaccgacgccgggagctgacagagaagctgcaggcggagacagaggagctggaggaggagaagtcaggcctgcagaaggagattgctgagctgcagaaggagaaggagaagctggagttcatgttggtggctcacggcccagtgtgcaagattagccccgaggagcgccgatcgcccccagcccctgggctgcagcccatgcgcagtgggggtggctcggtgggcgctgtagtggtgaaacaggagcccctggaagaggacagcccctcgtcctcgtcggcggggctggacaaggcccagcgctctgtcatcaagcccatcagcattgctgggggcttctacggtgaggagcccctgcacacccccatcgtggtgacctccacacctgctgtcactccgggcacctcgaacctcgtcttcacctatcctagcgtcctggagcaggagtcacccgcatctccctccgaatcctgctccaaggctcaccgcagaagcagtagcagcggggaccaatcatcagactccttgaactcccccactctgctggctctgtaacccagtgcacctccctccccagctccggagggggtcctcctcgctcctccttcccagggaccagcaccttcaagcgctccagggccgtgagggcaagagggggacctgccaccagggagcttcctggctctgggggacccaggtgggacttagcagtgagtattggaagacttgggttgatctcttagaagccatgggacctcctccctcattcatcttgcaagcaaatcccatttcttgaaaagccttggagaactcggtttggtagacttggacatctctctggcttctgaagagcctgaagctggcctggaccattcctgtccctttgttaccatactgtctctggagtgatggtgtccttccctgccccaccacgcatgctcagtgccttttggtttcaccttccctcgacttgaccctttcctcccccagcgtcagtttcactccctcttggtttttatcaaatttgccatgacatttcatctgggtggtctgaatattaaagctcttcatttctggagatggggcagcaggtggctcttctgctggggctgacttgtccagaaggggacaaagtgcaatacagagccttccctaccctgacgcctcccagtcatcatctccagaactcccagcggggctccctgagctctcaaggagatgctgccatcactgggaggctcagaggacccttcctgcccaccttcggagacggcttctggaggaacggcttggccagaagacagggtgtgagtgagacagtggggcacaggttgggtttgccaaacgcctaattaccaggccaggaagcatgccaacaaagccacacgggtgtcctagccagcttcccttcacctggtgtcttgagtagggcgtctcctgtaattactgccttgccattctgcccctggacccttctctccggaccagggaggcgtccctccctaggagccacacattatactccaagtccctgccgggctccgcctttcccccaccctggctctcagggtgacgccacccacagagatttaatgagcgtgggcctggaccttccccagatgctgccaggcagcccctccccaagcctcaaagaagcatttgctgaggatggagaggcaggggagggaggcgggaggccgtcactggagtggcgtctgcagcagctgctgccccagcacccgctcagcctgtcctggctgctcacctccccgcagggcaccgggcctttcctgccctctgtggtcatctgccacctgctggatcaagtgctttctcttttacactcccctgtccccaccccagtgcactcttctggcccaggcagcaagcaagctgtgaacagctggcctgagctgtcgctgtggcttgtggctcatgcgccattcctggttgtctgttgaatctttctggctgctggaattggagataggatgttttgcttcccactgcaggagagctgccccctttcacggggttggggaagggtccccctggcctccagcaggagcacagctcagcagggtccctgctgcccacccctctgagccttttctccccagggtatggctcctgctgagtttcttgtccagcagggccttgacaggaatccagggagtagctcctggccagaaccagcctctgcggggcttgtgctctgcaaagactctgctgctggggattcagctctagaggtcacagtatcctcgtttgaaagataattaagatcccccgtggagaaagcagtgacacattcacacagctgttccctcgcatgttatttcatgaacatgacctgttttcgtgcactagacacacagagtggaacagccgtatgcttaaagtacatgggccagtgggactggaagtgacctgtacaagtgatgcagaaaggagggtttcaaagaaaaaggattttgtttaaaatactttaaaaatgttatttcctgcatcccttggctgtgatgcccctctcccgatttcccaggggctctgggagggacccttctaagaagattgggcagttgggtttctggcttgagatgaatccaagcagcagaatgagccaggagtagcaggagatgggcaaagaaaactggggtgcactcagctctcacaggggtaatcatctcaagtggtatttgtagccaagtgggagctattttcttttttgtgcatatagatatttcttaaatgaagctgctttcttgtcttttatttctaaaagcccccttataccccactttgtgcagcaaagatccccgtgcaggtcacagcctgatttgtggccaggctggacaaattcctgaggcacaacttggcttcagttcagatttcaagctgtgttggtgttgggaccagcagaaggcaaacgtccagccaacacacaggactgtaagaggactctgagctacgtgccctgtgaagacccccaggctttgtcataggaggtcgttcagcttccccaaagtcagaggtgatttgatttggggaagactgaatattcacacctaagtcgtgagcatatcctgagttttacttccttatggcttgccctccaagttctctctctcatacacacacacacccttgctccagaatcaccagacacctccatggctccagctatgggaacagctgcattggggctgcctttctgtttggcttaggaacttctgtgcttcttgtggctccactcgcgaggcagctcggaggtgtggactccgattgggctgcaggcagctctgggacggcacagggcgggcgctctgatcagctcgtgtaaaacacaccgtcttcttggcctcctggccagtctttctgcgaatagtcctctccctggccagttgaatgggggaagctgctggcacaggaaggagaggcgatcccggctgaggcttaggaaattgctggagccggctccaagcagataattcactggggaggttttcagagtcaaacatcattctgcctgtgttgggggccaggtgtgtcacacaagcatctcaaagtcaaaagccatctggggctgctgcttctctttctcaggctctggggaaaggaatctccctctcctctcacttgattccaagtgtggttgaattgtctggagcactgggactttttttctcttttccttgatggaccaacagtgcaaatgcaatctcgccatttaactttcaggtcgatttcctttcctgatcagacatctttgtgccccctttaggaaggaaaagaatacacctacgatgtgccaggcactgtgttaggcgcttttatatagatcctcgttaggatgagactaagggatgaggacatctctttatcttcaagatccaaggtaagattgccttcagtctgatgtttgttctcaaggacttatcccctacaatattctcccactccatacttctccttctaccccaccatgtgctcccgtgcactcctcagatggtcagaggggtaacccaagtccttagagaatttggggaccaatagaatatgtgatgtgtgaattttctttaaaaaacttaaggagtctttgctaccttctgcttgttgagttgttttggcattcatattaaaagccagcatctcactatttattgacaggttgggctgtgtgtgtgcgcatgtgtgtatacatttccaggcgtgcctgtgtcctgtagctttttaaaaggaaacccagtcatcccactatgaatctggcatcttcttatgcttctagtgttttggccatacatcaaccaaggggtttaatttatccaatgcttgacgacatgttcaggaggggctggatcaaattttgagagggttatgggaaagggagggggagaagaaattgacatttattttattatttattttaaatgtttacatcttctttatgttgtatcaagcctgaatagaaactgatagcattaaaatactccgttcctctctctcttctcgcttcctttttttttttttttaaatttaggataacacatttttgtttctaaagtgatttgtgatttgtgctgtataaactgtataaaaggttctgtttttaaaggtggattttcattcctctggggacagtggtcgccaagacatctacattgtaagagaacacagtggaagatcctgtcctgattctcaaaaattattttctctgtatgattaaaagtttattccatttattttagtttgtgtttacttgattttgaggaagaaaatatttgactttgtgtaaagagtagggtatcagggtgtcttttctgccgtgggagatgtgtatatatatagtattttggtgtatagtagaaaataagctttgtgcatctgtatttgagatatgttaatgacgtggagtaaagtcagctgtaagactctggaggcaaacaagttgtatatggttcatatggctctatggggaatttaattacctttctgggcactttttttttttttttttttttaagtaatggtgaaatggtcccattggagagtctcctaaatagaccttccaggcagaaccgcaagctcaaaatctttgtatagttttgaaaattgaggagtagctttgtttggaagcctttctggtggtggtttttgttgttgttgttgttttgttgttttactatatgtaatacaagcctacagtatttgcactaaagaaagcttgttagaaaaagcttgctgctatggaagaaagaacatattaaaacttctttcccttgcgatttttttgggggaggggggttagcatttccactttcagttgagtagcattttgtagaataaaatgaattaagattgaaaaaaaaa

SEQ ID NO: 59525 - DNA, 6394 bp, Homo sapiens
cgcgggacgggcgcacgccgccttctcctagtcaagtatccgagccgccccgaaactcgggcggcgagtcggccacgggaagtttattctccggctccttttctaaaaggaagaaacagaagtttctcccagcggacagcttttctttccgcctttttggccctgtctgaaatcgggggtccccagggctggcaggccaggctcgctgggctcctaatcttttttttaatttccaatttttgattgggccgtgggtccccgctgagctccggctgcgcgcgggggcgggagggcgcgcgcaggggagggaccgagagacgcgccgactttttagagggagggatcgggtggacaactggtcccgcggcgctcgcagagccggaaagaagtgctgtaagggacgctcgggggacgctgttcctgaggtgtcgccgcctccctgtcctcgccctccgcggtgggggagaaacccaggagcgaagcccagagcccgcggcgcggccggcggacgaacgagcgcgcagcagccggtgcgcggccgcggcgagggcgggggaagaaaaacaccctgtttcctctccggcccccaccgcggatcatgtaccaggattatcccgggaactttgacacctcgtcccggggcagcagcggctctcctgcgcacgccgagtcctactccagcggcggcggcggccagcagaaattccgggtagatatgcctggctcaggcagtgcattcatccccaccatcaacgccatcacgaccagccaggacctgcagtggatggtgcagcccacagtgatcacctccatgtccaacccataccctcgctcgcacccctacagccccctgccgggcctggcctctgtccctggacacatggccctcccaagacctggcgtgatcaagaccattggcaccaccgtgggccgcaggaggagagatgagcagctgtctcctgaagaggaggagaagcgtcgcatccggcgggagaggaacaagctggctgcagccaagtgccggaaccgacgccgggagctgacagagaagctgcaggcggagacagaggagctggaggaggagaagtcaggcctgcagaaggagattgctgagctgcagaaggagaaggagaagctggagttcatgttggtggctcacggcccagtgtgcaagattagccccgaggagcgccgatcgcccccagcccctgggctgcagcccatgcgcagtgggggtggctcggtgggcgctgtagtggtgaaacaggagcccctggaagaggacagcccctcgtcctcgtcggcggggctggacaaggcccagcgctctgtcatcaagcccatcagcattgctgggggcttctacggtgaggagcccctgcacacccccatcgtggtgacctccacacctgctgtcactccgggcacctcgaacctcgtcttcacctatcctagcgtcctggagcaggagtcacccgcatctccctccgaatcctgctccaaggctcaccgcagaagcagtagcagcggggaccaatcatcagactccttgaactcccccactctgctggctctgtaacccagtgcacctccctccccagctccggagggggtcctcctcgctcctccttcccagggaccagcaccttcaagcgctccagggccgtgagggcaagagggggacctgccaccagggagcttcctggctctgggggacccaggtgggacttagcagtgagtattggaagacttgggttgatctcttagaagccatgggacctcctccctcattcatcttgcaagcaaatcccatttcttgaaaagccttggagaactcggtttggtagacttggacatctctctggcttctgaagagcctgaagctggcctggaccattcctgtccctttgttaccatactgtctctggagtgatggtgtccttccctgccccaccacgcatgctcagtgccttttggtttcaccttccctcgacttgaccctttcctcccccagcgtcagtttcactccctcttggtttttatcaaatttgccatgacatttcatctgggtggtctgaatattaaagctcttcatttctggagatggggcagcaggtggctcttctgctggggctgacttgtccagaaggggacaaagtgcaatacagagccttccctaccctgacgcctcccagtcatcatctccagaactcccagcggggctccctgagctctcaaggagatgctgccatcactgggaggctcagaggacccttcctgcccaccttcggagacggcttctggaggaacggcttggccagaagacagggtgtgagtgagacagtggggcacaggttgggtttgccaaacgcctaattaccaggccaggaagcatgccaacaaagccacacgggtgtcctagccagcttcccttcacctggtgtcttgagtagggcgtctcctgtaattactgccttgccattctgcccctggacccttctctccggaccagggaggcgtccctccctaggagccacacattatactccaagtccctgccgggctccgcctttcccccaccctggctctcagggtgacgccacccacagagatttaatgagcgtgggcctggaccttccccagatgctgccaggcagcccctccccaagcctcaaagaagcatttgctgaggatggagaggcaggggagggaggcgggaggccgtcactggagtggcgtctgcagcagctgctgccccagcacccgctcagcctgtcctggctgctcacctccccgcagggcaccgggcctttcctgccctctgtggtcatctgccacctgctggatcaagtgctttctcttttacactcccctgtccccaccccagtgcactcttctggcccaggcagcaagcaagctgtgaacagctggcctgagctgtcgctgtggcttgtggctcatgcgccattcctggttgtctgttgaatctttctggctgctggaattggagataggatgttttgcttcccactgcaggagagctgccccctttcacggggttggggaagggtccccctggcctccagcaggagcacagctcagcagggtccctgctgcccacccctctgagccttttctccccagggtatggctcctgctgagtttcttgtccagcagggccttgacaggaatccagggagtagctcctggccagaaccagcctctgcggggcttgtgctctgcaaagactctgctgctggggattcagctctagaggtcacagtatcctcgtttgaaagataattaagatcccccgtggagaaagcagtgacacattcacacagctgttccctcgcatgttatttcatgaacatgacctgttttcgtgcactagacacacagagtggaacagccgtatgcttaaagtacatgggccagtgggactggaagtgacctgtacaagtgatgcagaaaggagggtttcaaagaaaaaggattttgtttaaaatactttaaaaatgttatttcctgcatcccttggctgtgatgcccctctcccgatttcccaggggctctgggagggacccttctaagaagattgggcagttgggtttctggcttgagatgaatccaagcagcagaatgagccaggagtagcaggagatgggcaaagaaaactggggtgcactcagctctcacaggggtaatcatctcaagtggtatttgtagccaagtgggagctattttcttttttgtgcatatagatatttcttaaatgaagctgctttcttgtcttttatttctaaaagcccccttataccccactttgtgcagcaaagatccccgtgcaggtcacagcctgatttgtggccaggctggacaaattcctgaggcacaacttggcttcagttcagatttcaagctgtgttggtgttgggaccagcagaaggcaaacgtccagccaacacacaggactgtaagaggactctgagctacgtgccctgtgaagacccccaggctttgtcataggaggtcgttcagcttccccaaagtcagaggtgatttgatttggggaagactgaatattcacacctaagtcgtgagcatatcctgagttttacttccttatggcttgccctccaagttctctctctcatacacacacacacccttgctccagaatcaccagacacctccatggctccagctatgggaacagctgcattggggctgcctttctgtttggcttaggaacttctgtgcttcttgtggctccactcgcgaggcagctcggaggtgtggactccgattgggctgcaggcagctctgggacggcacagggcgggcgctctgatcagctcgtgtaaaacacaccgtcttcttggcctcctggccagtctttctgcgaatagtcctctccctggccagttgaatgggggaagctgctggcacaggaaggagaggcgatcccggctgaggcttaggaaattgctggagccggctccaagcagataattcactggggaggttttcagagtcaaacatcattctgcctgtgttgggggccaggtgtgtcacacaagcatctcaaagtcaaaagccatctggggctgctgcttctctttctcaggctctggggaaaggaatctccctctcctctcacttgattccaagtgtggttgaattgtctggagcactgggactttttttctcttttccttgatggaccaacagtgcaaatgcaatctcgccatttaactttcaggtcgatttcctttcctgatcagacatctttgtgccccctttaggaaggaaaagaatacacctacgatgtgccaggcactgtgttaggcgcttttatatagatcctcgttaggatgagactaagggatgaggacatctctttataaaaggcccctaagtaatggataaacagaaacacttagaggtgagaaggtctgtcttcaagatccaaggtaagattgccttcagtctgatgtttgttctcaaggacttatcccctacaatattctcccactccatacttctccttctaccccaccatgtgctcccgtgcactcctcagatggtcagaggggtaacccaagtccttagagaatttggggaccaatagaatatgtgatgtgtgaattttctttaaaaaacttaaggagtctttgctaccttctgcttgttgagttgttttggcattcatattaaaagccagcatctcactatttattgacaggttgggctgtgtgtgtgcgcatgtgtgtatacatttccaggcgtgcctgtgtcctgtagctttttgttttggccatacatcaaccaaggggtttaatttatccaatgcttgacgacatgttcaggaggggctggatcaaattttgagagggttatgggaaagggagggggagaagaaattgacatttattttattatttattttaaatgtttacatcttctttatgttgtatcaagcctgaatagaaactgatagcattaaaatactccgttcctctctctcttctcgcttcctttttttttttttttaaatttaggataacacatttttgtttctaaagtgatttgtgatttgtgctgtataaactgtataaaaggttctgtttttaaaggtggattttcattcctctggggacagtggtcgccaagacatctacattgtaagagaacacagtggaagatcctgtcctgattctcaaaaattattttctctgtatgattaaaagtttattccatttattttagtttgtgtttacttgattttgaggaagaaaatatttgactttgtgtaaagagtagggtatcagggtgtcttttctgccgtgggagatgtgtatatatatagtattttggtgtatagtagaaaataagctttgtgcatctgtatttgagatatgttaatgacgtggagtaaagtcagctgtaagactctggaggcaaacaagttgtatatggttcatatggctctatggggaatttaattacctttctgggcactttttttttttttttttttttaagtaatggtgaaatggtcccattggagagtctcctaaatagaccttccaggcagaaccgcaagctcaaaatctttgtatagttttgaaaattgaggagtagctttgtttggaagcctttctggtggtggtttttgttgttgttgttgttttgttgttttactatatgtaatacaagcctacagtatttgcactaaagaaagcttgttagaaaaagcttgctgctatggaagaaagaacatattaaaacttctttcccttgcgatttttttgggggaggggggttagcatttccactttcagttgagtagcattttgtagaataaaatgaattaagattgaaaaaaaaa

SEQ ID NO: 59526 - DNA, 5602 bp, Homo sapiens
cgcgggacgggcgcacgccgccttctcctagtcaagtatccgagccgccccgaaactcgggcggcgagtcggccacgggaagtttattctccggctccttttctaaaaggaagaaacagaagtttctcccagcggacagcttttctttccgcctttttggccctgtctgaaatcgggggtccccagggctggcaggccaggctcgctgggctcctaatcttttttttaatttccaatttttgattgggccgtgggtccccgctgagctccggctgcgcgcgggggcgggagggcgcgcgcaggggagggaccgagagacgcgccgactttttagagggagggatcgggtggacaactggtcccgcggcgctcgcagagccggaaagaagtgctgtaagggacgctcgggggacgctgttcctgaggtgtcgccgcctccctgtcctcgccctccgcggtgggggagaaacccaggagcgaagcccagagcccgcggcgcggccggcggacgaacgagcgcgcagcagccggtgcgcggccgcggcgagggcgggggaagaaaaacaccctgtttcctctccggcccccaccgcggatcatgtaccaggattatcccgggaactttgacacctcgtcccggggcagcagcggctctcctgcgcacgccgagtcctactccagcggcggcggcggccagcagaaattccgggtagatatgcctggctcaggcagtgcattcatccccaccatcaacgccatcacgaccagccaggacctgcagtggatggtgcagcccacagtgatcacctccatgtccaacccataccctcgctcgcacccctacagccccctgccgggcctggcctctgtccctggacacatggccctcccaagacctggcgtgatcaagaccattggcaccaccgtgggccgcaggaggagagatgagcagctgtctcctgaagaggaggagaagcgtcgcatccggcgggagaggaacaagctggctgcagccaagtgccggaaccgacgccgggagctgacagagaagctgcaggcggagacagaggagctggaggaggagaagtcaggcctgcagaaggagattgctgagctgcagaaggagaaggagaagctggagttcatgttggtggctcacggcccagtgtgcaagattagccccgaggagcgccgatcgcccccagcccctgggctgcagcccatgcgcagtgggggtggctcggtgggcgctgtagtggtgaaacaggagcccctggaagaggacagcccctcgtcctcgtcggcggggctggacaaggcccagcgctctgtcatcaagcccatcagcattgctgggggcttctacggtgaggagcccctgcacacccccatcgtggtgacctccacacctgctgtcactccgggcacctcgaacctcgtcttcacctatcctagcgtcctggagcaggagtcacccgcatctccctccgaatcctgctccaaggctcaccgcagaagcagtagcagcggggaccaatcatcagactccttgaactcccccactctgctggctctgtaacccagtgcacctccctccccagctccggagggggtcctcctcgctcctccttcccagggaccagcaccttcaagcgctccagggccgtgagggcaagagggggacctgccaccagggagcttcctggctctgggggacccaggtgggacttagcagtgagtattggaagacttgggttgatctcttagaagccatgggacctcctccctcattcatcttgcaagcaaatcccatttcttgaaaagccttggagaactcggtttggtagacttggacatctctctggcttctgaagagcctgaagctggcctggaccattcctgtccctttgttaccatactgtctctggagtgatggtgtccttccctgccccaccacgcatgctcagtgccttttggtttcaccttccctcgacttgaccctttcctcccccagcgtcagtttcactccctcttggtttttatcaaatttgccatgacatttcatctgggtggtctgaatattaaagctcttcatttctggagatggggcagcaggtggctcttctgctggggctgacttgtccagaaggggacaaagtgcaatacagagccttccctaccctgacgcctcccagtcatcatctccagaactcccagcggggctccctgagctctcaaggagatgctgccatcactgggaggctcagaggacccttcctgcccaccttcggagacggcttctggaggaacggcttggccagaagacagggtgtgagtgagacagtggggcacaggttgggtttgccaaacgcctaattaccaggccaggaagcatgccaacaaagccacacgggtgtcctagccagcttcccttcacctggtgtcttgagtagggcgtctcctgtaattactgccttgccattctgcccctggacccttctctccggaccagggaggcgtccctccctaggagccacacattatactccaagtccctgccgggctccgcctttcccccaccctggctctcagggtgacgccacccacagagatttaatgagcgtgggcctggaccttccccagatgctgccaggcagcccctccccaagcctcaaagaagcatttgctgaggatggagaggcaggggagggaggcgggaggccgtcactggagtggcgtctgcagcagctgctgccccagcacccgctcagcctgtcctggctgctcacctccccgcagggcaccgggcctttcctgccctctgtggtcatctgccacctgctggatcaagtgctttctcttttacactcccctgtccccaccccagtgcactcttctggcccaggcagcaagcaagctgtgaacagctggcctgagctgtcgctgtggcttgtggctcatgcgccattcctggttgtctgttgaatctttctggctgctggaattggagataggatgttttgcttcccactgcaggagagctgccccctttcacggggttggggaagggtccccctggcctccagcaggagcacagctcagcagggtccctgctgcccacccctctgagccttttctccccagggtatggctcctgctgagtttcttgtccagcagggccttgacaggaatccagggagtagctcctggccagaaccagcctctgcggggcttgtgctctgcaaagactctgctgctggggattcagctctagaggtcacagtatcctcgtttgaaagataattaagatcccccgtggagaaagcagtgacacattcacacagctgttccctcgcatgttatttcatgaacatgacctgttttcgtgcactagacacacagagtggaacagccgtatgcttaaagtacatgggccagtgggactggaagtgacctgtacaagtgatgcagaaaggagggtttcaaagaaaaaggattttgtttaaaatactttaaaaatgttatttcctgcatcccttggctgtgatgcccctctcccgatttcccaggggctctgggagggacccttctaagaagattgggcagttgggtttctggcttgagatgaatccaagcagcagaatgagccaggagtagcaggagatgggcaaagaaaactggggtgcactcagctctcacaggggtaatcatctcaagtggtatttgtagccaagtgggagctattttcttttttgtgcatatagatatttcttaaatgaagctgctttcttgtcttttatttctaaaagcccccttataccccactttgtgcagcaaagatccccgtgcaggtcacagcctgatttgtggccaggctggacaaattcctgaggcacaacttggcttcagttcagatttcaagctgtgttggtgttgggaccagcagaaggcaaacgtccagccaacacacaggactgtaagaggactctgagctacgtgccctgtgaagacccccaggctttgtcataggaggtcgttcagcttccccaaagtcagaggtgatttgatttggggaagactgaatattcacacctaagtcgtgagcatatcctgagttttacttccttatggcttgccctccaagttctctctctcatacacacacacacccttgctccagaatcaccagacacctccatggctccagctatgggaacagctgcattggggctgcctttctgtttggcttaggaacttctgtgcttcttgtggctccactcgcgaggcagctcggaggtgtggactccgattgggctgcaggcagctctgggacggcacagggcgggcgctctgatcagctcgtgtaaaacacaccgtcttcttggcctcctggccagtctttctgcgaatagtcctctccctggccagttgaatgggggaagctgctggcacaggaaggagaggcgatcccggctgaggcttaggaaattgctggagccggctccaagcagataattcactggggaggttttcagagtcaaacatcattctgcctgtgttgggggccaggtgtgtcacacaagcatctcaaagtcaaaagccatctggggctgctgcttctctttctcaggctctggggaaaggaatctccctctcctctcacttgattccaagtgtggttgaattgtctggagcactgggactttttttctcttttccttgatggaccaacagtgcaaatgcaatctcgccatttaactttcaggtcgatttcctttcctgatcagacatctttgtgccccctttaggaaggaaaagaatacacctacgatgtgccaggcactgtgttaggcgcttttatatagatcctcgttaggatgagactaagggatgaggacatctctttataaaaggcccctaagtaatggataaacagaaacacttagaggtgagaaggtctgtcttcaagatccaaggtaagattgccttcagtctgatgtttgttctcaaggacttatcccctacaatattctcccactccatacttctccttctaccccaccatgtgctcccgtgcactcctcagatggtcagaggggtaacccaagtccttagagaatttggggaccaatagaatatgtgatgtgtgaattttctttaaaaaacttaaggagtctttgctaccttctgcttgttgagttgttttggcattcatattaaaagccagcatctcactatttattgacaggttgggctgtgtgtgtgcgcatgtgtgtatacatttccaggcgtgcctgtgtcctgtagctttttaaaaggaaacccagtcatcccactatgaatctggcatcttcttatgcttctagtgttttggccatacatcaaccaaggggtttaatttatccaatgcttgacgacatgttcaggaggggctggatcaaattttgagagggttatgggaaagggagggggagaagaaattgacatttattttattatttattttaaatgtttacatcttctttatgttgtatcaagcctgaatagaaactgatagcattaaaatactccgttcctcatcctgggaggggtcctcagacac

SEQ ID NO: 59527 - DNA, 5808 bp, Homo sapiens
cgcctgcccattcggcccggcagtgtgtgaggcgcctttcaaaccggagggattggcaagaaattccgggtagatatgcctggctcaggcagtgcattcatccccaccatcaacgccatcacgaccagccaggacctgcagtggatggtgcagcccacagtgatcacctccatgtccaacccataccctcgctcgcacccctacagccccctgccgggcctggcctctgtccctggacacatggccctcccaagacctggcgtgatcaagaccattggcaccaccgtgggccgcaggaggagagatgagcagctgtctcctgaagaggaggagaagcgtcgcatccggcgggagaggaacaagctggctgcagccaagtgccggaaccgacgccgggagctgacagagaagctgcaggcggagacagaggagctggaggaggagaagtcaggcctgcagaaggagattgctgagctgcagaaggagaaggagaagctggagttcatgttggtggctcacggcccagtgtgcaagattagccccgaggagcgccgatcgcccccagcccctgggctgcagcccatgcgcagtgggggtggctcggtgggcgctgtagtggtgaaacaggagcccctggaagaggacagcccctcgtcctcgtcggcggggctggacaaggcccagcgctctgtcatcaagcccatcagcattgctgggggcttctacggtgaggagcccctgcacacccccatcgtggtgacctccacacctgctgtcactccgggcacctcgaacctcgtcttcacctatcctagcgtcctggagcaggagtcacccgcatctccctccgaatcctgctccaaggctcaccgcagaagcagtagcagcggggaccaatcatcagactccttgaactcccccactctgctggctctgtaacccagtgcacctccctccccagctccggagggggtcctcctcgctcctccttcccagggaccagcaccttcaagcgctccagggccgtgagggcaagagggggacctgccaccagggagcttcctggctctgggggacccaggtgggacttagcagtgagtattggaagacttgggttgatctcttagaagccatgggacctcctccctcattcatcttgcaagcaaatcccatttcttgaaaagccttggagaactcggtttggtagacttggacatctctctggcttctgaagagcctgaagctggcctggaccattcctgtccctttgttaccatactgtctctggagtgatggtgtccttccctgccccaccacgcatgctcagtgccttttggtttcaccttccctcgacttgaccctttcctcccccagcgtcagtttcactccctcttggtttttatcaaatttgccatgacatttcatctgggtggtctgaatattaaagctcttcatttctggagatggggcagcaggtggctcttctgctggggctgacttgtccagaaggggacaaagtgcaatacagagccttccctaccctgacgcctcccagtcatcatctccagaactcccagcggggctccctgagctctcaaggagatgctgccatcactgggaggctcagaggacccttcctgcccaccttcggagacggcttctggaggaacggcttggccagaagacagggtgtgagtgagacagtggggcacaggttgggtttgccaaacgcctaattaccaggccaggaagcatgccaacaaagccacacgggtgtcctagccagcttcccttcacctggtgtcttgagtagggcgtctcctgtaattactgccttgccattctgcccctggacccttctctccggaccagggaggcgtccctccctaggagccacacattatactccaagtccctgccgggctccgcctttcccccaccctggctctcagggtgacgccacccacagagatttaatgagcgtgggcctggaccttccccagatgctgccaggcagcccctccccaagcctcaaagaagcatttgctgaggatggagaggcaggggagggaggcgggaggccgtcactggagtggcgtctgcagcagctgctgccccagcacccgctcagcctgtcctggctgctcacctccccgcagggcaccgggcctttcctgccctctgtggtcatctgccacctgctggatcaagtgctttctcttttacactcccctgtccccaccccagtgcactcttctggcccaggcagcaagcaagctgtgaacagctggcctgagctgtcgctgtggcttgtggctcatgcgccattcctggttgtctgttgaatctttctggctgctggaattggagataggatgttttgcttcccactgcaggagagctgccccctttcacggggttggggaagggtccccctggcctccagcaggagcacagctcagcagggtccctgctgcccacccctctgagccttttctccccagggtatggctcctgctgagtttcttgtccagcagggccttgacaggaatccagggagtagctcctggccagaaccagcctctgcggggcttgtgctctgcaaagactctgctgctggggattcagctctagaggtcacagtatcctcgtttgaaagataattaagatcccccgtggagaaagcagtgacacattcacacagctgttccctcgcatgttatttcatgaacatgacctgttttcgtgcactagacacacagagtggaacagccgtatgcttaaagtacatgggccagtgggactggaagtgacctgtacaagtgatgcagaaaggagggtttcaaagaaaaaggattttgtttaaaatactttaaaaatgttatttcctgcatcccttggctgtgatgcccctctcccgatttcccaggggctctgggagggacccttctaagaagattgggcagttgggtttctggcttgagatgaatccaagcagcagaatgagccaggagtagcaggagatgggcaaagaaaactggggtgcactcagctctcacaggggtaatcatctcaagtggtatttgtagccaagtgggagctattttcttttttgtgcatatagatatttcttaaatgaagctgctttcttgtcttttatttctaaaagcccccttataccccactttgtgcagcaaagatccccgtgcaggtcacagcctgatttgtggccaggctggacaaattcctgaggcacaacttggcttcagttcagatttcaagctgtgttggtgttgggaccagcagaaggcaaacgtccagccaacacacaggactgtaagaggactctgagctacgtgccctgtgaagacccccaggctttgtcataggaggtcgttcagcttccccaaagtcagaggtgatttgatttggggaagactgaatattcacacctaagtcgtgagcatatcctgagttttacttccttatggcttgccctccaagttctctctctcatacacacacacacccttgctccagaatcaccagacacctccatggctccagctatgggaacagctgcattggggctgcctttctgtttggcttaggaacttctgtgcttcttgtggctccactcgcgaggcagctcggaggtgtggactccgattgggctgcaggcagctctgggacggcacagggcgggcgctctgatcagctcgtgtaaaacacaccgtcttcttggcctcctggccagtctttctgcgaatagtcctctccctggccagttgaatgggggaagctgctggcacaggaaggagaggcgatcccggctgaggcttaggaaattgctggagccggctccaagcagataattcactggggaggttttcagagtcaaacatcattctgcctgtgttgggggccaggtgtgtcacacaagcatctcaaagtcaaaagccatctggggctgctgcttctctttctcaggctctggggaaaggaatctccctctcctctcacttgattccaagtgtggttgaattgtctggagcactgggactttttttctcttttccttgatggaccaacagtgcaaatgcaatctcgccatttaactttcaggtcgatttcctttcctgatcagacatctttgtgccccctttaggaaggaaaagaatacacctacgatgtgccaggcactgtgttaggcgcttttatatagatcctcgttaggatgagactaagggatgaggacatctctttataaaaggcccctaagtaatggataaacagaaacacttagaggtgagaaggtctgtcttcaagatccaaggtaagattgccttcagtctgatgtttgttctcaaggacttatcccctacaatattctcccactccatacttctccttctaccccaccatgtgctcccgtgcactcctcagatggtcagaggggtaacccaagtccttagagaatttggggaccaatagaatatgtgatgtgtgaattttctttaaaaaacttaaggagtctttgctaccttctgcttgttgagttgttttggcattcatattaaaagccagcatctcactatttattgacaggttgggctgtgtgtgtgcgcatgtgtgtatacatttccaggcgtgcctgtgtcctgtagctttttaaaaggaaacccagtcatcccactatgaatctggcatcttcttatgcttctagtgttttggccatacatcaaccaaggggtttaatttatccaatgcttgacgacatgttcaggaggggctggatcaaattttgagagggttatgggaaagggagggggagaagaaattgacatttattttattatttattttaaatgtttacatcttctttatgttgtatcaagcctgaatagaaactgatagcattaaaatactccgttcctctctctcttctcgcttcctttttttttttttttaaatttaggataacacatttttgtttctaaagtgatttgtgatttgtgctgtataaactgtataaaaggttctgtttttaaaggtggattttcattcctctggggacagtggtcgccaagacatctacattgtaagagaacacagtggaagatcctgtcctgattctcaaaaattattttctctgtatgattaaaagtttattccatttattttagtttgtgtttacttgattttgaggaagaaaatatttgactttgtgtaaagagtagggtatcagggtgtcttttctgccgtgggagatgtgtatatatatagtattttggtgtatagtagaaaataagctttgtgcatctgtatttgagatatgttaatgacgtggagtaaagtcagctgtaagactctggaggcaaacaagttgtatatggttcatatggctctatggggaatttaattacctttctgggcactttttttttttttttttttttaagtaatggtgaaatggtcccattggagagtctcctaaatagaccttccaggcagaaccgcaagctcaaaatctttgtatagttttgaaaattgaggagtagctttgtttggaagcctttctggtggtggtttttgttgttgttgttgttttgttgttttactatatgtaatacaagcctacagtatttgcactaaagaaagcttgttagaaaaagcttgctgctatggaagaaagaacatattaaaacttctttcccttgcgatttttttgggggaggggggttagcatttccactttcagttgagtagcattttgtagaataaaatgaattaagattgaaaaaaaaa

SEQ ID NO: 59528 - DNA, 5896 bp, Homo sapiens
tgccgcctttacccttctcccccctccgccgcccccacgcggcgctcccccggggaggggggaggacggggagcgggggagatagagagacagaaggcgctgtgttgggaaggaccaatcctactccaccgggtggggcggccaacagaaattccgggtagatatgcctggctcaggcagtgcattcatccccaccatcaacgccatcacgaccagccaggacctgcagtggatggtgcagcccacagtgatcacctccatgtccaacccataccctcgctcgcacccctacagccccctgccgggcctggcctctgtccctggacacatggccctcccaagacctggcgtgatcaagaccattggcaccaccgtgggccgcaggaggagagatgagcagctgtctcctgaagaggaggagaagcgtcgcatccggcgggagaggaacaagctggctgcagccaagtgccggaaccgacgccgggagctgacagagaagctgcaggcggagacagaggagctggaggaggagaagtcaggcctgcagaaggagattgctgagctgcagaaggagaaggagaagctggagttcatgttggtggctcacggcccagtgtgcaagattagccccgaggagcgccgatcgcccccagcccctgggctgcagcccatgcgcagtgggggtggctcggtgggcgctgtagtggtgaaacaggagcccctggaagaggacagcccctcgtcctcgtcggcggggctggacaaggcccagcgctctgtcatcaagcccatcagcattgctgggggcttctacggtgaggagcccctgcacacccccatcgtggtgacctccacacctgctgtcactccgggcacctcgaacctcgtcttcacctatcctagcgtcctggagcaggagtcacccgcatctccctccgaatcctgctccaaggctcaccgcagaagcagtagcagcggggaccaatcatcagactccttgaactcccccactctgctggctctgtaacccagtgcacctccctccccagctccggagggggtcctcctcgctcctccttcccagggaccagcaccttcaagcgctccagggccgtgagggcaagagggggacctgccaccagggagcttcctggctctgggggacccaggtgggacttagcagtgagtattggaagacttgggttgatctcttagaagccatgggacctcctccctcattcatcttgcaagcaaatcccatttcttgaaaagccttggagaactcggtttggtagacttggacatctctctggcttctgaagagcctgaagctggcctggaccattcctgtccctttgttaccatactgtctctggagtgatggtgtccttccctgccccaccacgcatgctcagtgccttttggtttcaccttccctcgacttgaccctttcctcccccagcgtcagtttcactccctcttggtttttatcaaatttgccatgacatttcatctgggtggtctgaatattaaagctcttcatttctggagatggggcagcaggtggctcttctgctggggctgacttgtccagaaggggacaaagtgcaatacagagccttccctaccctgacgcctcccagtcatcatctccagaactcccagcggggctccctgagctctcaaggagatgctgccatcactgggaggctcagaggacccttcctgcccaccttcggagacggcttctggaggaacggcttggccagaagacagggtgtgagtgagacagtggggcacaggttgggtttgccaaacgcctaattaccaggccaggaagcatgccaacaaagccacacgggtgtcctagccagcttcccttcacctggtgtcttgagtagggcgtctcctgtaattactgccttgccattctgcccctggacccttctctccggaccagggaggcgtccctccctaggagccacacattatactccaagtccctgccgggctccgcctttcccccaccctggctctcagggtgacgccacccacagagatttaatgagcgtgggcctggaccttccccagatgctgccaggcagcccctccccaagcctcaaagaagcatttgctgaggatggagaggcaggggagggaggcgggaggccgtcactggagtggcgtctgcagcagctgctgccccagcacccgctcagcctgtcctggctgctcacctccccgcagggcaccgggcctttcctgccctctgtggtcatctgccacctgctggatcaagtgctttctcttttacactcccctgtccccaccccagtgcactcttctggcccaggcagcaagcaagctgtgaacagctggcctgagctgtcgctgtggcttgtggctcatgcgccattcctggttgtctgttgaatctttctggctgctggaattggagataggatgttttgcttcccactgcaggagagctgccccctttcacggggttggggaagggtccccctggcctccagcaggagcacagctcagcagggtccctgctgcccacccctctgagccttttctccccagggtatggctcctgctgagtttcttgtccagcagggccttgacaggaatccagggagtagctcctggccagaaccagcctctgcggggcttgtgctctgcaaagactctgctgctggggattcagctctagaggtcacagtatcctcgtttgaaagataattaagatcccccgtggagaaagcagtgacacattcacacagctgttccctcgcatgttatttcatgaacatgacctgttttcgtgcactagacacacagagtggaacagccgtatgcttaaagtacatgggccagtgggactggaagtgacctgtacaagtgatgcagaaaggagggtttcaaagaaaaaggattttgtttaaaatactttaaaaatgttatttcctgcatcccttggctgtgatgcccctctcccgatttcccaggggctctgggagggacccttctaagaagattgggcagttgggtttctggcttgagatgaatccaagcagcagaatgagccaggagtagcaggagatgggcaaagaaaactggggtgcactcagctctcacaggggtaatcatctcaagtggtatttgtagccaagtgggagctattttcttttttgtgcatatagatatttcttaaatgaagctgctttcttgtcttttatttctaaaagcccccttataccccactttgtgcagcaaagatccccgtgcaggtcacagcctgatttgtggccaggctggacaaattcctgaggcacaacttggcttcagttcagatttcaagctgtgttggtgttgggaccagcagaaggcaaacgtccagccaacacacaggactgtaagaggactctgagctacgtgccctgtgaagacccccaggctttgtcataggaggtcgttcagcttccccaaagtcagaggtgatttgatttggggaagactgaatattcacacctaagtcgtgagcatatcctgagttttacttccttatggcttgccctccaagttctctctctcatacacacacacacccttgctccagaatcaccagacacctccatggctccagctatgggaacagctgcattggggctgcctttctgtttggcttaggaacttctgtgcttcttgtggctccactcgcgaggcagctcggaggtgtggactccgattgggctgcaggcagctctgggacggcacagggcgggcgctctgatcagctcgtgtaaaacacaccgtcttcttggcctcctggccagtctttctgcgaatagtcctctccctggccagttgaatgggggaagctgctggcacaggaaggagaggcgatcccggctgaggcttaggaaattgctggagccggctccaagcagataattcactggggaggttttcagagtcaaacatcattctgcctgtgttgggggccaggtgtgtcacacaagcatctcaaagtcaaaagccatctggggctgctgcttctctttctcaggctctggggaaaggaatctccctctcctctcacttgattccaagtgtggttgaattgtctggagcactgggactttttttctcttttccttgatggaccaacagtgcaaatgcaatctcgccatttaactttcaggtcgatttcctttcctgatcagacatctttgtgccccctttaggaaggaaaagaatacacctacgatgtgccaggcactgtgttaggcgcttttatatagatcctcgttaggatgagactaagggatgaggacatctctttataaaaggcccctaagtaatggataaacagaaacacttagaggtgagaaggtctgtcttcaagatccaaggtaagattgccttcagtctgatgtttgttctcaaggacttatcccctacaatattctcccactccatacttctccttctaccccaccatgtgctcccgtgcactcctcagatggtcagaggggtaacccaagtccttagagaatttggggaccaatagaatatgtgatgtgtgaattttctttaaaaaacttaaggagtctttgctaccttctgcttgttgagttgttttggcattcatattaaaagccagcatctcactatttattgacaggttgggctgtgtgtgtgcgcatgtgtgtatacatttccaggcgtgcctgtgtcctgtagctttttaaaaggaaacccagtcatcccactatgaatctggcatcttcttatgcttctagtgttttggccatacatcaaccaaggggtttaatttatccaatgcttgacgacatgttcaggaggggctggatcaaattttgagagggttatgggaaagggagggggagaagaaattgacatttattttattatttattttaaatgtttacatcttctttatgttgtatcaagcctgaatagaaactgatagcattaaaatactccgttcctctctctcttctcgcttcctttttttttttttttaaatttaggataacacatttttgtttctaaagtgatttgtgatttgtgctgtataaactgtataaaaggttctgtttttaaaggtggattttcattcctctggggacagtggtcgccaagacatctacattgtaagagaacacagtggaagatcctgtcctgattctcaaaaattattttctctgtatgattaaaagtttattccatttattttagtttgtgtttacttgattttgaggaagaaaatatttgactttgtgtaaagagtagggtatcagggtgtcttttctgccgtgggagatgtgtatatatatagtattttggtgtatagtagaaaataagctttgtgcatctgtatttgagatatgttaatgacgtggagtaaagtcagctgtaagactctggaggcaaacaagttgtatatggttcatatggctctatggggaatttaattacctttctgggcactttttttttttttttttttttaagtaatggtgaaatggtcccattggagagtctcctaaatagaccttccaggcagaaccgcaagctcaaaatctttgtatagttttgaaaattgaggagtagctttgtttggaagcctttctggtggtggtttttgttgttgttgttgttttgttgttttactatatgtaatacaagcctacagtatttgcactaaagaaagcttgttagaaaaagcttgctgctatggaagaaagaacatattaaaacttctttcccttgcgatttttttgggggaggggggttagcatttccactttcagttgagtagcattttgtagaataaaatgaattaagattgaaaaaaaaa

SEQ ID NO: 59529 - DNA, 5845 bp, Homo sapiens
  misc_feature (92)..(92): n is a, c, g, or t
  misc_feature (94)..(94): n is a, c, g, or t
cgaaacgacggaaacccgcactcgcgtcctctaacgcaaatgaccatctttggcaacgtgcgccaatggaacagaccaagggcgctgggccngngggaaattccgggtagatatgcctggctcaggcagtgcattcatccccaccatcaacgccatcacgaccagccaggacctgcagtggatggtgcagcccacagtgatcacctccatgtccaacccataccctcgctcgcacccctacagccccctgccgggcctggcctctgtccctggacacatggccctcccaagacctggcgtgatcaagaccattggcaccaccgtgggccgcaggaggagagatgagcagctgtctcctgaagaggaggagaagcgtcgcatccggcgggagaggaacaagctggctgcagccaagtgccggaaccgacgccgggagctgacagagaagctgcaggcggagacagaggagctggaggaggagaagtcaggcctgcagaaggagattgctgagctgcagaaggagaaggagaagctggagttcatgttggtggctcacggcccagtgtgcaagattagccccgaggagcgccgatcgcccccagcccctgggctgcagcccatgcgcagtgggggtggctcggtgggcgctgtagtggtgaaacaggagcccctggaagaggacagcccctcgtcctcgtcggcggggctggacaaggcccagcgctctgtcatcaagcccatcagcattgctgggggcttctacggtgaggagcccctgcacacccccatcgtggtgacctccacacctgctgtcactccgggcacctcgaacctcgtcttcacctatcctagcgtcctggagcaggagtcacccgcatctccctccgaatcctgctccaaggctcaccgcagaagcagtagcagcggggaccaatcatcagactccttgaactcccccactctgctggctctgtaacccagtgcacctccctccccagctccggagggggtcctcctcgctcctccttcccagggaccagcaccttcaagcgctccagggccgtgagggcaagagggggacctgccaccagggagcttcctggctctgggggacccaggtgggacttagcagtgagtattggaagacttgggttgatctcttagaagccatgggacctcctccctcattcatcttgcaagcaaatcccatttcttgaaaagccttggagaactcggtttggtagacttggacatctctctggcttctgaagagcctgaagctggcctggaccattcctgtccctttgttaccatactgtctctggagtgatggtgtccttccctgccccaccacgcatgctcagtgccttttggtttcaccttccctcgacttgaccctttcctcccccagcgtcagtttcactccctcttggtttttatcaaatttgccatgacatttcatctgggtggtctgaatattaaagctcttcatttctggagatggggcagcaggtggctcttctgctggggctgacttgtccagaaggggacaaagtgcaatacagagccttccctaccctgacgcctcccagtcatcatctccagaactcccagcggggctccctgagctctcaaggagatgctgccatcactgggaggctcagaggacccttcctgcccaccttcggagacggcttctggaggaacggcttggccagaagacagggtgtgagtgagacagtggggcacaggttgggtttgccaaacgcctaattaccaggccaggaagcatgccaacaaagccacacgggtgtcctagccagcttcccttcacctggtgtcttgagtagggcgtctcctgtaattactgccttgccattctgcccctggacccttctctccggaccagggaggcgtccctccctaggagccacacattatactccaagtccctgccgggctccgcctttcccccaccctggctctcagggtgacgccacccacagagatttaatgagcgtgggcctggaccttccccagatgctgccaggcagcccctccccaagcctcaaagaagcatttgctgaggatggagaggcaggggagggaggcgggaggccgtcactggagtggcgtctgcagcagctgctgccccagcacccgctcagcctgtcctggctgctcacctccccgcagggcaccgggcctttcctgccctctgtggtcatctgccacctgctggatcaagtgctttctcttttacactcccctgtccccaccccagtgcactcttctggcccaggcagcaagcaagctgtgaacagctggcctgagctgtcgctgtggcttgtggctcatgcgccattcctggttgtctgttgaatctttctggctgctggaattggagataggatgttttgcttcccactgcaggagagctgccccctttcacggggttggggaagggtccccctggcctccagcaggagcacagctcagcagggtccctgctgcccacccctctgagccttttctccccagggtatggctcctgctgagtttcttgtccagcagggccttgacaggaatccagggagtagctcctggccagaaccagcctctgcggggcttgtgctctgcaaagactctgctgctggggattcagctctagaggtcacagtatcctcgtttgaaagataattaagatcccccgtggagaaagcagtgacacattcacacagctgttccctcgcatgttatttcatgaacatgacctgttttcgtgcactagacacacagagtggaacagccgtatgcttaaagtacatgggccagtgggactggaagtgacctgtacaagtgatgcagaaaggagggtttcaaagaaaaaggattttgtttaaaatactttaaaaatgttatttcctgcatcccttggctgtgatgcccctctcccgatttcccaggggctctgggagggacccttctaagaagattgggcagttgggtttctggcttgagatgaatccaagcagcagaatgagccaggagtagcaggagatgggcaaagaaaactggggtgcactcagctctcacaggggtaatcatctcaagtggtatttgtagccaagtgggagctattttcttttttgtgcatatagatatttcttaaatgaagctgctttcttgtcttttatttctaaaagcccccttataccccactttgtgcagcaaagatccccgtgcaggtcacagcctgatttgtggccaggctggacaaattcctgaggcacaacttggcttcagttcagatttcaagctgtgttggtgttgggaccagcagaaggcaaacgtccagccaacacacaggactgtaagaggactctgagctacgtgccctgtgaagacccccaggctttgtcataggaggtcgttcagcttccccaaagtcagaggtgatttgatttggggaagactgaatattcacacctaagtcgtgagcatatcctgagttttacttccttatggcttgccctccaagttctctctctcatacacacacacacccttgctccagaatcaccagacacctccatggctccagctatgggaacagctgcattggggctgcctttctgtttggcttaggaacttctgtgcttcttgtggctccactcgcgaggcagctcggaggtgtggactccgattgggctgcaggcagctctgggacggcacagggcgggcgctctgatcagctcgtgtaaaacacaccgtcttcttggcctcctggccagtctttctgcgaatagtcctctccctggccagttgaatgggggaagctgctggcacaggaaggagaggcgatcccggctgaggcttaggaaattgctggagccggctccaagcagataattcactggggaggttttcagagtcaaacatcattctgcctgtgttgggggccaggtgtgtcacacaagcatctcaaagtcaaaagccatctggggctgctgcttctctttctcaggctctggggaaaggaatctccctctcctctcacttgattccaagtgtggttgaattgtctggagcactgggactttttttctcttttccttgatggaccaacagtgcaaatgcaatctcgccatttaactttcaggtcgatttcctttcctgatcagacatctttgtgccccctttaggaaggaaaagaatacacctacgatgtgccaggcactgtgttaggcgcttttatatagatcctcgttaggatgagactaagggatgaggacatctctttataaaaggcccctaagtaatggataaacagaaacacttagaggtgagaaggtctgtcttcaagatccaaggtaagattgccttcagtctgatgtttgttctcaaggacttatcccctacaatattctcccactccatacttctccttctaccccaccatgtgctcccgtgcactcctcagatggtcagaggggtaacccaagtccttagagaatttggggaccaatagaatatgtgatgtgtgaattttctttaaaaaacttaaggagtctttgctaccttctgcttgttgagttgttttggcattcatattaaaagccagcatctcactatttattgacaggttgggctgtgtgtgtgcgcatgtgtgtatacatttccaggcgtgcctgtgtcctgtagctttttaaaaggaaacccagtcatcccactatgaatctggcatcttcttatgcttctagtgttttggccatacatcaaccaaggggtttaatttatccaatgcttgacgacatgttcaggaggggctggatcaaattttgagagggttatgggaaagggagggggagaagaaattgacatttattttattatttattttaaatgtttacatcttctttatgttgtatcaagcctgaatagaaactgatagcattaaaatactccgttcctctctctcttctcgcttcctttttttttttttttaaatttaggataacacatttttgtttctaaagtgatttgtgatttgtgctgtataaactgtataaaaggttctgtttttaaaggtggattttcattcctctggggacagtggtcgccaagacatctacattgtaagagaacacagtggaagatcctgtcctgattctcaaaaattattttctctgtatgattaaaagtttattccatttattttagtttgtgtttacttgattttgaggaagaaaatatttgactttgtgtaaagagtagggtatcagggtgtcttttctgccgtgggagatgtgtatatatatagtattttggtgtatagtagaaaataagctttgtgcatctgtatttgagatatgttaatgacgtggagtaaagtcagctgtaagactctggaggcaaacaagttgtatatggttcatatggctctatggggaatttaattacctttctgggcactttttttttttttttttttttaagtaatggtgaaatggtcccattggagagtctcctaaatagaccttccaggcagaaccgcaagctcaaaatctttgtatagttttgaaaattgaggagtagctttgtttggaagcctttctggtggtggtttttgttgttgttgttgttttgttgttttactatatgtaatacaagcctacagtatttgcactaaagaaagcttgttagaaaaagcttgctgctatggaagaaagaacatattaaaacttctttcccttgcgatttttttgggggaggggggttagcatttccactttcagttgagtagcattttgtagaataaaatgaattaagattgaaaaaaaaa

SEQ ID NO: 59530 - DNA, 5241 bp, Homo sapiens
cgcgggacgggcgcacgccgccttctcctagtcaagtatccgagccgccccgaaactcgggcggcgagtcggccacgggaagtttattctccggctccttttctaaaaggaagaaacagaagtttctcccagcggacagcttttctttccgcctttttggccctgtctgaaatcgggggtccccagggctggcaggccaggctcgctgggctcctaatcttttttttaatttccaatttttgattgggccgtgggtccccgctgagctccggctgcgcgcgggggcgggagggcgcgcgcaggggagggaccgagagacgcgccgactttttagagggagggatcgggtggacaactggtcccgcggcgctcgcagagccggaaagaagtgctgtaagggacgctcgggggacgctgttcctgaggtgtcgccgcctccctgtcctcgccctccgcggtgggggagaaacccaggagcgaagcccagagcccgcggcgcggccggcggacgaacgagcgcgcagcagccggtgcgcggccgcggcgagggcgggggaagaaaaacaccctgtttcctctccggcccccaccgcggatcatgtaccaggattatcccgggaactttgacacctcgtcccggggcagcagcggctctcctgcgcacgccgagtcctactccagcggcggcggcggccagcagaaattccgggtagatatgcctggctcaggcagtgcattcatccccaccatcaacgccatcacgaccagccaggacctgcagtggatggtgcagcccacagtgatcacctccatgtccaacccataccctcgctcgcacccctacagccccctgccgggcctggcctctgtccctggacacatggccctcccaagacctggcgtgatcaagaccattggcaccaccgtgggccgcaggaggagagatgagcagctgtctcctgaagaggaggagaagcgtcgcatccggcgggagaggaacaagctggctgcagccaagtgccggaaccgacgccgggagctgacagagaagctgcaggcggagacagaggagctggaggaggagaagtcaggcctgcagaaggagattgctgagctgcagaaggagaaggagaagctggagttcatgttggtggctcacggcccagtgtgcaagattagccccgaggagcgccgatcgcccccagcccctgggctgcagcccatgcgcagtgggggtggctcggtgggcgctgtagtggtgaaacaggagcccctggaagaggacagcccctcgtcctcgtcggcggggctggacaaggcccagcgctctgtcatcaagcccatcagcattgctgggggcttctacggtgaggagcccctgcacacccccatcgtggtgacctccacacctgctgtcactccgggcacctcgaacctcgtcttcacctatcctagcgtcctggagcaggagtcacccgcatctccctccgaatcctgctccaaggctcaccgcagaagcagtagcagcggggaccaatcatcagactccttgaactcccccactctgctggctctgtaacccagtgcacctccctccccagctccggagggggtcctcctcgctcctccttcccagggaccagcaccttcaagcgctccagggccgtgagggcaagagggggacctgccaccagggagcttcctggctctgggggacccaggtgggacttagcagtgagtattggaagacttgggttgatctcttagaagccatgggacctcctccctcattcatcttgcaagcaaatcccatttcttgaaaagccttggagaactcggtttggtagacttggacatctctctggcttctgaagagcctgaagctggcctggaccattcctgtccctttgttaccatactgtctctggagtgatggtgtccttccctgccccaccacgcatgctcagtgccttttggtttcaccttccctcgacttgaccctttcctcccccagcgtcagtttcactccctcttggtttttatcaaatttgccatgacatttcatctgggtggtctgaatattaaagctcttcatttctggagatggggcagcaggtggctcttctgctggggctgacttgtccagaaggggacaaagtgcaatacagagccttccctaccctgacgcctcccagtcatcatctccagaactcccagcggggctccctgagctctcaaggagatgctgccatcactgggaggctcagaggacccttcctgcccaccttcggagacggcttctggaggaacggcttggccagaagacagggtgtgagtgagacagtggggcacaggttgggtttgccaaacgcctaattaccaggccaggaagcatgccaacaaagccacacgggtgtcctagccagcttcccttcacctggtgtcttgagtagggcgtctcctgtaattactgccttgccattctgcccctggacccttctctccggaccagggaggcgtccctccctaggagccacacattatactccaagtccctgccgggctccgcctttcccccaccctggctctcagggtgacgccacccacagagatttaatgagcgtgggcctggaccttccccagatgctgccaggcagcccctccccaagcctcaaagaagcatttgctgaggatggagaggcaggggagggaggcgggaggccgtcactggagtggcgtctgcagcagctgctgccccagcacccgctcagcctgtcctggctgctcacctccccgcagggcaccgggcctttcctgccctctgtggtcatctgccacctgctggatcaagtgctttctcttttacactcccctgtccccaccccagtgcactcttctggcccaggcagcaagcaagctgtgaacagctggcctgagctgtcgctgtggcttgtggctcatgcgccattcctggttgtctgttgaatctttctggctgctggaattggagataggatgttttgcttcccactgcaggagagctgccccctttcacggggttggggaagggtccccctggcctccagcaggagcacagctcagcagggtccctgctgcccacccctctgagccttttctccccagggtatggctcctgctgagtttcttgtccagcagggccttgacaggaatccagggagtagctcctggccagaaccagcctctgcggggcttgtgctctgcaaagactctgctgctggggattcagctctagaggtcacagtatcctcgtttgaaagataattaagatcccccgtggagaaagcagtgacacattcacacagctgttccctcgcatgttatttcatgaacatgacctgttttcgtgcactagacacacagagtggaacagccgtatgcttaaagtacatgggccagtgggactggaagtgacctgtacaagtgatgcagaaaggagggtttcaaagaaaaaggattttgtttaaaatactttaaaaatgttatttcctgcatcccttggctgtgatgcccctctcccgatttcccaggggctctgggagggacccttctaagaagattgggcagttgggtttctggcttgagatgaatccaagcagcagaatgagccaggagtagcaggagatgggcaaagaaaactggggtgcactcagctctcacaggggtaatcatctcaagtggtatttgtagccaagtgggagctattttcttttttgtgcatatagatatttcttaaatgaagctgctttcttgtcttttatttctaaaagcccccttataccccactttgtgcagcaaagatccccgtgcaggtcacagcctgatttgtggccaggctggacaaattcctgaggcacaacttggcttcagttcagatttcaagctgtgttggtgttgggaccagcagaaggcaaacgtccagccaacacacaggactgtaagaggactctgagctacgtgccctgtgaagacccccaggctttgtcataggaggtcgttcagcttccccaaagtcagaggtgatttgatttggggaagactgaatattcacacctaagtcgtgagcatatcctgagttttacttccttatggcttgccctccaagttctctctctcatacacacacacacccttgctccagaatcaccagacacctccatggctccagctatgggaacagctgcattggggctgcctttctgtttggcttaggaacttctgtgcttcttgtggctccactcgcgaggcagctcggaggtgtggactccgattgggctgcaggcagctctgggacggcacagggcgggcgctctgatcagctcgtgtaaaacacaccgtcttcttggcctcctggccagtctttctgcgaatagtcctctccctggccagttgaatgggggaagctgctggcacaggaaggagaggcgatcccggctgaggcttaggaaattgctggagccggctccaagcagataattcactggggaggttttcagagtcaaacatcattctgcctgtgttgggggccaggtgtgtcacacaagcatctcaaagtcaaaagccatctggggctgctgcttctctttctcaggctctggggaaaggaatctccctctcctctcacttgattccaagtgtggttgaattgtctggagcactgggactttttttctcttttccttgatggaccaacagtgcaaatgcaatctcgccatttaactttcaggtcgatttcctttcctgatcagacatctttgtgccccctttaggaaggaaaagaatacacctacgatgtgccaggcactgtgttaggcgcttttatatagatcctcgttaggatgagactaagggatgaggacatctctttataaaaggcccctaagtaatggataaacagaaacacttagaggtgagaaggtctgtcttcaagatccaaggtaagattgccttcagtctgatgtttgttctcaaggacttatcccctacaatattctcccactccatacttctccttctaccccaccatgtgctcccgtgcactcctcagatggtcagaggggtaacccaagtccttagagaatttggggaccaatagaatatgtgatgtgtgaattttctttaaaaaacttaaggagtctttgctaccttctgcttgttgagttgttttggcattcatattgtgtatactttccgcgtgcctgt

SEQ ID NO: 59531 - DNA, 4636 bp, Homo sapiens
ctataccaccctataccactgagctataccaccagacttggacatctctctggcttctgaagagcctgaagctggcctggaccattcctgtccctttgttaccatactgtctctggagtgatggtgtccttccctgccccaccacgcatgctcagtgccttttggtttcaccttccctcgacttgaccctttcctcccccagcgtcagtttcactccctcttggtttttatcaaatttgccatgacatttcatctgggtggtctgaatattaaagctcttcatttctggagatggggcagcaggtggctcttctgctggggctgacttgtccagaaggggacaaagtgcaatacagagccttccctaccctgacgcctcccagtcatcatctccagaactcccagcggggctccctgagctctcaaggagatgctgccatcactgggaggctcagaggacccttcctgcccaccttcggagacggcttctggaggaacggcttggccagaagacagggtgtgagtgagacagtggggcacaggttgggtttgccaaacgcctaattaccaggccaggaagcatgccaacaaagccacacgggtgtcctagccagcttcccttcacctggtgtcttgagtagggcgtctcctgtaattactgccttgccattctgcccctggacccttctctccggaccagggaggcgtccctccctaggagccacacattatactccaagtccctgccgggctccgcctttcccccaccctggctctcagggtgacgccacccacagagatttaatgagcgtgggcctggaccttccccagatgctgccaggcagcccctccccaagcctcaaagaagcatttgctgaggatggagaggcaggggagggaggcgggaggccgtcactggagtggcgtctgcagcagctgctgccccagcacccgctcagcctgtcctggctgctcacctccccgcagggcaccgggcctttcctgccctctgtggtcatctgccacctgctggatcaagtgctttctcttttacactcccctgtccccaccccagtgcactcttctggcccaggcagcaagcaagctgtgaacagctggcctgagctgtcgctgtggcttgtggctcatgcgccattcctggttgtctgttgaatctttctggctgctggaattggagataggatgttttgcttcccactgcaggagagctgccccctttcacggggttggggaagggtccccctggcctccagcaggagcacagctcagcagggtccctgctgcccacccctctgagccttttctccccagggtatggctcctgctgagtttcttgtccagcagggccttgacaggaatccagggagtagctcctggccagaaccagcctctgcggggcttgtgctctgcaaagactctgctgctggggattcagctctagaggtcacagtatcctcgtttgaaagataattaagatcccccgtggagaaagcagtgacacattcacacagctgttccctcgcatgttatttcatgaacatgacctgttttcgtgcactagacacacagagtggaacagccgtatgcttaaagtacatgggccagtgggactggaagtgacctgtacaagtgatgcagaaaggagggtttcaaagaaaaaggattttgtttaaaatactttaaaaatgttatttcctgcatcccttggctgtgatgcccctctcccgatttcccaggggctctgggagggacccttctaagaagattgggcagttgggtttctggcttgagatgaatccaagcagcagaatgagccaggagtagcaggagatgggcaaagaaaactggggtgcactcagctctcacaggggtaatcatctcaagtggtatttgtagccaagtgggagctattttcttttttgtgcatatagatatttcttaaatgaagctgctttcttgtcttttatttctaaaagcccccttataccccactttgtgcagcaaagatccccgtgcaggtcacagcctgatttgtggccaggctggacaaattcctgaggcacaacttggcttcagttcagatttcaagctgtgttggtgttgggaccagcagaaggcaaacgtccagccaacacacaggactgtaagaggactctgagctacgtgccctgtgaagacccccaggctttgtcataggaggtcgttcagcttccccaaagtcagaggtgatttgatttggggaagactgaatattcacacctaagtcgtgagcatatcctgagttttacttccttatggcttgccctccaagttctctctctcatacacacacacacccttgctccagaatcaccagacacctccatggctccagctatgggaacagctgcattggggctgcctttctgtttggcttaggaacttctgtgcttcttgtggctccactcgcgaggcagctcggaggtgtggactccgattgggctgcaggcagctctgggacggcacagggcgggcgctctgatcagctcgtgtaaaacacaccgtcttcttggcctcctggccagtctttctgcgaatagtcctctccctggccagttgaatgggggaagctgctggcacaggaaggagaggcgatcccggctgaggcttaggaaattgctggagccggctccaagcagataattcactggggaggttttcagagtcaaacatcattctgcctgtgttgggggccaggtgtgtcacacaagcatctcaaagtcaaaagccatctggggctgctgcttctctttctcaggctctggggaaaggaatctccctctcctctcacttgattccaagtgtggttgaattgtctggagcactgggactttttttctcttttccttgatggaccaacagtgcaaatgcaatctcgccatttaactttcaggtcgatttcctttcctgatcagacatctttgtgccccctttaggaaggaaaagaatacacctacgatgtgccaggcactgtgttaggcgcttttatatagatcctcgttaggatgagactaagggatgaggacatctctttataaaaggcccctaagtaatggataaacagaaacacttagaggtgagaaggtctgtcttcaagatccaaggtaagattgccttcagtctgatgtttgttctcaaggacttatcccctacaatattctcccactccatacttctccttctaccccaccatgtgctcccgtgcactcctcagatggtcagaggggtaacccaagtccttagagaatttggggaccaatagaatatgtgatgtgtgaattttctttaaaaaacttaaggagtctttgctaccttctgcttgttgagttgttttggcattcatattaaaagccagcatctcactatttattgacaggttgggctgtgtgtgtgcgcatgtgtgtatacatttccaggcgtgcctgtgtcctgtagctttttaaaaggaaacccagtcatcccactatgaatctggcatcttcttatgcttctagtgttttggccatacatcaaccaaggggtttaatttatccaatgcttgacgacatgttcaggaggggctggatcaaattttgagagggttatgggaaagggagggggagaagaaattgacatttattttattatttattttaaatgtttacatcttctttatgttgtatcaagcctgaatagaaactgatagcattaaaatactccgttcctctctctcttctcgcttcctttttttttttttttaaatttaggataacacatttttgtttctaaagtgatttgtgatttgtgctgtataaactgtataaaaggttctgtttttaaaggtggattttcattcctctggggacagtggtcgccaagacatctacattgtaagagaacacagtggaagatcctgtcctgattctcaaaaattattttctctgtatgattaaaagtttattccatttattttagtttgtgtttacttgattttgaggaagaaaatatttgactttgtgtaaagagtagggtatcagggtgtcttttctgccgtgggagatgtgtatatatatagtattttggtgtatagtagaaaataagctttgtgcatctgtatttgagatatgttaatgacgtggagtaaagtcagctgtaagactctggaggcaaacaagttgtatatggttcatatggctctatggggaatttaattacctttctgggcactttttttttttttttttttttaagtaatggtgaaatggtcccattggagagtctcctaaatagaccttccaggcagaaccgcaagctcaaaatctttgtatagttttgaaaattgaggagtagctttgtttggaagcctttctggtggtggtttttgttgttgttgttgttttgttgttttactatatgtaatacaagcctacagtatttgcactaaagaaagcttgttagaaaaagcttgctgctatggaagaaagaacatattaaaacttctttcccttgcgatttttttgggggaggggggttagcatttccactttcagttgagtagcattttgtagaataaaatgaattaagattgaaaaaaaaa

SEQ ID NO: 59532 - DNA, 4765 bp, Homo sapiens
cgcgggacgggcgcacgccgccttctcctagtcaagtatccgagccgccccgaaactcgggcggcgagtcggccacgggaagtttattctccggctccttttctaaaaggaagaaacagaagtttctcccagcggacagcttttctttccgcctttttggccctgtctgaaatcgggggtccccagggctggcaggccaggctcgctgggctcctaatcttttttttaatttccaatttttgattgggccgtgggtccccgctgagctccggctgcgcgcgggggcgggagggcgcgcgcaggggagggaccgagagacgcgccgactttttagagggagggatcgggtggacaactggtcccgcggcgctcgcagagccggaaagaagtgctgtaagggacgctcgggggacgctgttcctgaggtgtcgccgcctccctgtcctcgccctccgcggtgggggagaaacccaggagcgaagcccagagcccgcggcgcggccggcggacgaacgagcgcgcagcagccggtgcgcggccgcggcgagggcgggggaagaaaaacaccctgtttcctctccggcccccaccgcggatcatgtaccaggattatcccgggaactttgacacctcgtcccggggcagcagcggctctcctgcgcacgccgagtcctactccagcggcggcggcggccagcagaaattccgggtagatatgcctggctcaggcagtgcattcatccccaccatcaacgccatcacgaccagccaggacctgcagtggatggtgcagcccacagtgatcacctccatgtccaacccataccctcgctcgcacccctacagccccctgccgggcctggcctctgtccctggacacatggccctcccaagacctggcgtgatcaagaccattggcaccaccgtgggccgcaggaggagagatgagcagctgtctcctgaagaggaggagaagcgtcgcatccggcgggagaggaacaagctggctgcagccaagtgccggaaccgacgccgggagctgacagagaagctgcaggcggagacagaggagctggaggaggagaagtcaggcctgcagaaggagattgctgagctgcagaaggagaaggagaagctggagttcatgttggtggctcacggcccagtgtgcaagattagccccgaggagcgccgatcgcccccagcccctgggctgcagcccatgcgcagtgggggtggctcggtgggcgctgtagtggtgaaacaggagcccctggaagaggacagcccctcgtcctcgtcggcggggctggacaaggcccagcgctctgtcatcaagcccatcagcattgctgggggcttctacggtgaggagcccctgcacacccccatcgtggtgacctccacacctgctgtcactccgggcacctcgaacctcgtcttcacctatcctagcgtcctggagcaggagtcacccgcatctccctccgaatcctgctccaaggctcaccgcagaagcagtagcagcggggaccaatcatcagactccttgaactcccccactctgctggctctgtaacccagtgcacctccctccccagctccggagggggtcctcctcgctcctccttcccagggaccagcaccttcaagcgctccagggccgtgagggcaagagggggacctgccaccagggagcttcctggctctgggggacccaggtgggacttagcagtgagtattggaagacttgggttgatctcttagaagccatgggacctcctccctcattcatcttgcaagcaaatcccatttcttgaaaagccttggagaactcggtttggtagacttggacatctctctggcttctgaagagcctgaagctggcctggaccattcctgtccctttgttaccatactgtctctggagtgatggtgtccttccctgccccaccacgcatgctcagtgccttttggtttcaccttccctcgacttgaccctttcctcccccagcgtcagtttcactccctcttggtttttatcaaatttgccatgacatttcatctgggtggtctgaatattaaagctcttcatttctggagatggggcagcaggtggctcttctgctggggctgacttgtccagaaggggacaaagtgcaatacagagccttccctaccctgacgcctcccagtcatcatctccagaactcccagcggggctccctgagctctcaaggagatgctgccatcactgggaggctcagaggacccttcctgcccaccttcggagacggcttctggaggaacggcttggccagaagacagggtgtgagtgagacagtggggcacaggttgggtttgccaaacgcctaattaccaggccaggaagcatgccaacaaagccacacgggtgtcctagccagcttcccttcacctggtgtcttgagtagggcgtctcctgtaattactgccttgccattctgcccctggacccttctctccggaccagggaggcgtccctccctaggagccacacattatactccaagtccctgccgggctccgcctttcccccaccctggctctcagggtgacgccacccacagagatttaatgagcgtgggcctggaccttccccagatgctgccaggcagcccctccccaagcctcaaagaagcatttgctgaggatggagaggcaggggagggaggcgggaggccgtcactggagtggcgtctgcagcagctgctgccccagcacccgctcagcctgtcctggctgctcacctccccgcagggcaccgggcctttcctgccctctgtggtcatctgccacctgctggatcaagtgctttctcttttacactcccctgtccccaccccagtgcactcttctggcccaggcagcaagcaagctgtgaacagctggcctgagctgtcgctgtggcttgtggctcatgcgccattcctggttgtctgttgaatctttctggctgctggaattggagataggatgttttgcttcccactgcaggagagctgccccctttcacggggttggggaagggtccccctggcctccagcaggagcacagctcagcagggtccctgctgcccacccctctgagccttttctccccagggtatggctcctgctgagtttcttgtccagcagggccttgacaggaatccagggagtagctcctggccagaaccagcctctgcggggcttgtgctctgcaaagactctgctgctggggattcagctctagaggtcacagtatcctcgtttgaaagataattaagatcccccgtggagaaagcagtgacacattcacacagctgttccctcgcatgttatttcatgaacatgacctgttttcgtgcactagacacacagagtggaacagccgtatgcttaaagtacatgggccagtgggactggaagtgacctgtacaagtgatgcagaaaggagggtttcaaagaaaaaggattttgtttaaaatactttaaaaatgttatttcctgcatcccttggctgtgatgcccctctcccgatttcccaggggctctgggagggacccttctaagaagattgggcagttgggtttctggcttgagatgaatccaagcagcagaatgagccaggagtagcaggagatgggcaaagaaaactggggtgcactcagctctcacaggggtaatcatctcaagtggtatttgtagccaagtgggagctattttcttttttgtgcatatagatatttcttaaatgaagctgctttcttgtcttttatttctaaaagcccccttataccccactttgtgcagcaaagatccccgtgcaggtcacagcctgatttgtggccaggctggacaaattcctgaggcacaacttggcttcagttcagatttcaagctgtgttggtgttgggaccagcagaaggcaaacgtccagccaacacacaggactgtaagaggactctgagctacgtgccctgtgaagacccccaggctttgtcataggaggtcgttcagcttccccaaagtcagaggtgatttgatttggggaagactgaatattcacacctaagtcgtgagcatatcctgagttttacttccttatggcttgccctccaagttctctctctcatacacacacacacccttgctccagaatcaccagacacctccatggctccagctatgggaacagctgcattggggctgcctttctgtttggcttaggaacttctgtgcttcttgtggctccactcgcgaggcagctcggaggtgtggactccgattgggctgcaggcagctctgggacggcacagggcgggcgctctgatcagctcgtgtaaaacacaccgtcttcttggcctcctggccagtctttctgcgaatagtcctctccctggccagttgaatgggggaagctgctggcacaggaaggagaggcgatcccggctgaggcttaggaaattgctggagccggctccaagcagataattcactggggaggttttcagagtcaaacatcattctgcctgtgttgggggccaggtgtgtcacacaagcatctcaaagtcaaaagccatctggggctgctgcttctctttctcaggctctggggaaaggaatctccctctcctctcacttgattccaagtgtggttgaattgtctggagcactgggactgtcctgctccgggtcctttgatggccccagcccagcacactcaatctagccctgtaacagc

SEQ ID NO: 59533 - DNA, 4389 bp, Homo sapiens
cgcgggacgggcgcacgccgccttctcctagtcaagtatccgagccgccccgaaactcgggcggcgagtcggccacgggaagtttattctccggctccttttctaaaaggaagaaacagaagtttctcccagcggacagcttttctttccgcctttttggccctgtctgaaatcgggggtccccagggctggcaggccaggctcgctgggctcctaatcttttttttaatttccaatttttgattgggccgtgggtccccgctgagctccggctgcgcgcgggggcgggagggcgcgcgcaggggagggaccgagagacgcgccgactttttagagggagggatcgggtggacaactggtcccgcggcgctcgcagagccggaaagaagtgctgtaagggacgctcgggggacgctgttcctgaggtgtcgccgcctccctgtcctcgccctccgcggtgggggagaaacccaggagcgaagcccagagcccgcggcgcggccggcggacgaacgagcgcgcagcagccggtgcgcggccgcggcgagggcgggggaagaaaaacaccctgtttcctctccggcccccaccgcggatcatgtaccaggattatcccgggaactttgacacctcgtcccggggcagcagcggctctcctgcgcacgccgagtcctactccagcggcggcggcggccagcagaaattccgggtagatatgcctggctcaggcagtgcattcatccccaccatcaacgccatcacgaccagccaggacctgcagtggatggtgcagcccacagtgatcacctccatgtccaacccataccctcgctcgcacccctacagccccctgccgggcctggcctctgtccctggacacatggccctcccaagacctggcgtgatcaagaccattggcaccaccgtgggccgcaggaggagagatgagcagctgtctcctgaagaggaggagaagcgtcgcatccggcgggagaggaacaagctggctgcagccaagtgccggaaccgacgccgggagctgacagagaagctgcaggcggagacagaggagctggaggaggagaagtcaggcctgcagaaggagattgctgagctgcagaaggagaaggagaagctggagttcatgttggtggctcacggcccagtgtgcaagattagccccgaggagcgccgatcgcccccagcccctgggctgcagcccatgcgcagtgggggtggctcggtgggcgctgtagtggtgaaacaggagcccctggaagaggacagcccctcgtcctcgtcggcggggctggacaaggcccagcgctctgtcatcaagcccatcagcattgctgggggcttctacggtgaggagcccctgcacacccccatcgtggtgacctccacacctgctgtcactccgggcacctcgaacctcgtcttcacctatcctagcgtcctggagcaggagtcacccgcatctccctccgaatcctgctccaaggctcaccgcagaagcagtagcagcggggaccaatcatcagactccttgaactcccccactctgctggctctgtaacccagtgcacctccctccccagctccggagggggtcctcctcgctcctccttcccagggaccagcaccttcaagcgctccagggccgtgagggcaagagggggacctgccaccagggagcttcctggctctgggggacccaggtgggacttagcagtgagtattggaagacttgggttgatctcttagaagccatgggacctcctccctcattcatcttgcaagcaaatcccatttcttgaaaagccttggagaactcggtttggtagacttggacatctctctggcttctgaagagcctgaagctggcctggaccattcctgtccctttgttaccatactgtctctggagtgatggtgtccttccctgccccaccacgcatgctcagtgccttttggtttcaccttccctcgacttgaccctttcctcccccagcgtcagtttcactccctcttggtttttatcaaatttgccatgacatttcatctgggtggtctgaatattaaagctcttcatttctggagatggggcagcaggtggctcttctgctggggctgacttgtccagaaggggacaaagtgcaatacagagccttccctaccctgacgcctcccagtcatcatctccagaactcccagcggggctccctgagctctcaaggagatgctgccatcactgggaggctcagaggacccttcctgcccaccttcggagacggcttctggaggaacggcttggccagaagacagggtgtgagtgagacagtggggcacaggttgggtttgccaaacgcctaattaccaggccaggaagcatgccaacaaagccacacgggtgtcctagccagcttcccttcacctggtgtcttgagtagggcgtctcctgtaattactgccttgccattctgcccctggacccttctctccggaccagggaggcgtccctccctaggagccacacattatactccaagtccctgccgggctccgcctttcccccaccctggctctcagggtgacgccacccacagagatttaatgagcgtgggcctggaccttccccagatgctgccaggcagcccctccccaagcctcaaagaagcatttgctgaggatggagaggcaggggagggaggcgggaggccgtcactggagtggcgtctgcagcagctgctgccccagcacccgctcagcctgtcctggctgctcacctccccgcagggcaccgggcctttcctgccctctgtggtcatctgccacctgctggatcaagtgctttctcttttacactcccctgtccccaccccagtgcactcttctggcccaggcagcaagcaagctgtgaacagctggcctgagctgtcgctgtggcttgtggctcatgcgccattcctggttgtctgttgaatctttctggctgctggaattggagataggatgttttgcttcccactgcaggagagctgccccctttcacggggttggggaagggtccccctggcctccagcaggagcacagctcagcagggtccctgctgcccacccctctgagccttttctccccagggtatggctcctgctgagtttcttgtccagcagggccttgacaggaatccagggagtagctcctggccagaaccagcctctgcggggcttgtgctctgcaaagactctgctgctggggattcagctctagaggtcacagtatcctcgtttgaaagataattaagatcccccgtggagaaagcagtgacacattcacacagctgttccctcgcatgttatttcatgaacatgacctgttttcgtgcactagacacacagagtggaacagccgtatgcttaaagtacatgggccagtgggactggaagtgacctgtacaagtgatgcagaaaggagggtttcaaagaaaaaggattttgtttaaaatactttaaaaatgttatttcctgcatcccttggctgtgatgcccctctcccgatttcccaggggctctgggagggacccttctaagaagattgggcagttgggtttctggcttgagatgaatccaagcagcagaatgagccaggagtagcaggagatgggcaaagaaaactggggtgcactcagctctcacaggggtaatcatctcaagtggtatttgtagccaagtgggagctattttcttttttgtgcatatagatatttcttaaatgaagctgctttcttgtcttttatttctaaaagcccccttataccccactttgtgcagcaaagatccccgtgcaggtcacagcctgatttgtggccaggctggacaaattcctgaggcacaacttggcttcagttcagatttcaagctgtgttggtgttgggaccagcagaaggcaaacgtccagccaacacacaggactgtaagaggactctgagctacgtgccctgtgaagacccccaggctttgtcataggaggtcgttcagcttccccaaagtcagaggtgatttgatttggggaagactgaatattcacacctaagtcgtgagcatatcctgagttttacttccttatggcttgccctccaagttctctctcttctcgcttcctttttttttttttttaaatttaggataacacatttttgtttctaaagtgatttgtgatttgtgctgtataaactgtataaaaggttctgtttttaaaggtggattttcattcctctggggacagtggtcgccaagacatctacattgtaagagaacacagtggaagatcctgtcctgattctcaaaaattattttctctgtatgattaaaagtttattccattta

SEQ ID NO: 59534 - DNA, 3163 bp, Homo sapiens
  misc_feature (27)..(27): n is a, c, g, or t
tctagaggatcccgacacctctagggngccgtggagaaagcagtgacacattcacacagctgttccctcgcatgttatttcatgaacatgacctgttttcgtgcactagacacacagagtggaacagccgtatgcttaaagtacatgggccagtgggactggaagtgacctgtacaagtgatgcagaaaggagggtttcaaagaaaaaggattttgtttaaaatactttaaaaatgttatttcctgcatcccttggctgtgatgcccctctcccgatttcccaggggctctgggagggacccttctaagaagattgggcagttgggtttctggcttgagatgaatccaagcagcagaatgagccaggagtagcaggagatgggcaaagaaaactggggtgcactcagctctcacaggggtaatcatctcaagtggtatttgtagccaagtgggagctattttcttttttgtgcatatagatatttcttaaatgaagctgctttcttgtcttttatttctaaaagcccccttataccccactttgtgcagcaaagatccccgtgcaggtcacagcctgatttgtggccaggctggacaaattcctgaggcacaacttggcttcagttcagatttcaagctgtgttggtgttgggaccagcagaaggcaaacgtccagccaacacacaggactgtaagaggactctgagctacgtgccctgtgaagacccccaggctttgtcataggaggtcgttcagcttccccaaagtcagaggtgatttgatttggggaagactgaatattcacacctaagtcgtgagcatatcctgagttttacttccttatggcttgccctccaagttctctctctcatacacacacacacccttgctccagaatcaccagacacctccatggctccagctatgggaacagctgcattggggctgcctttctgtttggcttaggaacttctgtgcttcttgtggctccactcgcgaggcagctcggaggtgtggactccgattgggctgcaggcagctctgggacggcacagggcgggcgctctgatcagctcgtgtaaaacacaccgtcttcttggcctcctggccagtctttctgcgaatagtcctctccctggccagttgaatgggggaagctgctggcacaggaaggagaggcgatcccggctgaggcttaggaaattgctggagccggctccaagcagataattcactggggaggttttcagagtcaaacatcattctgcctgtgttgggggccaggtgtgtcacacaagcatctcaaagtcaaaagccatctggggctgctgcttctctttctcaggctctggggaaaggaatctccctctcctctcacttgattccaagtgtggttgaattgtctggagcactgggactttttttctcttttccttgatggaccaacagtgcaaatgcaatctcgccatttaactttcaggtcgatttcctttcctgatcagacatctttgtgccccctttaggaaggaaaagaatacacctacgatgtgccaggcactgtgttaggcgcttttatatagatcctcgttaggatgagactaagggatgaggacatctctttataaaaggcccctaagtaatggataaacagaaacacttagaggtgagaaggtctgtcttcaagatccaaggtaagattgccttcagtctgatgtttgttctcaaggacttatcccctacaatattctcccactccatacttctccttctaccccaccatgtgctcccgtgcactcctcagatggtcagaggggtaacccaagtccttagagaatttggggaccaatagaatatgtgatgtgtgaattttctttaaaaaacttaaggagtctttgctaccttctgcttgttgagttgttttggcattcatattaaaagccagcatctcactatttattgacaggttgggctgtgtgtgtgcgcatgtgtgtatacatttccaggcgtgcctgtgtcctgtagctttttaaaaggaaacccagtcatcccactatgaatctggcatcttcttatgcttctagtgttttggccatacatcaaccaaggggtttaatttatccaatgcttgacgacatgttcaggaggggctggatcaaattttgagagggttatgggaaagggagggggagaagaaattgacatttattttattatttattttaaatgtttacatcttctttatgttgtatcaagcctgaatagaaactgatagcattaaaatactccgttcctctctctcttctcgcttcctttttttttttttttaaatttaggataacacatttttgtttctaaagtgatttgtgatttgtgctgtataaactgtataaaaggttctgtttttaaaggtggattttcattcctctggggacagtggtcgccaagacatctacattgtaagagaacacagtggaagatcctgtcctgattctcaaaaattattttctctgtatgattaaaagtttattccatttattttagtttgtgtttacttgattttgaggaagaaaatatttgactttgtgtaaagagtagggtatcagggtgtcttttctgccgtgggagatgtgtatatatatagtattttggtgtatagtagaaaataagctttgtgcatctgtatttgagatatgttaatgacgtggagtaaagtcagctgtaagactctggaggcaaacaagttgtatatggttcatatggctctatggggaatttaattacctttctgggcactttttttttttttttttttttaagtaatggtgaaatggtcccattggagagtctcctaaatagaccttccaggcagaaccgcaagctcaaaatctttgtatagttttgaaaattgaggagtagctttgtttggaagcctttctggtggtggtttttgttgttgttgttgttttgttgttttactatatgtaatacaagcctacagtatttgcactaaagaaagcttgttagaaaaagcttgctgctatggaagaaagaacatattaaaacttctttcccttgcgatttttttgggggaggggggttagcatttccactttcagttgagtagcattttgtagaataaaatgaattaagattgaaaaaaaaa

SEQ ID NO: 59535 - DNA, 2529 bp, Homo sapiens
tctgcattgagaatagtaaacactttgaaatgatcaataagaaaaaaacacaggactgtaagaggactctgagctacgtgccctgtgaagacccccaggctttgtcataggaggtcgttcagcttccccaaagtcagaggtgatttgatttggggaagactgaatattcacacctaagtcgtgagcatatcctgagttttacttccttatggcttgccctccaagttctctctctcatacacacacacacccttgctccagaatcaccagacacctccatggctccagctatgggaacagctgcattggggctgcctttctgtttggcttaggaacttctgtgcttcttgtggctccactcgcgaggcagctcggaggtgtggactccgattgggctgcaggcagctctgggacggcacagggcgggcgctctgatcagctcgtgtaaaacacaccgtcttcttggcctcctggccagtctttctgcgaatagtcctctccctggccagttgaatgggggaagctgctggcacaggaaggagaggcgatcccggctgaggcttaggaaattgctggagccggctccaagcagataattcactggggaggttttcagagtcaaacatcattctgcctgtgttgggggccaggtgtgtcacacaagcatctcaaagtcaaaagccatctggggctgctgcttctctttctcaggctctggggaaaggaatctccctctcctctcacttgattccaagtgtggttgaattgtctggagcactgggactttttttctcttttccttgatggaccaacagtgcaaatgcaatctcgccatttaactttcaggtcgatttcctttcctgatcagacatctttgtgccccctttaggaaggaaaagaatacacctacgatgtgccaggcactgtgttaggcgcttttatatagatcctcgttaggatgagactaagggatgaggacatctctttataaaaggcccctaagtaatggataaacagaaacacttagaggtgagaaggtctgtcttcaagatccaaggtaagattgccttcagtctgatgtttgttctcaaggacttatcccctacaatattctcccactccatacttctccttctaccccaccatgtgctcccgtgcactcctcagatggtcagaggggtaacccaagtccttagagaatttggggaccaatagaatatgtgatgtgtgaattttctttaaaaaacttaaggagtctttgctaccttctgcttgttgagttgttttggcattcatattaaaagccagcatctcactatttattgacaggttgggctgtgtgtgtgcgcatgtgtgtatacatttccaggcgtgcctgtgtcctgtagctttttaaaaggaaacccagtcatcccactatgaatctggcatcttcttatgcttctagtgttttggccatacatcaaccaaggggtttaatttatccaatgcttgacgacatgttcaggaggggctggatcaaattttgagagggttatgggaaagggagggggagaagaaattgacatttattttattatttattttaaatgtttacatcttctttatgttgtatcaagcctgaatagaaactgatagcattaaaatactccgttcctctctctcttctcgcttcctttttttttttttttaaatttaggataacacatttttgtttctaaagtgatttgtgatttgtgctgtataaactgtataaaaggttctgtttttaaaggtggattttcattcctctggggacagtggtcgccaagacatctacattgtaagagaacacagtggaagatcctgtcctgattctcaaaaattattttctctgtatgattaaaagtttattccatttattttagtttgtgtttacttgattttgaggaagaaaatatttgactttgtgtaaagagtagggtatcagggtgtcttttctgccgtgggagatgtgtatatatatagtattttggtgtatagtagaaaataagctttgtgcatctgtatttgagatatgttaatgacgtggagtaaagtcagctgtaagactctggaggcaaacaagttgtatatggttcatatggctctatggggaatttaattacctttctgggcactttttttttttttttttttttaagtaatggtgaaatggtcccattggagagtctcctaaatagaccttccaggcagaaccgcaagctcaaaatctttgtatagttttgaaaattgaggagtagctttgtttggaagcctttctggtggtggtttttgttgttgttgttgttttgttgttttactatatgtaatacaagcctacagtatttgcactaaagaaagcttgttagaaaaagcttgctgctatggaagaaagaacatattaaaacttctttcccttgcgatttttttgggggaggggggttagcatttccactttcagttgagtagcattttgtagaataaaatgaattaagattgaaaaaaaaa

SEQ ID NO: 59536 - DNA, 2102 bp, Homo sapiens
cgcgggacgggcgcacgccgccttctcctagtcaagtatccgagccgccccgaaactcgggcggcgagtcggccacgggaagtttattctccggctccttttctaaaaggaagaaacagaagtttctcccagcggacagcttttctttccgcctttttggccctgtctgaaatcgggggtccccagggctggcaggccaggctcgctgggctcctaatcttttttttaatttccaatttttgattgggccgtgggtccccgctgagctccggctgcgcgcgggggcgggagggcgcgcgcaggggagggaccgagagacgcgccgactttttagagggagggatcgggtggacaactggtcccgcggcgctcgcagagccggaaagaagtgctgtaagggacgctcgggggacgctgttcctgaggtgtcgccgcctccctgtcctcgccctccgcggtgggggagaaacccaggagcgaagcccagagcccgcggcgcggccggcggacgaacgagcgcgcagcagccggtgcgcggccgcggcgagggcgggggaagaaaaacaccctgtttcctctccggcccccaccgcggatcatgtaccaggattatcccgggaactttgacacctcgtcccggggcagcagcggctctcctgcgcacgccgagtcctactccagcggcggcggcggccagcagaaattccgggtagatatgcctggctcaggcagtgcattcatccccaccatcaacgccatcacgaccagccaggacctgcagtggatggtgcagcccacagtgatcacctccatgtccaacccataccctcgctcgcacccctacagccccctgccgggcctggcctctgtccctggacacatggccctcccaagacctggcgtgatcaagaccattggcaccaccgtgggccgcaggaggagagatgagcagctgtctcctgaagaggaggagaagcgtcgcatccggcgggagaggaacaagctggctgcagccaagtgccggaaccgacgccgggagctgacagagaagctgcaggcggagacagaggagctggaggaggagaagtcaggcctgcagaaggagattgctgagctgcagaaggagaaggagaagctggagttcatgttggtggctcacggcccagtgtgcaagattagccccgaggagcgccgatcgcccccagcccctgggctgcagcccatgcgcagtgggggtggctcggtgggcgctgtagtggtgaaacaggagcccctggaagaggacagcccctcgtcctcgtcggcggggctggacaaggcccagcgctctgtcatcaagcccatcagcattgctgggggcttctacggtgaggagcccctgcacacccccatcgtggtgacctccacacctgctgtcactccgggcacctcgaacctcgtcttcacctatcctagcgtcctggagcaggagtcacccgcatctccctccgaatcctgctccaaggctcaccgcagaagcagtagcagcggggaccaatcatcagactccttgaactcccccactctgctggctctgtaacccagtgcacctccctccccagctccggagggggtcctcctcgctcctccttcccagggaccagcaccttcaagcgctccagggccgtgagggcaagagggggacctgccaccagggagcttcctggctctgggggacccaggtgggacttagcagtgagtattggaagacttgggttgatctcttagaagccatgggacctcctccctcattcatcttgcaagcaaatcccatttcttgaaaagccttggagaactcggtttggtagacttggacatctctctggcttctgaagagcctgaagctggcctggaccattcctgtccctttgttaccatactgtctctggagtgatggtgtccttccctgccccaccacgcatgctcagtgccttttggtttcaccttccctcgacttgaccctttcctcccccagcgtcagtttcactccctcttggtttttatcaaatttgccatgacatttcatctgggtggtctgaatattaaagctcttcatttctgga

SEQ ID NO: 59537 - DNA, 2396 bp, Homo sapiens
cgcgggacgggcgcacgccgccttctcctagtcaagtatccgagccgccccgaaactcgggcggcgagtcggccacgggaagtttattctccggctccttttctaaaaggaagaaacagaagtttctcccagcggacagcttttctttccgcctttttggccctgtctgaaatcgggggtccccagggctggcaggccaggctcgctgggctcctaatcttttttttaatttccaatttttgattgggccgtgggtccccgctgagctccggctgcgcgcgggggcgggagggcgcgcgcaggggagggaccgagagacgcgccgactttttagagggagggatcgggtggacaactggtcccgcggcgctcgcagagccggaaagaagtgctgtaagggacgctcgggggacgctgttcctgaggtgtcgccgcctccctgtcctcgccctccgcggtgggggagaaacccaggagcgaagcccagagcccgcggcgcggccggcggacgaacgagcgcgcagcagccggtgcgcggccgcggcgagggcgggggaagaaaaacaccctgtttcctctccggcccccaccgcggatcatgtaccaggattatcccgggaactttgacacctcgtcccggggcagcagcggctctcctgcgcacgccgagtcctactccagcggcggcggcggccagcagaaattccgggtagatatgcctggctcaggcagtgcattcatccccaccatcaacgccatcacgaccagccaggacctgcagtggatggtgcagcccacagtgatcacctccatgtccaacccataccctcgctcgcacccctacagccccctgccgggcctggcctctgtccctggacacatggccctcccaagacctggcgtgatcaagaccattggcaccaccgtgggccgcaggaggagagatgagcagctgtctcctgaagaggaggagaagcgtcgcatccggcgggagaggaacaagctggctgcagccaagtgccggaaccgacgccgggagctgacagagaagctgcaggcggagacagaggagctggaggaggagaagtcaggcctgcagaaggagattgctgagctgcagaaggagaaggagaagctggagttcatgttggtggctcacggcccagtgtgcaagattagccccgaggagcgccgatcgcccccagcccctgggctgcagcccatgcgcagtgggggtggctcggtgggcgctgtagtggtgaaacaggagcccctggaagaggacagcccctcgtcctcgtcggcggggctggacaaggcccagcgctctgtcatcaagcccatcagcattgctgggggcttctacggtgaggagcccctgcacacccccatcgtggtgacctccacacctgctgtcactccgggcacctcgaacctcgtcttcacctatcctagcgtcctggagcaggagtcacccgcatctccctccgaatcctgctccaaggctcaccgcagaagcagtagcagcggggaccaatcatcagactccttgaactcccccactctgctggctctgtaacccagtgcacctccctccccagctccggagggggtcctcctcgctcctccttcccagggaccagcaccttcaagcgctccagggccgtgagggcaagagggggacctgccaccagggagcttcctggctctgggggacccaggtgggacttagcagtgagtattggaagacttgggttgatctcttagaagccatgggacctcctccctcattcatcttgcaagcaaatcccatttcttgaaaagccttggagaactcggtttggtagacttggacatctctctggcttctgaagagcctgaagctggcctggaccattcctgtccctttgttaccatactgtctctggagtgatggtgtccttccctgccccaccacgcatgctcagtgccttttggtttcaccttccctcgacttgaccctttcctcccccagcgtcagtttcactccctcttggtttttatcaaatttgccatgacatttcatctgggtggtctgaatattaaagctcttcatttctggagatggggcagcaggtggctcttctgctggggctgacttgtccagaaggggacaaagtgcaatacagagccttccctaccctgacgcctcccagtcatcatctccagaactcccagcggggctccctgagctctcaaggagatgctgccatcactgggaggctcagaggacccttcctgcccaccttcggagacggcttctggaggaacggcttggccagaagacagggtgtgagtgagacagtggcacagttggttccaccctatacagccgaacatccacaagatctctaata

SEQ ID NO: 59538 - DNA, 2101 bp, Homo sapiens
cgcgggacgggcgcacgccgccttctcctagtcaagtatccgagccgccccgaaactcgggcggcgagtcggccacgggaagtttattctccggctccttttctaaaaggaagaaacagaagtttctcccagcggacagcttttctttccgcctttttggccctgtctgaaatcgggggtccccagggctggcaggccaggctcgctgggctcctaatcttttttttaatttccaatttttgattgggccgtgggtccccgctgagctccggctgcgcgcgggggcgggagggcgcgcgcaggggagggaccgagagacgcgccgactttttagagggagggatcgggtggacaactggtcccgcggcgctcgcagagccggaaagaagtgctgtaagggacgctcgggggacgctgttcctgaggtgtcgccgcctccctgtcctcgccctccgcggtgggggagaaacccaggagcgaagcccagagcccgcggcgcggccggcggacgaacgagcgcgcagcagccggtgcgcggccgcggcgagggcgggggaagaaaaacaccctgtttcctctccggcccccaccgcggatcatgtaccaggattatcccgggaactttgacacctcgtcccggggcagcagcggctctcctgcgcacgccgagtcctactccagcggcggcggcggccagcagaaattccgggtagatatgcctggctcaggcagtgcattcatccccaccatcaacgccatcacgaccagccaggacctgcagtggatggtgcagcccacagtgatcacctccatgtccaacccataccctcgctcgcacccctacagccccctgccgggcctggcctctgtccctggacacatggccctcccaagacctggcgtgatcaagaccattggcaccaccgtgggccgcaggaggagagatgagcagctgtctcctgaagaggaggagaagcgtcgcatccggcgggagaggaacaagctggctgcagccaagtgccggaaccgacgccgggagctgacagagaagctgcaggcggagacagaggagctggaggaggagaagtcaggcctgcagaaggagattgctgagctgcagaaggagaaggagaagctggagttcatgttggtggctcacggcccagtgtgcaagattagccccgaggagcgccgatcgcccccagcccctgggctgcagcccatgcgcagtgggggtggctcggtgggcgctgtagtggtgaaacaggagcccctggaagaggacagcccctcgtcctcgtcggcggggctggacaaggcccagcgctctgtcatcaagcccatcagcattgctgggggcttctacggtgaggagcccctgcacacccccatcgtggtgacctccacacctgctgtcactccgggcacctcgaacctcgtcttcacctatcctagcgtcctggagcaggagtcacccgcatctccctccgaatcctgctccaaggctcaccgcagaagcagtagcagcggggaccaatcatcagactccttgaactcccccactctgctggctctgtaacccagtgcacctccctccccagctccggagggggtcctcctcgctcctccttcccagggaccagcaccttcaagcgctccagggccgtgagggcaagagggggacctgccaccagggagcttcctggctctgggggacccaggtgggacttagcagtgagtattggaagacttgggttgatctcttagaagccatgggacctcctccctcattcatcttgcaagcaaatcccatttcttgaaaagccttggagaactcggtttggtagacttggacatctctctggcttctgaagagcctgaagctggcctggaccattcctgtccctttgttaccatactgtctctggaagaggacagcccctcgtcctcgtcggcggggctggacaaggcccagcgctctgtcatcaagcccatcagcattgctgggggcttctacggtgaggaggccctgcacacccccatcgtggtgacctccacacctgctgtcactccgggcacctcgtatccgtccttccagcca

SEQ ID NO: 59539 - DNA, 1918 bp, Homo sapiens
cgcgggacgggcgcacgccgccttctcctagtcaagtatccgagccgccccgaaactcgggcggcgagtcggccacgggaagtttattctccggctccttttctaaaaggaagaaacagaagtttctcccagcggacagcttttctttccgcctttttggccctgtctgaaatcgggggtccccagggctggcaggccaggctcgctgggctcctaatcttttttttaatttccaatttttgattgggccgtgggtccccgctgagctccggctgcgcgcgggggcgggagggcgcgcgcaggggagggaccgagagacgcgccgactttttagagggagggatcgggtggacaactggtcccgcggcgctcgcagagccggaaagaagtgctgtaagggacgctcgggggacgctgttcctgaggtgtcgccgcctccctgtcctcgccctccgcggtgggggagaaacccaggagcgaagcccagagcccgcggcgcggccggcggacgaacgagcgcgcagcagccggtgcgcggccgcggcgagggcgggggaagaaaaacaccctgtttcctctccggcccccaccgcggatcatgtaccaggattatcccgggaactttgacacctcgtcccggggcagcagcggctctcctgcgcacgccgagtcctactccagcggcggcggcggccagcagaaattccgggtagatatgcctggctcaggcagtgcattcatccccaccatcaacgccatcacgaccagccaggacctgcagtggatggtgcagcccacagtgatcacctccatgtccaacccataccctcgctcgcacccctacagccccctgccgggcctggcctctgtccctggacacatggccctcccaagacctggcgtgatcaagaccattggcaccaccgtgggccgcaggaggagagatgagcagctgtctcctgaagaggaggagaagcgtcgcatccggcgggagaggaacaagctggctgcagccaagtgccggaaccgacgccgggagctgacagagaagctgcaggcggagacagaggagctggaggaggagaagtcaggcctgcagaaggagattgctgagctgcagaaggagaaggagaagctggagttcatgttggtggctcacggcccagtgtgcaagattagccccgaggagcgccgatcgcccccagcccctgggctgcagcccatgcgcagtgggggtggctcggtgggcgctgtagtggtgaaacaggagcccctggaagaggacagcccctcgtcctcgtcggcggggctggacaaggcccagcgctctgtcatcaagcccatcagcattgctgggggcttctacggtgaggagcccctgcacacccccatcgtggtgacctccacacctgctgtcactccgggcacctcgaacctcgtcttcacctatcctagcgtcctggagcaggagtcacccgcatctccctccgaatcctgctccaaggctcaccgcagaagcagtagcagcggggaccaatcatcagactccttgaactcccccactctgctggctctgtaacccagtgcacctccctccccagctccggagggggtcctcctcgctcctccttcccagggaccagcaccttcaagcgctccagggccgtgagggcaagagggggacctgccaccagggagcttcctggctctgggggacccaggtgggacttagcagtgagtattggaagacttgggttgatctcttagaagccatgggacctcctccctcattcatcttgcaagcaaatcccatttcttgaaaagccttggagaactcggtttggtagacttggacatctctctggcctggctagacccaggactacctcgtactacctaagcggggacttacttctgg

SEQ ID NO: 59540 - DNA, 1820 bp, Homo sapiens
ggagctcggtaccccctaaatggaatccctctcacttgattccaagtgtggttgaattgtctggagcactgggactttttttctcttttccttgatggaccaacagtgcaaatgcaatctcgccatttaactttcaggtcgatttcctttcctgatcagacatctttgtgccccctttaggaaggaaaagaatacacctacgatgtgccaggcactgtgttaggcgcttttatatagatcctcgttaggatgagactaagggatgaggacatctctttataaaaggcccctaagtaatggataaacagaaacacttagaggtgagaaggtctgtcttcaagatccaaggtaagattgccttcagtctgatgtttgttctcaaggacttatcccctacaatattctcccactccatacttctccttctaccccaccatgtgctcccgtgcactcctcagatggtcagaggggtaacccaagtccttagagaatttggggaccaatagaatatgtgatgtgtgaattttctttaaaaaacttaaggagtctttgctaccttctgcttgttgagttgttttggcattcatattaaaagccagcatctcactatttattgacaggttgggctgtgtgtgtgcgcatgtgtgtatacatttccaggcgtgcctgtgtcctgtagctttttaaaaggaaacccagtcatcccactatgaatctggcatcttcttatgcttctagtgttttggccatacatcaaccaaggggtttaatttatccaatgcttgacgacatgttcaggaggggctggatcaaattttgagagggttatgggaaagggagggggagaagaaattgacatttattttattatttattttaaatgtttacatcttctttatgttgtatcaagcctgaatagaaactgatagcattaaaatactccgttcctctctctcttctcgcttcctttttttttttttttaaatttaggataacacatttttgtttctaaagtgatttgtgatttgtgctgtataaactgtataaaaggttctgtttttaaaggtggattttcattcctctggggacagtggtcgccaagacatctacattgtaagagaacacagtggaagatcctgtcctgattctcaaaaattattttctctgtatgattaaaagtttattccatttattttagtttgtgtttacttgattttgaggaagaaaatatttgactttgtgtaaagagtagggtatcagggtgtcttttctgccgtgggagatgtgtatatatatagtattttggtgtatagtagaaaataagctttgtgcatctgtatttgagatatgttaatgacgtggagtaaagtcagctgtaagactctggaggcaaacaagttgtatatggttcatatggctctatggggaatttaattacctttctgggcactttttttttttttttttttttaagtaatggtgaaatggtcccattggagagtctcctaaatagaccttccaggcagaaccgcaagctcaaaatctttgtatagttttgaaaattgaggagtagctttgtttggaagcctttctggtggtggtttttgttgttgttgttgttttgttgttttactatatgtaatacaagcctacagtatttgcactaaagaaagcttgttagaaaaagcttgctgctatggaagaaagaacatattaaaacttctttcccttgcgatttttttgggggaggggggttagcatttccactttcagttgagtagcattttgtagaataaaatgaattaagattgaaaaaaaaa

SEQ ID NO: 59541 - DNA, 822 bp, Homo sapiens
aaaagaactgagcggaccggatgtgatttgtgctgtataaactgtataaaaggttctgtttttaaaggtggattttcattcctctggggacagtggtcgccaagacatctacattgtaagagaacacagtggaagatcctgtcctgattctcaaaaattattttctctgtatgattaaaagtttattccatttattttagtttgtgtttacttgattttgaggaagaaaatatttgactttgtgtaaagagtagggtatcagggtgtcttttctgccgtgggagatgtgtatatatatagtattttggtgtatagtagaaaataagctttgtgcatctgtatttgagatatgttaatgacgtggagtaaagtcagctgtaagactctggaggcaaacaagttgtatatggttcatatggctctatggggaatttaattacctttctgggcactttttttttttttttttttttaagtaatggtgaaatggtcccattggagagtctcctaaatagaccttccaggcagaaccgcaagctcaaaatctttgtatagttttgaaaattgaggagtagctttgtttggaagcctttctggtggtggtttttgttgttgttgttgttttgttgttttactatatgtaatacaagcctacagtatttgcactaaagaaagcttgttagaaaaagcttgctgctatggaagaaagaacatattaaaacttctttcccttgcgatttttttgggggaggggggttagcatttccactttcagttgagtagcattttgtagaataaaatgaattaagattgaaaaaaaaa

SEQ ID NO: 59542 - DNA, 374 bp, Homo sapiens
ccgggcctggcctctgtccctggacacatggccctcccaagacctggcgtgatcaagaccattggcaccaccgtgggccgcaggaggagagatgagcaggtacagctcagaccagtgggaaggagccacgtcagtggctttcagagccccagaaacacagaacgggtttctgcagactgggagggttaatgttctgagagcaggggagacaagggagctaggggtcgaagagcacgtcatcccccttactggaggccgagctggagagccaagactcaggctggctctgtcatctcgcttatgtcccttagaatctctgagtctcactttcctcagccacaaaatggggatcatggtccctgcaagccaggact

SEQ ID NO: 59543 - DNA, 2382 bp, Homo sapiens
tataagcggagcactggccatccacacataacgtctgaactggaaaagccttggcttccttatggcttgccctccaagttctctctctcatacacacacacacccttgctccagaatcaccagacacctccatggctccagctatgggaacagctgcattggggctgcctttctgtttggcttaggaacttctgtgcttcttgtggctccactcgcgaggcagctcggaggtgtggactccgattgggctgcaggcagctctgggacggcacagggcgggcgctctgatcagctcgtgtaaaacacaccgtcttcttggcctcctggccagtctttctgcgaatagtcctctccctggccagttgaatgggggaagctgctggcacaggaaggagaggcgatcccggctgaggcttaggaaattgctggagccggctccaagcagataattcactggggaggttttcagagtcaaacatcattctgcctgtgttgggggccaggtgtgtcacacaagcatctcaaagtcaaaagccatctggggctgctgcttctctttctcaggctctggggaaaggaatctccctctcctctcacttgattccaagtgtggttgaattgtctggagcactgggactttttttctcttttccttgatggaccaacagtgcaaatgcaatctcgccatttaactttcaggtcgatttcctttcctgatcagacatctttgtgccccctttaggaaggaaaagaatacacctacgatgtgccaggcactgtgttaggcgcttttatatagatcctcgttaggatgagactaagggatgaggacatctctttataaaaggcccctaagtaatggataaacagaaacacttagaggtgagaaggtctgtcttcaagatccaaggtaagattgccttcagtctgatgtttgttctcaaggacttatcccctacaatattctcccactccatacttctccttctaccccaccatgtgctcccgtgcactcctcagatggtcagaggggtaacccaagtccttagagaatttggggaccaatagaatatgtgatgtgtgaattttctttaaaaaacttaaggagtctttgctaccttctgcttgttgagttgttttggcattcatattaaaagccagcatctcactatttattgacaggttgggctgtgtgtgtgcgcatgtgtgtatacatttccaggcgtgcctgtgtcctgtagctttttaaaaggaaacccagtcatcccactatgaatctggcatcttcttatgcttctagtgttttggccatacatcaaccaaggggtttaatttatccaatgcttgacgacatgttcaggaggggctggatcaaattttgagagggttatgggaaagggagggggagaagaaattgacatttattttattatttattttaaatgtttacatcttctttatgttgtatcaagcctgaatagaaactgatagcattaaaatactccgttcctctctctcttctcgcttcctttttttttttttttaaatttaggataacacatttttgtttctaaagtgatttgtgatttgtgctgtataaactgtataaaaggttctgtttttaaaggtggattttcattcctctggggacagtggtcgccaagacatctacattgtaagagaacacagtggaagatcctgtcctgattctcaaaaattattttctctgtatgattaaaagtttattccatttattttagtttgtgtttacttgattttgaggaagaaaatatttgactttgtgtaaagagtagggtatcagggtgtcttttctgccgtgggagatgtgtatatatatagtattttggtgtatagtagaaaataagctttgtgcatctgtatttgagatatgttaatgacgtggagtaaagtcagctgtaagactctggaggcaaacaagttgtatatggttcatatggctctatggggaatttaattacctttctgggcactttttttttttttttttttttaagtaatggtgaaatggtcccattggagagtctcctaaatagaccttccaggcagaaccgcaagctcaaaatctttgtatagttttgaaaattgaggagtagctttgtttggaagcctttctggtggtggtttttgttgttgttgttgttttgttgttttactatatgtaatacaagcctacagtatttgcactaaagaaagcttgttagaaaaagcttgctgctatggaagaaagaacatattaaaacttctttcccttgcgatttttttgggggaggggggttagcatttccactttcagttgagtagcattttgtagaataaaatgaattaagattgaaaaaaaaa

SEQ ID NO: 59544 - DNA, 2205 bp, Homo sapiens
cgcgggacgggcgcacgccgccttctcctagtcaagtatccgagccgccccgaaactcgggcggcgagtcggccacgggaagtttattctccggctccttttctaaaaggaagaaacagaagtttctcccagcggacagcttttctttccgcctttttggccctgtctgaaatcgggggtccccagggctggcaggccaggctcgctgggctcctaatcttttttttaatttccaatttttgattgggccgtgggtccccgctgagctccggctgcgcgcgggggcgggagggcgcgcgcaggggagggaccgagagacgcgccgactttttagagggagggatcgggtggacaactggtcccgcggcgctcgcagagccggaaagaagtgctgtaagggacgctcgggggacgctgttcctgaggtgtcgccgcctccctgtcctcgccctccgcggtgggggagaaacccaggagcgaagcccagagcccgcggcgcggccggcggacgaacgagcgcgcagcagccggtgcgcggccgcggcgagggcgggggaagaaaaacaccctgtttcctctccggcccccaccgcggatcatgtaccaggattatcccgggaactttgacacctcgtcccggggcagcagcggctctcctgcgcacgccgagtcctactccagcggcggcggcggccagcagaaattccgggtagatatgcctggctcaggcagtgcattcatccccaccatcaacgccatcacgaccagccaggacctgcagtggatggtgcagcccacagtgatcacctccatgtccaacccataccctcgctcgcacccctacagccccctgccgggcctggcctctgtccctggacacatggccctcccaagacctggcgtgatcaagaccattggcaccaccgtgggccgcaggaggagagatgagcagctgtctcctgaagaggaggagaagcgtcgcatccggcgggagaggaacaagctggctgcagccaagtgccggaaccgacgccgggagctgacagagaagctgcaggcggagacagaggagctggaggaggagaagtcaggcctgcagaaggagattgctgagctgcagaaggagaaggagaagctggagttcatgttggtggctcacggcccagtgtgcaagattagccccgaggagcgccgatcgcccccagcccctgggctgcagcccatgcgcagtgggggtggctcggtgggcgctgtagtggtgaaacaggagcccctggaagaggacagcccctcgtcctcgtcggcggggctggacaaggcccagcgctctgtcatcaagcccatcagcattgctgggggcttctacggtgaggagcccctgcacacccccatcgtggtgacctccacacctgctgtcactccgggcacctcgaacctcgtcttcacctatcctagcgtcctggagcaggagtcacccgcatctccctccgaatcctgctccaaggctcaccgcagaagcagtagcagcggggaccaatcatcagactccttgaactcccccactctgctggctctgtaacccagtgcacctccctccccagctccggagggggtcctcctcgctcctccttcccagggaccagcaccttcaagcgctccagggccgtgagggcaagagggggacctgccaccagggagcttcctggctctgggggacccaggtgggacttagcagtgagtattggaagacttgggttgatctcttagaagccatgggacctcctccctcattcatcttgcaagcaaatcccatttcttgaaaagccttggagaactcggtttggtagacttggacatctctctggcttctgaagagcctgaagctggcctggaccattcctgtccctttgttaccatactgtctctggagtgatggtgtccttccctgccccaaaaagacatggaaaaaacttaactgcatgtctgtaagtgagggaatcctagtgtaaactgtggaatccaggtgataatgataagtcagtgcaggttcattgatggaaagaaatgcaccactctggttggagctgttgacagtggaggaccctatgcacgtgtgtgggcagggagtatctgggatcactctgtactttctgcttaattttgctgtgaacctaaaaccactctaaaaaataaaggctattttta

SEQ ID NO: 59545 - DNA, 1385 bp, Homo sapiens
cgcgggacgggcgcacgccgccttctcctagtcaagtatccgagccgccccgaaactcgggcggcgagtcggccacgggaagtttattctccggctccttttctaaaaggaagaaacagaagtttctcccagcggacagcttttctttccgcctttttggccctgtctgaaatcgggggtccccagggctggcaggccaggctcgctgggctcctaatcttttttttaatttccaatttttgattgggccgtgggtccccgctgagctccggctgcgcgcgggggcgggagggcgcgcgcaggggagggaccgagagacgcgccgactttttagagggagggatcgggtggacaactggtcccgcggcgctcgcagagccggaaagaagtgctgtaagggacgctcgggggacgctgttcctgaggtgtcgccgcctccctgtcctcgccctccgcggtgggggagaaacccaggagcgaagcccagagcccgcggcgcggccggcggacgaacgagcgcgcagcagccggtgcgcggccgcggcgagggcgggggaagaaaaacaccctgtttcctctccggcccccaccgcggatcatgtaccaggattatcccgggaactttgacacctcgtcccggggcagcagcggctctcctgcgcacgccgagtcctactccagcggcggcggcggccagcagaaattccgggtagatatgcctggctcaggcagtgcattcatccccaccatcaacgccatcacgaccagccaggacctgcagtggatggtgcagcccacagtgatcacctccatgtccaacccataccctcgctcgcacccctacagccccctgccgggcctggcctctgtccctggacacatggccctcccaagacctggcgtgatcaagaccattggcaccaccgtgggccgcaggaggagagatgagcagctgtctcctgaagaggaggagaagcgtcgcatccggcgggagaggaacaagctggctgcagccaagtgccggaaccgacgccgggagctgacagagaagctgcaggcggtgaggaactctgcgtagggtgggagcacctctgggtgggctggagtgagagccccgggggtcctgatcctctctcccacagctgtctccttacccacaaatgccctacagatgagtcagtggagatagagctttccttcctttggacacatgggtcagcattgtgttgattgaaaagagagagagagagggaggtggcgtttagcaccagccagggcccagagggaagaaatgaacaaccttctgtgggggtgctagccacggtttttacgcagcacctgagtgttctctgctcacagaactgtgggggctcctgggtgaggga

SEQ ID NO: 59546 - DNA, 1239 bp, Homo sapiens
  misc_feature (21)..(21): n is a, c, g, or t
aaaggcccaggcggtaccggnccgagttgttaggatttgctgctggcttcactactggccttgtgctgaattcaggtgctggggttacccagagtgtgcccatctttgagggttactgtctgcctcatggtgtgcagcaactggatctggcaggccttgacctcaccaactacctcatggtgctaatgaagaaccatggtatcatgttgctcagtgcttcagacagaaagattgttgaagacatcaaggagagcttttgttatgtggcaatgaactacgaagaggaaatggccaagaaacccgattgtctagagaaagtttaccaactacctgatgggaaggtcatccagctccatgaccagctcttttcttgtccagaggccctcttctctccgtgtcatatgaaccttgaggcccctggcattgataagatatgcttcagcagcataatgaaatgtgatacaggcctgaggaattccttcttttccaatattatccttgccgggggatcaacctctttccctggtttagacaagcggttagttaaggatatagcaaaggtggctcctgccaacaccgctgtgcaagttatagctcctccagaaaggaaaatatcagtgtggatgggaggttctattcttgcatccttgtctgccttccaggacatgtggatcactgctgcagaatttaaagaagttggacccaacatagtacaccaaagatgcttctgaaatacagataaaatggttggaagaaaatgttttgagtatatgtgacagaaaactttggatattatatgtttctgggagaagagaaaatacttcacctattgggatgccaatatttctgttgtatttctataatgggtttgggggataataatggtgaagctcaagaacagatgtctattgagtagaaccaagttaaaataatgtttcccatagtgtttcttctataacttgacgttggtgagcttatatttcccttggaagagagcatttgtggtacaatatgctatgtgccaaatgagtgataagatttaagcttattgaagtttagggaaagaaggttgctgtggtgaggaacgagactccatagcagaggtatgccatcatggaaggggtggcattgggatggagcgcagatatccaggcaagcatactaaaatgaacaagttgctaaagatgagaatgaacaaagcatattcagggcatgtttaatagactgattttgttttta

SEQ ID NO: 59547 - DNA, 1922 bp, Homo sapiens
gttgaatcttttgatgcgaaagtcgggttttcctgatactgggattccgggattccaggtgttggggtggcccaattcctgcgagaagcaatagcgggcggtaacatgaggagcacggtgcgtccagcgagtccttccgcctggggccctgccgaccccctgcctgcgcccccaggactctggcctcacccggccgtgccggggcctctgtgacgcggcgttccaggcactcggccccggccgagcccgtagctagagcggctcagagacaggaggcggcggcagcagcggcggcatgaaccactgccagctaccggtggtgatcgacaacggctcgggaatgatcaaggcgggcgtggctgggtgccgggagccccagtttatctacccgaacattatcggccgcgccaagggccagagccgcgcggcccagggcgggctagaactctgcgtgggcgaccaagctcaggactggaggagctcgctgttcatcagttacccagtggagcgtggtctcattacttcatgggaggacatggagatcatgtggaagcatatctatgactataacctaaagctgaagccgtgtgatggcccagtcttgattactgagccagcgctgaacccactggccaaccggcaacagatcacggaaatgttttttgagcatctgggtgttcctgccttctatatgtccatccaggctgtgctggctctctttgctgctggcttcactactggccttgtgctgaattcaggtgctggggttacccagagtgtgcccatctttgagggttactgtctgcctcatggtgtgcagcaactggatctggcaggccttgacctcaccaactacctcatggtgctaatgaagaaccatggtatcatgttgctcagtgcttcagacagaaagattgttgaagacatcaaggagagcttttgttatgtggcaatgaactacgaagaggaaatggccaagaaacccgattgtctagagaaagtttaccaactacctgatgggaaggtcatccagctccatgaccagctcttttcttgtccagaggccctcttctctccgtgtcatatgaaccttgaggcccctggcattgataagatatgcttcagcagcataatgaaatgtgatacaggcctgaggaattccttcttttccaatattatccttgccgggggatcaacctctttccctggtttagacaagcggttagttaaggatatagcaaaggtggctcctgccaacaccgctgtgcaagttatagctcctccagaaaggaaaatatcagtgtggatgggaggttctattcttgcatccttgtctgccttccaggacatgtggatcactgctgcagaatttaaagaagttggacccaacatagtacaccaaagatgcttctgaaatacagataaaatggttggaagaaaatgttttgagtatatgtgacagaaaactttggatattatatgtttctgggagaagagaaaatacttcacctattgggatgccaatatttctgttgtatttctataatgggtttgggggataataatggtgaagctcaagaacagatgtctattgagtagaaccaagttaaaataatgtttcccatagtgtttcttctataacttgacgttggtgagcttatatttcccttggaagagagcatttgtggtacaatatgctatgtgccaaatgagtgataagatttaagcttattgaagtttagggaaagaaggttgctgtggtgaggaacgagactccatagcagaggtatgccatcatggaaggggtggcattgggatggagcgcagatatccaggcaagcatactaaaatgaacaagttgctaaagatgagaatgaacaaagcatattcagggcatgtttaatagactgattttgttttta

SEQ ID NO: 59548 - DNA, 1198 bp, Homo sapiens
gctagtaggattctcaggaaaagcaaagattcaggtgctggggttacccagagtgtgcccatctttgagggttactgtctgcctcatggtgtgcagcaactggatctggcaggccttgacctcaccaactacctcatggtgctaatgaagaaccatggtatcatgttgctcagtgcttcagacagaaagattgttgaagacatcaaggagagcttttgttatgtggcaatgaactacgaagaggaaatggccaagaaacccgattgtctagagaaagtttaccaactacctgatgggaaggtcatccagctccatgaccagctcttttcttgtccagaggccctcttctctccgtgtcatatgaaccttgaggcccctggcattgataagatatgcttcagcagcataatgaaatgtgatacaggcctgaggaattccttcttttccaatattatccttgccgggggatcaacctctttccctggtttagacaagcggttagttaaggatatagcaaaggtggctcctgccaacaccgctgtgcaagttatagctcctccagaaaggaaaatatcagtgtggatgggaggttctattcttgcatccttgtctgccttccaggacatgtggatcactgctgcagaatttaaagaagttggacccaacatagtacaccaaagatgcttctgaaatacagataaaatggttggaagaaaatgttttgagtatatgtgacagaaaactttggatattatatgtttctgggagaagagaaaatacttcacctattgggatgccaatatttctgttgtatttctataatgggtttgggggataataatggtgaagctcaagaacagatgtctattgagtagaaccaagttaaaataatgtttcccatagtgtttcttctataacttgacgttggtgagcttatatttcccttggaagagagcatttgtggtacaatatgctatgtgccaaatgagtgataagatttaagcttattgaagtttagggaaagaaggttgctgtggtgaggaacgagactccatagcagaggtatgccatcatggaaggggtggcattgggatggagcgcagatatccaggcaagcatactaaaatgaacaagttgctaaagatgagaatgaacaaagcatattcagggcatgtttaatagactgattttgttttta

SEQ ID NO: 59549 - DNA, 249 bp, Homo sapiens
gttatgatgaggtaataaggactgttcttgttacagataattttgttgcttttgcacttcgctgcagtgcctgttatgcctgctattggtaatacaaaaattattttggaaacacataaaaacatagaaataggtcaggcacggtggcttatgcctgtaatcccaacactttgggaagctgaggcaggaggatcgcttgagcccttgagcccagtcagggtaacacagggagacctcgtctctaccaaa

SEQ ID NO: 59550 - DNA, 291 bp, Homo sapiens
ggtccggagggtactttctaacttgagttattctcattattccactcaagagaagtaactgcaaaacaggtgttaaaccatgcagtaggatttacagaggttgagggactccatgagtccacttgaaccagagcagcacgatttttattttttaggtaggaatttcttttggggggaaaataaggagccaagaattctattaatgctttaaaaatgttttaagtgggaggagggtgaagggacaagcaactctactttctgctcaatattgctgtgaactaaaatttttct

SEQ ID NO: 59551 - DNA, 292 bp, Homo sapiens
ctggccgaggtttagttttatatttattgagtacttgaatttggggcttaaattttaaacttattttctcaagctaactttttctaggaagaaaggttctgcaggctggaaaagtagggggaagataagagaaagaaaaaaaaataagatgggatgtaccaatgaagaaaaatacgatgagagggtctatgaaaagtccagtttgtgaaagatagaaagtatatgaaaagaataagcaaatagattgataccatttaaaaacatttctgcagaaacttgcaaaaaaaaaaaa

SEQ ID NO: 59552 - DNA, 1293 bp, Homo sapiens
atgtgggaaagcctttcgttccagctcacaaattagtcagcatcagaggatgcatcttggtgagaaaccctataagtgtagggagtgtgggaaagcctttccatccactgcacagcttaatctacatcagaggatccatactgatgagaaatactatgaaagtaaggcgtgtgggaaggcctttacccgtccctcacacctttttcgacatcaaagaatccatacgggtgagaaaccccataaatgtaaggaatgtggaaaggcttttcgttatgacacacagctgagccttcatcagataatccatactggtgaaagacgctatgaatgcagggagtgtggaaaggtgtacagttgtgcctcacagctgagtctacatcaaagaattcatactggtgagaaaccccatgaatgtaaggaatgtgggaaagcctttatctctgattcacatcttattcgacatcagagtgtccatactggggagaaaccctgtaagtgtaaggaatgtgggaagtcctttcgtcgtggctcagaacttacccgacatcagagagctcatactggtgaaaaaccctatgagtgtaaggaatgtggaaaggcctttacttgtagcacagaacttgttcgacatcaaaaagttcacactggggagagaccccataagtgtaaggaatgtgggaaggctttcattcgaaggtcagaactcacacatcatgagagaagtcacactggtgagaaaccctacgagtgtaaggagtgtgggaagccctttggtggtggctcagaacttagttgacaccagaaaattcatactggtgagaaaccatatgaatgtcagcagtgtggaaaggccttcattcgggcctcacaccttagtcaacatcaaagaattcattcaggacagaggagtgaatgaagaaatgagggatggctcagaatttgattgacatgagaaagttcatactgatttggaaaaaaaaacttatgattctaagtgtgagacaccttataaatgttaggaattagcagggatttatttatgtttcagaatttattacacatcatgatacaactggtgaaaaattgaagacctccatgaatgtaaagaaagtagggaggcctttttggtggctcagaacgaagtcaacctcagggaattcaaatgggggagaggagggcagtgaatatgctgagaggagttaatcattcagaccttatcagcagcagagtcattagcccttaggggaaatcagatgattcaaaatataaatgcaggccgggcccggtggctcc

SEQ ID NO: 59553 - DNA, 314 bp, Homo sapiens
gaagaagagaaacaagttgcagcaaaagtcacagtggggtagctgtccctagagttgaacagacacatttcaagccttatccaagtttaggacttttggaaagcattgcagttgcgaataagagaatgtgcttggaatcttactcttgtgcattgaagaaggataagaaacaggaagaagtagaagaataaggggctggagatcaagacctacccattgtgatgaataaatccaggctctcagcaatgcagggagaaaaagttttgtctatcaacactgcagcaaccagtctcttagcacaggcaccagccctg

SEQ ID NO: 59554 - DNA, 4345 bp, Homo sapiens
  misc_feature (2046)..(2046): n is a, c, g, or t
cgcacctgctgcaggtgctcccggccgccccggaccagcgagcgcgggcactgcggcggggaggatgctgcgcgagcggaccgtgcggctgcagtacgggagccgcgtggaggcggtgtacgtgctgggcacctacctctggaccgatgtctacagcgcggccccagccggggcccaaaccttcagcctgaagcactcggaacacgtgtgggtggaggtggtgcgtgatggggaggctgaggaggtggccaccaatggcaagcagcgctggcttctctcgcccagcaccaccctgcgggtcaccatgagccaggcgagcaccgaggccagcagtgacaaggtcaccgtcaactactatgacgaggaagggagcattcccatcgaccaggcggggctcttcctcacagccattgagatctccctggatgtggacgcagaccgggatggtgtggtggagaagaacaacccaaagaaggcatcctggacctggggccccgagggccagggggccatcctgctggtgaactgtgaccgagagacaccctggttgcccaaggaggactgccgtgatgagaaggtctacagcaaggaagatctcaaggacatgtcccagatgatcctgcggaccaaaggccccgaccgcctccccgccggatacgagatagttctgtacatttccatgtcagactcagacaaagtgggcgtgttctacgtggagaacccgttcttcggccaacgctatatccacatcctgggccggcggaagctctaccatgtggtcaagtacacgggtggctccgcggagctgctgttcttcgtggaaggcctctgtttccccgacgagggcttctcaggcctggtctccatccatgtcagcctgctggagtacatggcccaggacattcccctgactcccatcttcacggacaccgtgatattccggattgctccgtggatcatgacccccaacatcctgcctcccgtgtcggtgtttgtgtgctgcatgaaggataattacctgttcctgaaagaggtgaagaaccttgtggagaaaaccaactgtgagctgaaggtctgcttccagtacctaaaccgaggcgatcgctggatccaggatgaaattgagtttggctacatcgaggccccccataaaggcttccccgtggtgctggactctccccgagatggaaacctaaaggacttccctgtgaaggagctcctgggcccagattttggctacgtgacccgggagcccctctttgagtctgtcaccagccttgactcatttggaaacctggaggtcagtcccccagtgaccgtgaacggcaagacatacccgcttggccgcatcctcatcgggagcagctttcctctgtctggtggtcggaggatgaccaaggtggtgcgtgacttcctgaaggcccagcaggtgcaggcacccgtggagctctactcagactggctgactgtgggccacgtggatgagttcatgtcctttgtccccatccccggcacaaagaaattcctgctactcatggccagcacctcggcctgctacaagctcttccgagagaagcagaaggacggccatggagaggccatcatgttcaaaggcttgggtgggatgagcagcaagcgaatcaccatcaacaagattctgtccaacgagagccttgtgcaggagaacctgtacttccagcgctgcctagactggaaccgtgacatcctcaagaaggagctgggactgacagagcaggacatcattgacctgcccgctctgttcaagatggacgaggaccaccgtgccagagccttcttcccaaacatggtgaacatgatcgtgctggacaaggacctgggcatccccaagccattcgggccacaggttgaggaggaatgctgcctggagatgcacgtgcgtggcctcctggagcccctgggcctcgaatgcaccttcatcgacgacatttctgcctaccacaaatttctgggggaagtccactgtggcaccaacgtccgcaggaagcccttcaccttcaagtggtngcacatggtgccctgacctgccaggggccctggcgtttgcctccttcgcttagttctccagaccctccctcacacgcccagagccttctgctgacatggactggacagccccgctgggagacctttgggacgtggggtggaatttggggtatctgtgccttgccctccctgagaggggcctcagtgtcctctgaagccatccccagtgagcctcgactctgtccctgctgaaaatagctgggccagtgtctctgtagccctgacataaggaacagaacacaacaaaacacagcaaaccatgtgcccaaactgctccccaaagaattttgagtctctaatctgacactgaatgaggggagaagggaaggagattctgggattgccagttcttccagcagccatgctctgaaaatcaaggtagaatccatggaaagggaccccaggaccccgggaccctagacgtatcttgaactgccatcgtcatttcaaatacatctccctcagggtttccaggtggccacccccaattattcattccttaccaacctctcaaatcctcttggctttctctctgcagtgtggacactgttggctagtcctccccactccctgagggtccagtaagttagcttagaaccttcctggaaacatttcatctgagcaggtttccccacgtgtgggatgctccttttgcctcatctgtctcagggatgcaggctcccccgcatgcatggggatttctccccagaccagcatacttgtgacctgagagttcaatgcgtaaagatgcccctggtcagccatatccatcttctcttgcctggtccttgattctctggccgctccctgaccttcctccttccactgccttgactttcttcctttttattcctggtgccatctgtccaggcagctagacaagaacttgttcaccagcagccggattcaggccttcccaggggcataataagtgaccagcccctcctctccggacatcagatccaacacataaggaccctggcctaccctccagcccaacagccagttctgggtcagctgccaacttaggggtggtttgattatcccattgaaattcaccagtgcctttgccaaagaccctctcatttggacatacccagattcattccctggctccaactgaaaagactcagtttcaatcgttaaaagttcctttagggccagaagaataaatgaattataatcccattttgaagaaccgatttataaccaatgaaaaggttataatgtaatttatattcttggaggaacaagattttcatttgggattatttccttcaaccattcaacaaacatttgttgtatgccactaagcgccaggcacggcgttgggctctgcaaacacagtggttagtagcagtctggacctggtccctactggcatggaacccatcactccccaacatgcaaagcccacatttaaaggccagcctctgccccttcagtgatgcgctctttagaaatgccagtccactatattcagaaatccgcagggcacaaaacttccagcaagtcactgttgtggtgaaatgggcagtgggggtggggggtcttctttaaacaggcccccttcccatctacctagccagtacccatccaatgagtccccagagcctccagaagctgttgtctcctctctggggacagcagctcctgcctttggaggccaaagccccagatctctccagccccagagctgaaaacaccaagtgcctatttgagggtgtctgtctggagacttagagtttgtcatgtgtgtgtgtgtgttggttaatgtgggtttatgggttttctttctttttttttttttttttttttagtctacattagggggaagtgagcgcctcccatgtgcagacagtgtgtctttatagatttttctaaggctttccccaatgatgtcggtaatttctgatgtttctgaagttcccaggactcacacacccgttcccatctcacttgcccacccagtgtgacaaccctcggtgtggatatacccccgtggactcatggctcttccccacccccactttctataaatgtaggcctagaatacgcttctctgttgcaaaactcagctaagttcctgcttccaccttgatgttgaaatatcttatgtaagagggcaggggatgtcgtgaagatggcaagaagaacacagtttcaaatttctggaaaagagcctgtggtggagatctaaagatgtttagggaagagctcgactaaagaacaatgaaataaatggtccaaggggaagtca

SEQ ID NO: 59555 - DNA, 4487 bp, Homo sapiens
  misc_feature (2046)..(2046): n is a, c, g, or t
cgcacctgctgcaggtgctcccggccgccccggaccagcgagcgcgggcactgcggcggggaggatgctgcgcgagcggaccgtgcggctgcagtacgggagccgcgtggaggcggtgtacgtgctgggcacctacctctggaccgatgtctacagcgcggccccagccggggcccaaaccttcagcctgaagcactcggaacacgtgtgggtggaggtggtgcgtgatggggaggctgaggaggtggccaccaatggcaagcagcgctggcttctctcgcccagcaccaccctgcgggtcaccatgagccaggcgagcaccgaggccagcagtgacaaggtcaccgtcaactactatgacgaggaagggagcattcccatcgaccaggcggggctcttcctcacagccattgagatctccctggatgtggacgcagaccgggatggtgtggtggagaagaacaacccaaagaaggcatcctggacctggggccccgagggccagggggccatcctgctggtgaactgtgaccgagagacaccctggttgcccaaggaggactgccgtgatgagaaggtctacagcaaggaagatctcaaggacatgtcccagatgatcctgcggaccaaaggccccgaccgcctccccgccggatacgagatagttctgtacatttccatgtcagactcagacaaagtgggcgtgttctacgtggagaacccgttcttcggccaacgctatatccacatcctgggccggcggaagctctaccatgtggtcaagtacacgggtggctccgcggagctgctgttcttcgtggaaggcctctgtttccccgacgagggcttctcaggcctggtctccatccatgtcagcctgctggagtacatggcccaggacattcccctgactcccatcttcacggacaccgtgatattccggattgctccgtggatcatgacccccaacatcctgcctcccgtgtcggtgtttgtgtgctgcatgaaggataattacctgttcctgaaagaggtgaagaaccttgtggagaaaaccaactgtgagctgaaggtctgcttccagtacctaaaccgaggcgatcgctggatccaggatgaaattgagtttggctacatcgaggccccccataaaggcttccccgtggtgctggactctccccgagatggaaacctaaaggacttccctgtgaaggagctcctgggcccagattttggctacgtgacccgggagcccctctttgagtctgtcaccagccttgactcatttggaaacctggaggtcagtcccccagtgaccgtgaacggcaagacatacccgcttggccgcatcctcatcgggagcagctttcctctgtctggtggtcggaggatgaccaaggtggtgcgtgacttcctgaaggcccagcaggtgcaggcacccgtggagctctactcagactggctgactgtgggccacgtggatgagttcatgtcctttgtccccatccccggcacaaagaaattcctgctactcatggccagcacctcggcctgctacaagctcttccgagagaagcagaaggacggccatggagaggccatcatgttcaaaggcttgggtgggatgagcagcaagcgaatcaccatcaacaagattctgtccaacgagagccttgtgcaggagaacctgtacttccagcgctgcctagactggaaccgtgacatcctcaagaaggagctgggactgacagagcaggacatcattgacctgcccgctctgttcaagatggacgaggaccaccgtgccagagccttcttcccaaacatggtgaacatgatcgtgctggacaaggacctgggcatccccaagccattcgggccacaggttgaggaggaatgctgcctggagatgcacgtgcgtggcctcctggagcccctgggcctcgaatgcaccttcatcgacgacatttctgcctaccacaaatttctgggggaagtccactgtggcaccaacgtccgcaggaagcccttcaccttcaagtggtngcacatggtgccctgacctgccaggggccctggcgtttgcctccttcgcttagttctccagaccctccctcacacgcccagagccttctgctgacatggactggacagccccgctgggagacctttgggacgtggggtggaatttggggtatctgtgccttgccctccctgagaggggcctcagtgtcctctgaagccatccccagtgagcctcgactctgtccctgctgaaaatagctgggccagtgtctctgtagccctgacataaggaacagaacacaacaaaacacagcaaaccatgtgcccaaactgctccccaaagaattttgagtctctaatctgacactgaatgaggggagaagggaaggagattctgggattgccagttcttccagcagccatgctctgaaaatcaaggtagaatccatggaaagggaccccaggaccccgggaccctagacgtatcttgaactgccatcgtcatttcaaatacatctccctcagggtttccaggtggccacccccaattattcattccttaccaacctctcaaatcctcttggctttctctctgcagtgtggacactgttggctagtcctccccactccctgagggtccagtaagttagcttagaaccttcctggaaacatttcatctgagcaggtttccccacgtgtgggatgctccttttgcctcatctgtctcagggatgcaggctcccccgcatgcatggggatttctccccagaccagcatacttgtgacctgagagttcaatgcgtaaagatgcccctggtcagccatatccatcttctcttgcctggtccttgattctctggccgctccctgaccttcctccttccactgccttgactttcttcctttttattcctggtgccatctgtccaggcagctagacaagaacttgttcaccagcagccggattcaggccttcccaggggcataataagtgaccagcccctcctctccggacatcagatccaacacataaggaccctggcctaccctccagcccaacagccagttctgggtcagctgccaacttaggggtggtttgattatcccattgaaattcaccagtgcctttgccaaagaccctctcatttggacatacccagattcattccctggctccaactgaaaagactcagtttcaatcgttaaaagttcctttagggccagaagaataaatgaattataatcccattttgaagaaccgatttataaccaatgaaaaggttataatgtaatttatattcttggaggaacaagattttcatttgggattatttccttcaaccattcaacaaacatttgttgtatgccactaagcgccaggcacggcgttgggctctgcaaacacagtggttagtagcagtctggacctggtccctactggcatggaacccatcactccccaacatgcaaagcccacatttaaaggccagcctctgccccttcagtgatgcgctctttagaaatgccagtccactatattcagaaatccgcagggcacaaaacttccagcaagtcactgttgtggtgaaatgggcagtgggggtggggggtcttctttaaacaggcccccttcccatctacctagccagtacccatccaatgagtccccagagcctccagaagctgttgtctcctctctggggacagcagctcctgcctttggaggccaaagccccagatctctccagccccagagctgaaaacaccaagtgcctatttgagggtgtctgtctggagacttagagtttgtcatgtgtgtgtgtgtgttggttaatgtgggtttatgggttttctttctttttttttttttttttttttagtctacattagggggaagtgagcgcctcccatgtgcagacagtgtgtctttatagatttttctaaggctttccccaatgatgtcggtaatttctgatgtttctgaagttcccaggactcacacacccgttcccatctcacttgcccacccagtgtgacaaccctcggtgtggatatacccccgtggactcatggctcttccccacccccactttctataaatgtaggcctagaatacgcttctctgttgcaaaactcagctaagttcctgcttccaccttgatgttgaaatatcttatgtaagagggcaggggatgtcgtgaagatggcaagaagaacacagtttcaaatttctggaaaagagcctgtggtggagatctaaagatgtttagggaagagctcgactaaagaacaatgaaataaatggtccaaggggaagtcaaaaaaaactaaataaaaaagtattaaggtcgaagattcaaaaaattttgcatacataatttacacgaaagcaactgctagtcacctcccctgtgtggacttgggagaggactgggccattcactagagagaattcggcgtgc

SEQ ID NO: 59556 - DNA, 1263 bp, Homo sapiens
tctcagctgcctctgtattggcgtgggttcgattggtctcctatctgaactccgcctgtgcacttagctggaatacactgcgcatttggagcatagactcattcctgccctgtatccggctgcaatgacgactcagtttcaatcgttaaaagttcctttagggccagaagaataaatgaattataatcccattttgaagaaccgatttataaccaatgaaaaggttataatgtaatttatattcttggaggaacaagattttcatttgggattatttccttcaaccattcaacaaacatttgttgtatgccactaagcgccaggcacggcgttgggctctgcaaacacagtggttagtagcagtctggacctggtccctactggcatggaacccatcactccccaacatgcaaagcccacatttaaaggccagcctctgccccttcagtgatgcgctctttagaaatgccagtccactatattcagaaatccgcagggcacaaaacttccagcaagtcactgttgtggtgaaatgggcagtgggggtggggggtcttctttaaacaggcccccttcccatctacctagccagtacccatccaatgagtccccagagcctccagaagctgttgtctcctctctggggacagcagctcctgcctttggaggccaaagccccagatctctccagccccagagctgaaaacaccaagtgcctatttgagggtgtctgtctggagacttagagtttgtcatgtgtgtgtgtgtgttggttaatgtgggtttatgggttttctttctttttttttttttttttttttagtctacattagggggaagtgagcgcctcccatgtgcagacagtgtgtctttatagatttttctaaggctttccccaatgatgtcggtaatttctgatgtttctgaagttcccaggactcacacacccgttcccatctcacttgcccacccagtgtgacaaccctcggtgtggatatacccccgtggactcatggctcttccccacccccactttctataaatgtaggcctagaatacgcttctctgttgcaaaactcagctaagttcctgcttccaccttgatgttgaaatatcttatgtaagagggcaggggatgtcgtgaagatggcaagaagaacacagtttcaaatttctggaaaagagcctgtggtggagatctaaagatgtttagggaagagctcgactaaagaacaatgaaataaatggtccaaggggaagtca

SEQ ID NO: 59557 - DNA, 628 bp, Homo sapiens
  misc_feature (11)..(11): n is a, c, g, or t
ctctctagggngctgagagatctggggctttggcctccaaaggcaggagctgctgtccccagagctgaaaacaccaagtgcctatttgagggtgtctgtctggagacttagagtttgtcatgtgtgtgtgtgtgttggttaatgtgggtttatgggttttctttctttttttttttttttttttttagtctacattagggggaagtgagcgcctcccatgtgcagacagtgtgtctttatagatttttctaaggctttccccaatgatgtcggtaatttctgatgtttctgaagttcccaggactcacacacccgttcccatctcacttgcccacccagtgtgacaaccctcggtgtggatatacccccgtggactcatggctcttccccacccccactttctataaatgtaggcctagaatacgcttctctgttgcaaaactcagctaagttcctgcttccaccttgatgttgaaatatcttatgtaagagggcaggggatgtcgtgaagatggcaagaagaacacagtttcaaatttctggaaaagagcctgtggtggagatctaaagatgtttagggaagagctcgactaaagaacaatgaaataaatggtccaaggggaagtca

SEQ ID NO: 59558 - DNA, 465 bp, Homo sapiens
gacattcccctgactcccatcttcacggacaccgtgatattccggattgctccgtggatcatgacccccaacatcctgcctcccgtgtcggtgtttgtgtgctggtaaggggtgaccccagcctggagaggcagcgtggcagagtggccaagggccgagtcagatggacatgagtctagttcctggccccgtcacttaccactgtgttaccttgagcaactctcttggcctctctgaaatgcccacatcgtagagtcactgtgagaattaaatgagatgaagcaggcaaagcatttatccaaggcccagcacacagggtatgctctaaaaataatagctgccattctgttctcttgcttaaccctctaccaggcagttagcaacctcctatgcagtggaaatgcagctcatctgactcattcattaaacagacttttattgaccacctattatgagctaggtcca

SEQ ID NO: 59559 - DNA, 564 bp, Homo sapiens
cgcacctgctgcaggtgctcccggccgccccggaccagcgagcgcgggcactgcggcggggaggatgctgcgcgagcggaccgtgcggctgcagtacgggagccgcgtggaggcggtgtacgtgctgggcacctacctctggaccgatgtctacaggtgagccggcccaccgtgatgcccgggccgagatctcgagcccagaaatcctgagacgcgctcagactcggggacgtggacagcctttgtccagcccgagttgtccctcatcccgagcccccgagcccagaaatcctaagaatctcatccagaaacctgacaacccccgaaccttgtgtccaccttccagaaaccctgagactctcccagaccccctaacacagcctcagccccagctccctcacagaccctccctttcacccgtaaccctccgtctggccctctccagttctcctcccgggggacctcacaccccttcagcttccctgccgtcctctcccctttcacttcccctccgcacctcacttcccctcggacccacctcaacccagcccctctcctgcttcc

SEQ ID NO: 59560 - DNA, 393 bp, Homo sapiens
tcgggctttgacctcccaaagtgctggaagcaggagtctcctcttgaagcccctcatcccacctaccccagggctctccctaaccctctctcatctctccccacagcgcggccccagccggggcccaaaccttcagcctgaagcactcggaacacgtgtgggtggaggtggtgcgtgatggggaggctgaggaggtggccaccaatggcaagcagcgctggcttctctcgcccagcaccaccctgcgggtcaccatgagccaggcgagcaccgaggccagcagtgacaaggtaccacggcgggaagtccagcctctgcgggcccgggaccatgccaggatagaggcagggtggaccagccctgtcccatagaaactgcacgtgggccatgtgt

SEQ ID NO: 59561 - DNA, 269 bp, Homo sapiens
cccaggggtgcccttggccctgatacagatttagctaccttcccccgaaagcctcaaagttctgcaaactcacagccaagcaaaacgcagctgcagtcgagccagcctcgaaaggtcttacaactttctgcagtggccagcttgttctctgtttccatgccttccagaatgaagaagatcagttctaaggtttcttactatttctaccaagagacgaccatcggcattccacagacggctcctctagctgtgcacaatgcctgttctta

SEQ ID NO: 59562 - DNA, 198 bp, Homo sapiens
gttggcaattttgtaaagcaaatgaagggaggatgaaagcaaaggaatttaaagaaagcatatgctattttctacctgcttttgaaaagtcaagtttcagttgtcctcaaccagagtttctagttctttccattgacgtttccagatgagtacaacaaagctcaatattggtttgggaagaatctatccctaacagag

SEQ ID NO: 59563 - DNA, 2259 bp, Homo sapiens
cagcggctgcgtccccactatggcggcgcccatgcagcccagcgcgttgtgggctcccgccggggtcccccgcggctgtcgccgccgcctacgccgctgcctccgccttcctgccccgcgtcgggccgggcgccacctcccccctgcctccctctccgctgtggtcatttaggaaatcgtaaatcatgtgaagatgggactcttggtatttgtgcgcaatctgctgctagccctctgcctctttctggtactgggatttttgtattattctgcgtggaagctacacttactccagtgggaggaggactccaattcagtggttctttcctttgactccgctggacaaacactaggctcagagtatgatcggttgggcttcctcctgaatctggactctaaactgcctgctgaattagccaccaagtacgcaaacttttcagagggagcttgcaagcctggctatgcttcagccttgatgacggccatcttcccccggttctccaagccagcacccatgttcctggatgactcctttcgcaagtgggctagaatccgggagttcgtgccgccttttgggatcaaaggtcaagacaatctgatcaaagccatcttgtcagtcaccaaagagtaccgcctgacccctgccttggacagcctccgctgccgccgctgcatcatcgtgggcaatggaggcgttcttgccaacaagtctctggggtcacgaattgacgactatgacattgtggtgagactgaattcagcaccagtgaaaggctttgagaaggacgtgggcagcaaaacgacactgcgcatcacctaccccgagggcgccatgcagcggcctgagcagtacgagcgcgattctctctttgtcctcgccggcttcaagtggcaggactttaagtggttgaaatacatcgtctacaaggagagagtgagtgcatcggatggcttctggaaatctgtggccactcgagtgcccaaggagccccctgagattcgaatcctcaacccatatttcatccaggaggccgccttcaccctcattggcctgcccttcaacaatggcctcatgggccgggggaacatccctacccttggcagtgtggcagtgaccatggcactacacggctgtgacgaggtggcagtcgcaggatttggctatgacatgagcacacccaacgcacccctgcactactatgagaccgttcgcatggcagccatcaaagagtcctggacgcacaatatccagcgagagaaagagtttctgcggaagctggtgaaagctcgcgtcatcactgatctaagcagtggcatctgagtgggcccagcacatggccatagaggcccaggcaccaccaggagcagcagccagcaccacctacacaggagtcttcagacccagagaaggacggtgccaagggccccaggggcagcaaggccttggtggagcagccagagctgtgcctgctcagcagccagtctcagagaccagcactcagcctcattcagcatgggtccttgatgccagagggccagcaggctcctggctgtgcccagcaggcccagcatgcaggtggtgggacactgggcagcaaggctgctgccggaatcacttctccaatcagtgtttggtgtattatcattttgtgaatttgggtaggggggagggtagggataatttatttttaaataaggttggagatgtcaagttgggttcacttgccatgcaggaagaggcccactagagggcccatcaggcagtgttacctgttagctccctgtggggcaggagtgccaggaccagcctgtaccttgctgtggggctacaggatggtgggcaggatctcaagccagccccctccagctcatgacactgtttggcctttcttggggagaaggcggggtattcccactcaccagccctagctgtcccatggggaaaccctggagccatcccttcggagccaacaagaccgccccagggctatagcagaaagaactttaaagctcaggagggtgacgcccagctccgcctgctgggaagagctcccctccacagctgcagctgatgcataggactaccgcaggcccggactcaccaacttgccacatgttctaggtttcagcaacaagactgccaggtggttgggttctgcctttagcctggaccaaagggaagtgaggcccaaggagcttacccaagctgtggcagccgtcccaggccacccccatggaagcaataaagctcttccctga

SEQ ID NO: 59564 - DNA, 2722 bp, Homo sapiens
cagcggctgcgtccccactatggcggcgcccatgcagcccagcgcgttgtgggctcccgccggggtcccccgcggctgtcgccgccgcctacgccgctgcctccgccttcctgccccgcgtcgggccgggcgccacctcccccctgcctccctctccgctgtggtcatttaggaaatcgtaaatcatgtgaagatgggactcttggtatttgtgcgcaatctgctgctagccctctgcctctttctggtactgggatttttgtattattctgcgtggaagctacacttactccagtgggaggaggactccaattcagtggttctttcctttgactccgctggacaaacactaggctcaggtacagtgacagctgattggaatttgtggtggttcattacaatgaaaaaaggaagtgggtcactcacaacggaaatgccagtagcatgttaggctcatcatgtacaaccgtattccttgaaattccattctggggctcagtagcctgaaggtgaggctacagtaggacacctggcttcaggaaccttcaagaagctctctcttttgtcctggaacaggatgtgactgcacagcctggtgctcccaactgcacgtcagaatgtagtatgatcggttgggcttcctcctgaatctggactctaaactagattttgaagtcactgagcgaggacgcagcctttgcattaggatttttaaagctgcccagtaccattcagctcatgctggatacatcatttcatgaggctgcgctatccttcctgagacctgggagtatctcaaagatgggactgctttgttggtcatgaacacacaccagtgtcagagagtgcagggaaagtgtaaatggcctgctgaattagccaccaagtacgcaaacttttcagagggagcttgcaagcctggctatgcttcagccttgatgacggccatcttcccccggttctccaagccagcacccatgttcctggatgactcctttcgcaagtgggctagaatccgggagttcgtgccgccttttgggatcaaaggtcaagacaatctgatcaaagccatcttgtcagtcaccaaagagtaccgcctgacccctgccttggacagcctccgctgccgccgctgcatcatcgtgggcaatggaggcgttcttgccaacaagtctctggggtcacgaattgacgactatgacattgtggtgagactgaattcagcaccagtgaaaggctttgagaaggacgtgggcagcaaaacgacactgcgcatcacctaccccgagggcgccatgcagcggcctgagcagtacgagcgcgattctctctttgtcctcgccggcttcaagtggcaggactttaagtggttgaaatacatcgtctacaaggagagagtgagtgcatcggatggcttctggaaatctgtggccactcgagtgcccaaggagccccctgagattcgaatcctcaacccatatttcatccaggaggccgccttcaccctcattggcctgcccttcaacaatggcctcatgggccgggggaacatccctacccttggcagtgtggcagtgaccatggcactacacggctgtgacgaggtggcagtcgcaggatttggctatgacatgagcacacccaacgcacccctgcactactatgagaccgttcgcatggcagccatcaaagagtcctggacgcacaatatccagcgagagaaagagtttctgcggaagctggtgaaagctcgcgtcatcactgatctaagcagtggcatctgagtgggcccagcacatggccatagaggcccaggcaccaccaggagcagcagccagcaccacctacacaggagtcttcagacccagagaaggacggtgccaagggccccaggggcagcaaggccttggtggagcagccagagctgtgcctgctcagcagccagtctcagagaccagcactcagcctcattcagcatgggtccttgatgccagagggccagcaggctcctggctgtgcccagcaggcccagcatgcaggtggtgggacactgggcagcaaggctgctgccggaatcacttctccaatcagtgtttggtgtattatcattttgtgaatttgggtaggggggagggtagggataatttatttttaaataaggttggagatgtcaagttgggttcacttgccatgcaggaagaggcccactagagggcccatcaggcagtgttacctgttagctccctgtggggcaggagtgccaggaccagcctgtaccttgctgtggggctacaggatggtgggcaggatctcaagccagccccctccagctcatgacactgtttggcctttcttggggagaaggcggggtattcccactcaccagccctagctgtcccatggggaaaccctggagccatcccttcggagccaacaagaccgccccagggctatagcagaaagaactttaaagctcaggagggtgacgcccagctccgcctgctgggaagagctcccctccacagctgcagctgatgcataggactaccgcaggcccggactcaccaacttgccacatgttctaggtttcagcaacaagactgccaggtggttgggttctgcctttagcctggaccaaagggaagtgaggcccaaggagcttacccaagctgtggcagccgtcccaggccacccccatggaagcaataaagctcttccctga

SEQ ID NO: 59565 - DNA, 2304 bp, Homo sapiens
cagcggctgcgtccccactatggcggcgcccatgcagcccagcgcgttgtgggctcccgccggggtcccccgcggctgtcgccgccgcctacgccgctgcctccgccttcctgccccgcgtcgggccgggcgccacctcccccctgcctccctctccgctgtggtcatttaggaaatcgtaaatcatgtgaagatgggactcttggtatttgtgcgcaatctgctgctagccctctgcctctttctggtactgggatttttgtattattctgcgtggaagctacacttactccagtgggaggaggactccagtaagtatagtcactctagctcaccccaggagaagcctgttgcagattcagtggttctttcctttgactccgctggacaaacactaggctcagagtatgatcggttgggcttcctcctgaatctggactctaaactgcctgctgaattagccaccaagtacgcaaacttttcagagggagcttgcaagcctggctatgcttcagccttgatgacggccatcttcccccggttctccaagccagcacccatgttcctggatgactcctttcgcaagtgggctagaatccgggagttcgtgccgccttttgggatcaaaggtcaagacaatctgatcaaagccatcttgtcagtcaccaaagagtaccgcctgacccctgccttggacagcctccgctgccgccgctgcatcatcgtgggcaatggaggcgttcttgccaacaagtctctggggtcacgaattgacgactatgacattgtggtgagactgaattcagcaccagtgaaaggctttgagaaggacgtgggcagcaaaacgacactgcgcatcacctaccccgagggcgccatgcagcggcctgagcagtacgagcgcgattctctctttgtcctcgccggcttcaagtggcaggactttaagtggttgaaatacatcgtctacaaggagagagtgagtgcatcggatggcttctggaaatctgtggccactcgagtgcccaaggagccccctgagattcgaatcctcaacccatatttcatccaggaggccgccttcaccctcattggcctgcccttcaacaatggcctcatgggccgggggaacatccctacccttggcagtgtggcagtgaccatggcactacacggctgtgacgaggtggcagtcgcaggatttggctatgacatgagcacacccaacgcacccctgcactactatgagaccgttcgcatggcagccatcaaagagtcctggacgcacaatatccagcgagagaaagagtttctgcggaagctggtgaaagctcgcgtcatcactgatctaagcagtggcatctgagtgggcccagcacatggccatagaggcccaggcaccaccaggagcagcagccagcaccacctacacaggagtcttcagacccagagaaggacggtgccaagggccccaggggcagcaaggccttggtggagcagccagagctgtgcctgctcagcagccagtctcagagaccagcactcagcctcattcagcatgggtccttgatgccagagggccagcaggctcctggctgtgcccagcaggcccagcatgcaggtggtgggacactgggcagcaaggctgctgccggaatcacttctccaatcagtgtttggtgtattatcattttgtgaatttgggtaggggggagggtagggataatttatttttaaataaggttggagatgtcaagttgggttcacttgccatgcaggaagaggcccactagagggcccatcaggcagtgttacctgttagctccctgtggggcaggagtgccaggaccagcctgtaccttgctgtggggctacaggatggtgggcaggatctcaagccagccccctccagctcatgacactgtttggcctttcttggggagaaggcggggtattcccactcaccagccctagctgtcccatggggaaaccctggagccatcccttcggagccaacaagaccgccccagggctatagcagaaagaactttaaagctcaggagggtgacgcccagctccgcctgctgggaagagctcccctccacagctgcagctgatgcataggactaccgcaggcccggactcaccaacttgccacatgttctaggtttcagcaacaagactgccaggtggttgggttctgcctttagcctggaccaaagggaagtgaggcccaaggagcttacccaagctgtggcagccgtcccaggccacccccatggaagcaataaagctcttccctga

SEQ ID NO: 59566 - DNA, 2291 bp, Homo sapiens
cagcggctgcgtccccactatggcggcgcccatgcagcccagcgcgttgtgggctcccgccggggtcccccgcggctgtcgccgccgcctacgccgctgcctccgccttcctgccccgcgtcgggccgggcgccacctcccccctgcctccctctccgctgtggtcatttaggaaatcgtaaatcatgtgaagatgggactcttggtatttgtgcgcaatctgctgctagccctctgcctctttctggtactgggatttttgtattattctgcgtggaagctacacttactccagtgggaggaggactccaattcagtggttctttcctttgactccgctggacaaacactaggctcagagtatgatcggttgggcttcctcctgaatctggactctaaactgcctgctgaattagccaccaagtacgcaaacttttcagagggagcttgcaagcctggctatgcttcagccttgatgacggccatcttcccccggttctccaagccagcacccatgttcctggatgactcctttcgcaagtgggctagaatccgggagttcgtgccgccttttgggatcaaaggtcaagacaatctgatcaaagccatcttgtcagtcaccaaagagtaccgcctgacccctgccttggacagcctccgctgccgccgctgcatcatcgtgggcaatggaggcgttcttgccaacaagtctctggggtcacgaattgacgactatgacattgtggtgaggcccaggctctgagtgggcctgctctctgtagactgaattcagcaccagtgaaaggctttgagaaggacgtgggcagcaaaacgacactgcgcatcacctaccccgagggcgccatgcagcggcctgagcagtacgagcgcgattctctctttgtcctcgccggcttcaagtggcaggactttaagtggttgaaatacatcgtctacaaggagagagtgagtgcatcggatggcttctggaaatctgtggccactcgagtgcccaaggagccccctgagattcgaatcctcaacccatatttcatccaggaggccgccttcaccctcattggcctgcccttcaacaatggcctcatgggccgggggaacatccctacccttggcagtgtggcagtgaccatggcactacacggctgtgacgaggtggcagtcgcaggatttggctatgacatgagcacacccaacgcacccctgcactactatgagaccgttcgcatggcagccatcaaagagtcctggacgcacaatatccagcgagagaaagagtttctgcggaagctggtgaaagctcgcgtcatcactgatctaagcagtggcatctgagtgggcccagcacatggccatagaggcccaggcaccaccaggagcagcagccagcaccacctacacaggagtcttcagacccagagaaggacggtgccaagggccccaggggcagcaaggccttggtggagcagccagagctgtgcctgctcagcagccagtctcagagaccagcactcagcctcattcagcatgggtccttgatgccagagggccagcaggctcctggctgtgcccagcaggcccagcatgcaggtggtgggacactgggcagcaaggctgctgccggaatcacttctccaatcagtgtttggtgtattatcattttgtgaatttgggtaggggggagggtagggataatttatttttaaataaggttggagatgtcaagttgggttcacttgccatgcaggaagaggcccactagagggcccatcaggcagtgttacctgttagctccctgtggggcaggagtgccaggaccagcctgtaccttgctgtggggctacaggatggtgggcaggatctcaagccagccccctccagctcatgacactgtttggcctttcttggggagaaggcggggtattcccactcaccagccctagctgtcccatggggaaaccctggagccatcccttcggagccaacaagaccgccccagggctatagcagaaagaactttaaagctcaggagggtgacgcccagctccgcctgctgggaagagctcccctccacagctgcagctgatgcataggactaccgcaggcccggactcaccaacttgccacatgttctaggtttcagcaacaagactgccaggtggttgggttctgcctttagcctggaccaaagggaagtgaggcccaaggagcttacccaagctgtggcagccgtcccaggccacccccatggaagcaataaagctcttccctga

SEQ ID NO: 59567 - DNA, 2433 bp, Homo sapiens
cagcggctgcgtccccactatggcggcgcccatgcagcccagcgcgttgtgggctcccgccggggtcccccgcggctgtcgccgccgcctacgccgctgcctccgccttcctgccccgcgtcgggccgggcgccacctcccccctgcctccctctccgctgtggtcatttaggaaatcgtaaatcatgtgaagatgggactcttggtatttgtgcgcaatctgctgctagccctctgcctctttctggtactgggatttttgtattattctgcgtggaagctacacttactccagtgggaggaggactccaattcagtggttctttcctttgactccgctggacaaacactaggctcagagtatgatcggttgggcttcctcctgaatctggactctaaactgcctgctgaattagccaccaagtacgcaaacttttcagagggagcttgcaagcctggctatgcttcagccttgatgacggccatcttcccccgagctaagagaaatggtgcatggagacaaaaacatatccaggcatatgtgctccgccagaggtgaagacagaggattgtggggacacagagaaggcccttcagctggaggagtgatgagagattgactggggagacgtcctggtgaagtctgatgcctgaactatgctgggaaaggttctccaagccagcacccatgttcctggatgactcctttcgcaagtgggctagaatccgggagttcgtgccgccttttgggatcaaaggtcaagacaatctgatcaaagccatcttgtcagtcaccaaagagtaccgcctgacccctgccttggacagcctccgctgccgccgctgcatcatcgtgggcaatggaggcgttcttgccaacaagtctctggggtcacgaattgacgactatgacattgtggtgagactgaattcagcaccagtgaaaggctttgagaaggacgtgggcagcaaaacgacactgcgcatcacctaccccgagggcgccatgcagcggcctgagcagtacgagcgcgattctctctttgtcctcgccggcttcaagtggcaggactttaagtggttgaaatacatcgtctacaaggagagagtgagtgcatcggatggcttctggaaatctgtggccactcgagtgcccaaggagccccctgagattcgaatcctcaacccatatttcatccaggaggccgccttcaccctcattggcctgcccttcaacaatggcctcatgggccgggggaacatccctacccttggcagtgtggcagtgaccatggcactacacggctgtgacgaggtggcagtcgcaggatttggctatgacatgagcacacccaacgcacccctgcactactatgagaccgttcgcatggcagccatcaaagagtcctggacgcacaatatccagcgagagaaagagtttctgcggaagctggtgaaagctcgcgtcatcactgatctaagcagtggcatctgagtgggcccagcacatggccatagaggcccaggcaccaccaggagcagcagccagcaccacctacacaggagtcttcagacccagagaaggacggtgccaagggccccaggggcagcaaggccttggtggagcagccagagctgtgcctgctcagcagccagtctcagagaccagcactcagcctcattcagcatgggtccttgatgccagagggccagcaggctcctggctgtgcccagcaggcccagcatgcaggtggtgggacactgggcagcaaggctgctgccggaatcacttctccaatcagtgtttggtgtattatcattttgtgaatttgggtaggggggagggtagggataatttatttttaaataaggttggagatgtcaagttgggttcacttgccatgcaggaagaggcccactagagggcccatcaggcagtgttacctgttagctccctgtggggcaggagtgccaggaccagcctgtaccttgctgtggggctacaggatggtgggcaggatctcaagccagccccctccagctcatgacactgtttggcctttcttggggagaaggcggggtattcccactcaccagccctagctgtcccatggggaaaccctggagccatcccttcggagccaacaagaccgccccagggctatagcagaaagaactttaaagctcaggagggtgacgcccagctccgcctgctgggaagagctcccctccacagctgcagctgatgcataggactaccgcaggcccggactcaccaacttgccacatgttctaggtttcagcaacaagactgccaggtggttgggttctgcctttagcctggaccaaagggaagtgaggcccaaggagcttacccaagctgtggcagccgtcccaggccacccccatggaagcaataaagctcttccctga

SEQ ID NO: 59568 - DNA, 2324 bp, Homo sapiens
cagcggctgcgtccccactatggcggcgcccatgcagcccagcgcgttgtgggctcccgccggggtcccccgcggctgtcgccgccgcctacgccgctgcctccgccttcctgccccgcgtcgggccgggcgccacctcccccctgcctccctctccgctgtggtcatttaggaaatcgtaaatcatgtgaagatgggactcttggtatttgtgcgcaatctgctgctagccctctgcctctttctggtactgggatttttgtattattctgcgtggaagctacacttactccagtgggaggaggactccaagtatgatcggttgggcttcctcctgaatctggactctaaactgcctgctgaattagccaccaagtacgcaaacttttcagagggagcttgcaagcctggctatgcttcagccttgatgacggccatcttcccccggttctccaagccagcacccatgttcctggatgactcctttcgcaagtgggctagaatccgggagttcgtgccgccttttgggatcaaaggtcaagacaatctgatcaaagccatcttgtcagtcaccaaagagtaccgcctgacccctgccttggacagcctccgctgccgccgctgcatcatcgtgggcaatggaggcgttcttgccaacaagtctctggggtcacgaattgacgactatgacattgtggtgagactgaattcagcaccagtgaaaggctttgagaaggacgtgggcagcaaaacgacactgcgcatcacctaccccgagggcgccatgcagcggcctgagcagtacgagcgcgattctctctttgtcctcgccggcttcaagtggcaggactttaagtggttgaaatacatcgtctacaaggagagagtgagtgcatcggatggcttctggaaatctgtggccactcgagtgcccaaggagccccctgagattcgaatcctcaacccatatttcatccaggaggccgccttcaccctcattggcctgcccttcaacaatggcctcatgggccgggggaacatccctacccttggcagtgtggcagtgaccatggcactacacggctgtgacgaggtggcagtcgcaggatttggctatgacatgagcacacccaacgcacccctgcactactatgagaccgttcgcatggcagccatcaaagaggtttccacagtcacggagtattggagagtggtgacgaagaaggcaccgagccctggaaggggcagtaaaggtttgagcaaaggcccaactgatcacttcatctctcctttcagtcctggacgcacaatatccagcgagagaaagagtttctgcggaagctggtgaaagctcgcgtcatcactgatctaagcagtggcatctgagtgggcccagcacatggccatagaggcccaggcaccaccaggagcagcagccagcaccacctacacaggagtcttcagacccagagaaggacggtgccaagggccccaggggcagcaaggccttggtggagcagccagagctgtgcctgctcagcagccagtctcagagaccagcactcagcctcattcagcatgggtccttgatgccagagggccagcaggctcctggctgtgcccagcaggcccagcatgcaggtggtgggacactgggcagcaaggctgctgccggaatcacttctccaatcagtgtttggtgtattatcattttgtgaatttgggtaggggggagggtagggataatttatttttaaataaggttggagatgtcaagttgggttcacttgccatgcaggaagaggcccactagagggcccatcaggcagtgttacctgttagctccctgtggggcaggagtgccaggaccagcctgtaccttgctgtggggctacaggatggtgggcaggatctcaagccagccccctccagctcatgacactgtttggcctttcttggggagaaggcggggtattcccactcaccagccctagctgtcccatggggaaaccctggagccatcccttcggagccaacaagaccgccccagggctatagcagaaagaactttaaagctcaggagggtgacgcccagctccgcctgctgggaagagctcccctccacagctgcagctgatgcataggactaccgcaggcccggactcaccaacttgccacatgttctaggtttcagcaacaagactgccaggtggttgggttctgcctttagcctggaccaaagggaagtgaggcccaaggagcttacccaagctgtggcagccgtcccaggccacccccatggaagcaataaagctcttccctga

SEQ ID NO: 59569 - DNA, 1618 bp, Homo sapiens
cagcggctgcgtccccactatggcggcgcccatgcagcccagcgcgttgtgggctcccgccggggtcccccgcggctgtcgccgccgcctacgccgctgcctccgccttcctgccccgcgtcgggccgggcgccacctcccccctgcctccctctccgctgtggtcatttaggaaatcgtaaatcatgtgaagatgggactcttggtatttgtgcgcaatctgctgctagccctctgcctctttctggtactgggatttttgtattattctgcgtggaagctacacttactccagtgggaggaggactccaattcagtggttctttcctttgactccgctggacaaacactaggctcagagtatgatcggttgggcttcctcctgaatctggactctaaactgcctgctgaattagccaccaagtacgcaaacttttcagagggagcttgcaagcctggctatgcttcagccttgatgacggccatcttcccccggttctccaagccagcacccatgttcctggatgactcctttcgcaagtgggctagaatccgggagttcgtgccgccttttgggatcaaaggtcaagtcctggacgcacaatatccagcgagagaaagagtttctgcggaagctggtgaaagctcgcgtcatcactgatctaagcagtggcatctgagtgggcccagcacatggccatagaggcccaggcaccaccaggagcagcagccagcaccacctacacaggagtcttcagacccagagaaggacggtgccaagggccccaggggcagcaaggccttggtggagcagccagagctgtgcctgctcagcagccagtctcagagaccagcactcagcctcattcagcatgggtccttgatgccagagggccagcaggctcctggctgtgcccagcaggcccagcatgcaggtggtgggacactgggcagcaaggctgctgccggaatcacttctccaatcagtgtttggtgtattatcattttgtgaatttgggtaggggggagggtagggataatttatttttaaataaggttggagatgtcaagttgggttcacttgccatgcaggaagaggcccactagagggcccatcaggcagtgttacctgttagctccctgtggggcaggagtgccaggaccagcctgtaccttgctgtggggctacaggatggtgggcaggatctcaagccagccccctccagctcatgacactgtttggcctttcttggggagaaggcggggtattcccactcaccagccctagctgtcccatggggaaaccctggagccatcccttcggagccaacaagaccgccccagggctatagcagaaagaactttaaagctcaggagggtgacgcccagctccgcctgctgggaagagctcccctccacagctgcagctgatgcataggactaccgcaggcccggactcaccaacttgccacatgttctaggtttcagcaacaagactgccaggtggttgggttctgcctttagcctggaccaaagggaagtgaggcccaaggagcttacccaagctgtggcagccgtcccaggccacccccatggaagcaataaagctcttccctga

SEQ ID NO: 59570 - DNA, 1858 bp, Homo sapiens
  misc_feature (1679)..(1679): n is a, c, g, or t
cagcggctgcgtccccactatggcggcgcccatgcagcccagcgcgttgtgggctcccgccggggtcccccgcggctgtcgccgccgcctacgccgctgcctccgccttcctgccccgcgtcgggccgggcgccacctcccccctgcctccctctccgctgtggtcatttaggaaatcgtaaatcatgtgaagatgggactcttggtatttgtgcgcaatctgctgctagccctctgcctctttctggtactgggatttttgtattattctgcgtggaagctacacttactccagtgggaggaggactccaattcagtggttctttcctttgactccgctggacaaacactaggctcagagtatgatcggttgggcttcctcctgaatctggactctaaactgcctgctgaattagccaccaagtacgcaaacttttcagagggagcttgcaagcctggctatgcttcagccttgatgacggccatcttcccccggttctccaagccagcacccatgttcctggatgactcctttcgcaagtgggctagaatccgggagttcgtgccgccttttgggatcaaaggtcaagacaatctgatcaaagccatcttgtcagtcaccaaagagtaccgcctgacccctgccttggacagcctccgctgccgccgctgcatcatcgtgggcaatggaggcgttcttgccaacaagtctctggggtcacgaattgacgactatgacattgtggtgagactgaattcagcaccagtgaaaggctttgagaaggacgtgggcagcaaaacgacactgcgcatcacctaccccgagggcgccatgcagcggcctgagcagtacgagcgcgattctctctttgtcctcgccggcttcaagtggcaggactttaagtggttgaaatacatcgtctacaaggagagagtgagtgcatcggatggcttctggaaatctgtggccactcgagtgcccaaggagccccctgagattcgaatcctcaacccatatttcatccaggaggccgccttcaccctcattggcctgcccttcaacaatggcctcatgggccgggggaacatccctacccttggcagtgtggcagtgaccatggcactacacggctgtgacgaggtggcagtcgcaggatttggctatgacatgagcacacccaacgcacccctgcactactatgagaccgttcgcatggcagccatcaaagagtcctggacgcacaatatccagcgagagaaagagtttctgcggaagctggtgaaagctcgcgtcatcactgatctaagcagtggcatctgagtgggcccagcacatggccatagaggcccaggcaccaccaggagcagcagccagcaccacctacacaggagtcttcagacccagagaaggacggtgccaagggccccaggggcagcaaggccttggtggagcagccagagctgtgcctgctcagcagccagtctcagagaccagcactcagcctcattcagcatgggtccttgatgccagagggccagcaggctcctggctgtgcccagcaggcccagcatgcaggtggtgggacactgggcagcaaggctgctgccggaatcacttctccaatcagtgtttggtgtattatcattttgtgaatttgggtaggggggagggtcccttnctttatttttaattactcttatctctattttatatatttttatctatttttttacattaaatttcaaataacttatttattttttattatcttctataattaatatattatattttattttttatcattttctttctaattttttaatatattattttttattattttatatattattc

SEQ ID NO: 59571 - DNA, 237 bp, Homo sapiens
aagtctgtgggaacaaggtccttccgccagcactgaggagggaggttgggaagcttaacggttttcctgggacgaggaaaggggtatgaaggttcttttttccctgtcttgggaagggaggaggatgagctgtggcactcctagagcagggtcatcattaccgtgtagacacaactgattaccagtatctgccttcaggtttccacagtcacggagtattggagagtggtgacgaag

SEQ ID NO: 59572 - DNA, 566 bp, Homo sapiens
ctggaggagtgatgagagattgactggggagacgtcctggtgaagtctgatgcctgaactatgctgggaaaggtggggcttcggcagcaagaccagacacactggtgggggcagcttcctcctttgcagaccagttccaggctccagcctaagagcaggaactgtagggatgcttagaagcacagtccctggtgagagcaggcaggctggctgcattcctgtggtatttgaggattgatcttgtcagattagcagctttgctttttttggttcaggtacaagatccccacgtggggagttcttgctgcttgtgaagagcaaaagctggtgaaagcacagaacatgatcctggccctcctcctgagctgtgtgaggctcccagccaggagcaagcagccctgtgagttcctcagtgagagggagggcccaggtctgagctccacccacacaagtcccagcgatgaggcagcagctcagcagagagcaagatgctggcaccttcaggactgtgtcctgctttccctactctgtctgcacctggggagacaggtcactctctgactggt

SEQ ID NO: 59573 - DNA, 319 bp, Homo sapiens
gttgggttctgcctttagcctggaccaaagggaagtgaggcccaaggagcttacccaagctgtggcagccgtcccaggccacccccatggaagcaataaagctcttccctgagcctggcctctttttgccttctctgactttcctggaagaaacaggaacctaaagccttagcaactatgccaaaccctcgggccctctctccagtccacagagtcctgggtccctttcacttcttgtgtcaatgcaggacctaggtagccatccagaggcctctggagcatctcctgtatcctctttgctttgagaccagaggtttca

SEQ ID NO: 59574 - DNA, 2211 bp, Homo sapiens
cagcggctgcgtccccactatggcggcgcccatgcagcccagcgcgttgtgggctcccgccggggtcccccgcggctgtcgccgccgcctacgccgctgcctccgccttcctgccccgcgtcgggccgggcgccacctcccccctgcctccctctccgctgtggtcatttaggaaatcgtaaatcatgtgaagatgggactcttggtatttgtgcgcaatctgctgctagccctctgcctctttctggtactgggatttttgtattattctgcgtggaagctacacttactccagtgggaggaggactccaagtatgatcggttgggcttcctcctgaatctggactctaaactgcctgctgaattagccaccaagtacgcaaacttttcagagggagcttgcaagcctggctatgcttcagccttgatgacggccatcttcccccggttctccaagccagcacccatgttcctggatgactcctttcgcaagtgggctagaatccgggagttcgtgccgccttttgggatcaaaggtcaagacaatctgatcaaagccatcttgtcagtcaccaaagagtaccgcctgacccctgccttggacagcctccgctgccgccgctgcatcatcgtgggcaatggaggcgttcttgccaacaagtctctggggtcacgaattgacgactatgacattgtggtgagactgaattcagcaccagtgaaaggctttgagaaggacgtgggcagcaaaacgacactgcgcatcacctaccccgagggcgccatgcagcggcctgagcagtacgagcgcgattctctctttgtcctcgccggcttcaagtggcaggactttaagtggttgaaatacatcgtctacaaggagagagtgagtgcatcggatggcttctggaaatctgtggccactcgagtgcccaaggagccccctgagattcgaatcctcaacccatatttcatccaggaggccgccttcaccctcattggcctgcccttcaacaatggcctcatgggccgggggaacatccctacccttggcagtgtggcagtgaccatggcactacacggctgtgacgaggtggcagtcgcaggatttggctatgacatgagcacacccaacgcacccctgcactactatgagaccgttcgcatggcagccatcaaagagtcctggacgcacaatatccagcgagagaaagagtttctgcggaagctggtgaaagctcgcgtcatcactgatctaagcagtggcatctgagtgggcccagcacatggccatagaggcccaggcaccaccaggagcagcagccagcaccacctacacaggagtcttcagacccagagaaggacggtgccaagggccccaggggcagcaaggccttggtggagcagccagagctgtgcctgctcagcagccagtctcagagaccagcactcagcctcattcagcatgggtccttgatgccagagggccagcaggctcctggctgtgcccagcaggcccagcatgcaggtggtgggacactgggcagcaaggctgctgccggaatcacttctccaatcagtgtttggtgtattatcattttgtgaatttgggtaggggggagggtagggataatttatttttaaataaggttggagatgtcaagttgggttcacttgccatgcaggaagaggcccactagagggcccatcaggcagtgttacctgttagctccctgtggggcaggagtgccaggaccagcctgtaccttgctgtggggctacaggatggtgggcaggatctcaagccagccccctccagctcatgacactgtttggcctttcttggggagaaggcggggtattcccactcaccagccctagctgtcccatggggaaaccctggagccatcccttcggagccaacaagaccgccccagggctatagcagaaagaactttaaagctcaggagggtgacgcccagctccgcctgctgggaagagctcccctccacagctgcagctgatgcataggactaccgcaggcccggactcaccaacttgccacatgttctaggtttcagcaacaagactgccaggtggttgggttctgcctttagcctggaccaaagggaagtgaggcccaaggagcttacccaagctgtggcagccgtcccaggccacccccatggaagcaataaagctcttccctga

SEQ ID NO: 59575 - DNA, 2569 bp, Homo sapiens
cagcggctgcgtccccactatggcggcgcccatgcagcccagcgcgttgtgggctcccgccggggtcccccgcggctgtcgccgccgcctacgccgctgcctccgccttcctgccccgcgtcgggccgggcgccacctcccccctgcctccctctccgctgtggtcatttaggaaatcgtaaatcatgtgaagatgggactcttggtatttgtgcgcaatctgctgctagccctctgcctctttctggtactgggatttttgtattattctgcgtggaagctacacttactccagtgggaggaggactccaattcagtggttctttcctttgactccgctggacaaacactaggctcagagtatgatcggttgggcttcctcctgaatctggactctaaactgcctgctgaattagccaccaagtacgcaaacttttcagagggagcttgcaagcctggctatgcttcagccttgatgacggccatcttcccccggttctccaagccagcacccatgttcctggatgactcctttcgcaagtgggctagaatccgggagttcgtgccgccttttgggatcaaaggtcaagacaatctgatcaaagccatcttgtcagtcaccaaagagtaccgcctgacccctgccttggacagcctccgctgccgccgctgcatcatcgtgggcaatggaggcgttcttgccaacaagtctctggggtcacgaattgacgactatgacattgtggtgagactgaattcagcaccagtgaaaggctttgagaaggacgtgggcagcaaaacgacactgcgcatcacctaccccgagggcgccatgcagcggcctgagcagtacgagcgcgattctctctttgtcctcgccggcttcaagtggcaggactttaagtggttgaaatacatcgtctacaaggagagagtgagtgcatcggatggcttctggaaatctgtggccactcgagtgcccaaggagccccctgagattcgaatcctcaacccatatttcatccaggaggccgccttcaccctcattggcctgcccttcaacaatggcctcatgggccgggggaacatccctacccttggcagtgtggcagtgaccatggcactacacggctgtgacgaggtggcagtcgcaggatttggctatgacatgagcacacccaacgcacccctgcactactatgagaccgttcgcatggcagccatcaaagagtcctggacgcacaatatccagcgagagaaagagtttctgcggaagctggtgaaagctcgcgtcatcactgatctaagcagtggcatctgagtgggcccagcacatggccatagaggcccaggcaccaccaggagcagcagccagcaccacctacacaggagtcttcagacccagagaaggacggtgccaagggccccaggggcagcaaggccttggtggagcagccagagctgtgcctgctcagcagccagtctcagagaccagcactcagcctcattcagcatgggtccttgatgccagagggccagcaggctcctggctgtgcccagcaggcccagcatgcaggtggtgggacactgggcagcaaggctgctgccggaatcacttctccaatcagtgtttggtgtattatcattttgtgaatttgggtaggggggagggtagggataatttatttttaaataaggttggagatgtcaagttgggttcacttgccatgcaggaagaggcccactagagggcccatcaggcagtgttacctgttagctccctgtggggcaggagtgccaggaccagcctgtaccttgctgtggggctacaggatggtgggcaggatctcaagccagccccctccagctcatgacactgtttggcctttcttggggagaaggcggggtattcccactcaccagccctagctgtcccatggggaaaccctggagccatcccttcggagccaacaagaccgccccagggctatagcagaaagaactttaaagctcaggagggtgacgcccagctccgcctgctgggaagagctcccctccacagctgcagctgatgcataggactaccgcaggcccggactcaccaacttgccacatgttctaggtttcagcaacaagactgccaggtggttgggttctgcctttagcctggaccaaagggaagtgaggcccaaggagcttacccaagctgtggcagccgtcccaggccacccccatggaagcaataaagctcttccctgaaaaaaaaaaaaaatcaatcacaacccaccctccacccactcccactatacctcctcctaccactctcaccccatcccttcactcggaaataccacccccatcatcctctcacaaaaccatgtcgcccgcttgggcccagccgtctttagaccctcgcagctttaccattgcgcccccaacttcggcctcatttgccaaattcccccttatgggggccgcttcccaatcaaccggcccgcgtttaaccaacgcccgaatggggaacaccctgggggttacccaccttaaccccttgggccctttttccccg

SEQ ID NO: 59576 - DNA, 2263 bp, Homo sapiens
ccataggcgcgtaagcgtggagctacacttactccagtgggacgaggactccaattcagtggttctttcctttgactccgctggacaaacactaggctcaggtacagtgacagctgattggaatttgtggtggttcattacaatgaaaaaaggaagtgggtcactcacaacggaaatgccagtagcatgttaggctcatcatgtacaaccgtattccttgaaattccattctggggctcagtagcctgaaggtgaggctacagtaggacacctggcttcaggaaccttcaagaagctctctcttttgtcctggaacaggatgtgactgcacagcctggtgctcccaactgcacgtcagaatgtagtatgatcggttgggcttcctcctgaatctggactctaaactgcctgctgaattagccaccaagtacgcaaacttttcagagggagcttgcaagcctggctatgcttcagccttgatgacggccatcttcccccggttctccaagccagcacccatgttcctggatgactcctttcgcaagtgggctagaatccgggagttcgtgccgccttttgggatcaaaggtcaagacaatctgatcaaagccatcttgtcagtcaccaaagagtaccgcctgacccctgccttggacagcctccgctgccgccgctgcatcatcgtgggcaatggaggcgttcttgccaacaagtctctggggtcacgaattgacgactatgacattgtggtgagactgaattcagcaccagtgaaaggctttgagaaggacgtgggcagcaaaacgacactgcgcatcacctaccccgagggcgccatgcagcggcctgagcagtacgagcgcgattctctctttgtcctcgccggcttcaagtggcaggactttaagtggttgaaatacatcgtctacaaggagagagtgagtgcatcggatggcttctggaaatctgtggccactcgagtgcccaaggagccccctgagattcgaatcctcaacccatatttcatccaggaggccgccttcaccctcattggcctgcccttcaacaatggcctcatgggccgggggaacatccctacccttggcagtgtggcagtgaccatggcactacacggctgtgacgaggtggcagtcgcaggatttggctatgacatgagcacacccaacgcacccctgcactactatgagaccgttcgcatggcagccatcaaagagtcctggacgcacaatatccagcgagagaaagagtttctgcggaagctggtgaaagctcgcgtcatcactgatctaagcagtggcatctgagtgggcccagcacatggccatagaggcccaggcaccaccaggagcagcagccagcaccacctacacaggagtcttcagacccagagaaggacggtgccaagggccccaggggcagcaaggccttggtggagcagccagagctgtgcctgctcagcagccagtctcagagaccagcactcagcctcattcagcatgggtccttgatgccagagggccagcaggctcctggctgtgcccagcaggcccagcatgcaggtggtgggacactgggcagcaaggctgctgccggaatcacttctccaatcagtgtttggtgtattatcattttgtgaatttgggtaggggggagggtagggataatttatttttaaataaggttggagatgtcaagttgggttcacttgccatgcaggaagaggcccactagagggcccatcaggcagtgttacctgttagctccctgtggggcaggagtgccaggaccagcctgtaccttgctgtggggctacaggatggtgggcaggatctcaagccagccccctccagctcatgacactgtttggcctttcttggggagaaggcggggtattcccactcaccagccctagctgtcccatggggaaaccctggagccatcccttcggagccaacaagaccgccccagggctatagcagaaagaactttaaagctcaggagggtgacgcccagctccgcctgctgggaagagctcccctccacagctgcagctgatgcataggactaccgcaggcccggactcaccaacttgccacatgttctaggtttcagcaacaagactgccaggtggttgggttctgcctttagcctggaccaaagggaagtgaggcccaaggagcttacccaagctgtggcagccgtcccaggccacccccatggaagcaataaagctcttccctga

SEQ ID NO: 59577 - DNA, 2319 bp, Homo sapiens
cagcggctgcgtccccactatggcggcgcccatgcagcccagcgcgttgtgggctcccgccggggtcccccgcggctgtcgccgccgcctacgccgctgcctccgccttcctgccccgcgtcgggccgggcgccacctcccccctgcctccctctccgctgtggtcatttaggaaatcgtaaatcatgtgaagatgggactcttggtatttgtgcgcaatctgctgctagccctctgcctctttctggtactgggatttttgtattattctgcgtggaagctacacttactccagtgggaggaggactccaattcagtggttctttcctttgactccgctggacaaacactaggctcagagtatgatcggttgggcttcctcctgaatctggactctaaactgcctgctgaattagccaccaagtacgcaaacttttcagagggagcttgcaagcctggctatgcttcagccttgatgacggccatcttcccccgatttgaggattaagccattctgttcttgtctaagcagtgcacataaaaacagcgactgaggttctccaagccagcacccatgttcctggatgactcctttcgcaagtgggctagaatccgggagttcgtgccgccttttgggatcaaaggtcaagacaatctgatcaaagccatcttgtcagtcaccaaagagtaccgcctgacccctgccttggacagcctccgctgccgccgctgcatcatcgtgggcaatggaggcgttcttgccaacaagtctctggggtcacgaattgacgactatgacattgtggtgagactgaattcagcaccagtgaaaggctttgagaaggacgtgggcagcaaaacgacactgcgcatcacctaccccgagggcgccatgcagcggcctgagcagtacgagcgcgattctctctttgtcctcgccggcttcaagtggcaggactttaagtggttgaaatacatcgtctacaaggagagagtgagtgcatcggatggcttctggaaatctgtggccactcgagtgcccaaggagccccctgagattcgaatcctcaacccatatttcatccaggaggccgccttcaccctcattggcctgcccttcaacaatggcctcatgggccgggggaacatccctacccttggcagtgtggcagtgaccatggcactacacggctgtgacgaggtggcagtcgcaggatttggctatgacatgagcacacccaacgcacccctgcactactatgagaccgttcgcatggcagccatcaaagagtcctggacgcacaatatccagcgagagaaagagtttctgcggaagctggtgaaagctcgcgtcatcactgatctaagcagtggcatctgagtgggcccagcacatggccatagaggcccaggcaccaccaggagcagcagccagcaccacctacacaggagtcttcagacccagagaaggacggtgccaagggccccaggggcagcaaggccttggtggagcagccagagctgtgcctgctcagcagccagtctcagagaccagcactcagcctcattcagcatgggtccttgatgccagagggccagcaggctcctggctgtgcccagcaggcccagcatgcaggtggtgggacactgggcagcaaggctgctgccggaatcacttctccaatcagtgtttggtgtattatcattttgtgaatttgggtaggggggagggtagggataatttatttttaaataaggttggagatgtcaagttgggttcacttgccatgcaggaagaggcccactagagggcccatcaggcagtgttacctgttagctccctgtggggcaggagtgccaggaccagcctgtaccttgctgtggggctacaggatggtgggcaggatctcaagccagccccctccagctcatgacactgtttggcctttcttggggagaaggcggggtattcccactcaccagccctagctgtcccatggggaaaccctggagccatcccttcggagccaacaagaccgccccagggctatagcagaaagaactttaaagctcaggagggtgacgcccagctccgcctgctgggaagagctcccctccacagctgcagctgatgcataggactaccgcaggcccggactcaccaacttgccacatgttctaggtttcagcaacaagactgccaggtggttgggttctgcctttagcctggaccaaagggaagtgaggcccaaggagcttacccaagctgtggcagccgtcccaggccacccccatggaagcaataaagctcttccctga

SEQ ID NO: 59578 - DNA, 1603 bp, Homo sapiens
acagcatcccacatcctgtgcctgcccgacgactcccttcgtatcctcctctgttacacactggagccccaccacacgctctcttcaccatcattccccttgtccctgtcacacactccatttccccaaacacagatgggcttcctacaccacaggccctgggttccccattaaacgcctcatgctcccgcctcactgtccctacttggggtccctgccactcccctaggctcatcccttgctgtgtgcctcgttgaggcccgcttttgctgtgtccacagagtgcatcggatggcttctggaaatctgtggccactcgagtgcccaaggagccccctgagattcgaatcctcaacccatatttcatccaggaggccgccttcaccctcattggcctgcccttcaacaatggcctcatgggccgggggaacatccctacccttggcagtgtggcagtgaccatggcactacacggctgtgacgaggtggcagtcgcaggatttggctatgacatgagcacacccaacgcacccctgcactactatgagaccgttcgcatggcagccatcaaagagtcctggacgcacaatatccagcgagagaaagagtttctgcggaagctggtgaaagctcgcgtcatcactgatctaagcagtggcatctgagtgggcccagcacatggccatagaggcccaggcaccaccaggagcagcagccagcaccacctacacaggagtcttcagacccagagaaggacggtgccaagggccccaggggcagcaaggccttggtggagcagccagagctgtgcctgctcagcagccagtctcagagaccagcactcagcctcattcagcatgggtccttgatgccagagggccagcaggctcctggctgtgcccagcaggcccagcatgcaggtggtgggacactgggcagcaaggctgctgccggaatcacttctccaatcagtgtttggtgtattatcattttgtgaatttgggtaggggggagggtagggataatttatttttaaataaggttggagatgtcaagttgggttcacttgccatgcaggaagaggcccactagagggcccatcaggcagtgttacctgttagctccctgtggggcaggagtgccaggaccagcctgtaccttgctgtggggctacaggatggtgggcaggatctcaagccagccccctccagctcatgacactgtttggcctttcttggggagaaggcggggtattcccactcaccagccctagctgtcccatggggaaaccctggagccatcccttcggagccaacaagaccgccccagggctatagcagaaagaactttaaagctcaggagggtgacgcccagctccgcctgctgggaagagctcccctccacagctgcagctgatgcataggactaccgcaggcccggactcaccaacttgccacatgttctaggtttcagcaacaagactgccaggtggttgggttctgcctttagcctggaccaaagggaagtgaggcccaaggagcttacccaagctgtggcagccgtcccaggccacccccatggaagcaataaagctcttccctga

SEQ ID NO: 59579 - DNA, 1558 bp, Homo sapiens
cagcggctgcgtccccactatggcggcgcccatgcagcccagcgcgttgtgggctcccgccggggtcccccgcggctgtcgccgccgcctacgccgctgcctccgccttcctgccccgcgtcgggccgggcgccacctcccccctgcctccctctccgctgtggtcatttaggaaatcgtaaatcatgtgaagatgggactcttggtatttgtgcgcaatctgctgctagccctctgcctctttctggtactgggatttttgtattattctgcgtggaagctacacttactccagtgggaggaggactccaagtatgatcggttgggcttcctcctgaatctggactctaaactgcctgctgaattagccaccaagtacgcaaacttttcagagggagcttgcaagcctggctatgcttcagccttgatgacggccatcttcccccggttctccaagccagcacccatgttcctggatgactcctttcgcaagtgggctagaatccgggagttcgtgccgccttttgggatcaaaggtcaagacaatctgatcaaagccatcttgtcagtcaccaaagagtaccgcctgacccctgccttggacagcctccgctgccgccgctgcatcatcgtgggcaatggaggcgttcttgccaacaagtctctggggtcacgaattgacgactatgacattgtggtgagactgaattcagcaccagtgaaaggctttgagaaggacgtgggcagcaaaacgacactgcgcatcacctaccccgagggcgccatgcagcggcctgagcagtacgagcgcgattctctctttgtcctcgccggcttcaagtggcaggactttaagtggttgaaatacatcgtctacaaggagagagtgctctttcccaagcaaggccaagtacaggcagtgtcaagtaggtagcaagcaagagagaagacagaagtcaggtccagaaattcaggacctttctctttcacccagactagagtgcagtggctcgatcacggctcactgcagcctagaattcctgaactcgagtgattcttccacctcagccccccgagtggctgggaccacagcctcatgcccagctaattattctatttcttgtaaagacattgtctcactatattgcccaggctggtattgaattcctgggctcaagtaatcctctcacctcagcctgccaaagtgctgggattacaggcatgagccagccaccgcacctggcccaaaattcttagaagatatcattttgataactgtgacattcttttacataaatgtatcatttaatgaaacctctgttgtaaacttttggatttttttctgttttttcactttgtaagtaatactgtaataaagagctttttacaaaggtcttcattttgattatttttagaaggaaaattttgaggtcataagatataaacagctttgaggtctttgacacatagattgttttttagaagggctgtgccaaatttactcctatagcagtccaggagaattttccctcagcagactaccactagcaccaagata

SEQ ID NO: 59580 - DNA, 708 bp, Homo sapiens
gtgtgtcactgaacaccttccccgtaccagcagctggaggatttgtttggtagcacctgggggatggctctgtcccgggcgcacttaggcgggctgtgcggagcgctttaccttccacagtgtccggcacacgcatccttttcgacatcatcacttgacctgctgcaatagacaagtcttgctgtgttgcccaggccggagtgcagtggtgcaatctctgctcagtgcaacctctgcctcctgggttcaagtgatcattctgcctcaggctcctgactaattgggattacaggcatgcaccaccacaccagctaatgtttgtattttcagtggagacggggttttaccatgttggccaggctggtctcaaactcctgacctcaggtgattcgcctgcctcggcctcccaaagtgctgggtttacaggcgtgagccaccgcccggcctcatgtcatcaaaagaagagaaaacagaggcacaagagaagatgaccacagaagacagaggcagaggctggggttatgctaccacaaaccggagaatgccaaggattgctggcaaccaccaggagcctggggagaggcgtggaacccctcctccctcagaggccccagaaggatccaaccctgctaataccttgattttagacttcccacccccagaactgtgagaaaataaatttctagctgctttaagccaaaaagtgtg

SEQ ID NO: 59581 - DNA, 576 bp, Homo sapiens
tattttctagataacatgccttttgacctgaaaaagggtttagtataataccttaaaaattctcatatatagtagccattttaaatgaaacaaaaagatttagaagcctggtgttgcttgatgataagattaagaagtttaaaacgggtttatcattactatagcacactgtaaagtgctagaaaagtcataacctgattctccaatctttttattcctctatgtggaaatttagctacttgtaataaggtacattttcagtaaggatctggtgagatcatattatgatctaacatgaaagccaccgcccggcctcatgtcatcaaaagaagagaaaacagaggcacaagagaagatgaccacagaagacagaggcagaggctggggttatgctaccacaaaccggagaatgccaaggattgctggcaaccaccaggagcctggggagaggcgtggaacccctcctccctcagaggccccagaaggatccaaccctgctaataccttgattttagacttcccacccccagaactgtgagaaaataaatttctagctgctttaagccaaaaagtgtg

SEQ ID NO: 59582 - DNA, 527 bp, Homo sapiens
gtgtgtcactgaacaccttccccgtaccagcagctggaggatttgtttggtagcacctgggggatggctctgtcccgggcgcacttaggcgggctgtgcggagcgctttaccttccacagtgtccggcacacgcatccttttcgacatcatcacttgacctgctgcaatagacaagtcttgctgtgttgcccaggccggagtgcagtggtgcaatctctgctcagtgcaacctctgcctcctgggttcaagtgatcattccggcctcatgtcatcaaaagaagagaaaacagaggcacaagagaagatgaccacagaagacagaggcagaggctggggttatgctaccacaaaccggagaatgccaaggattgctggcaaccaccaggagcctggggagaggcgtggaacccctcctccctcagaggccccagaaggatccaaccctgctaataccttgattttagacttcccacccccagaactgtgagaaaataaatttctagctgctttaagccaaaaagtgtg

SEQ ID NO: 59583 - DNA, 873 bp, Homo sapiens
gtgtgtcactgaacaccttccccgtaccagcagctggaggatttgtttggtagcacctgggggatggctctgtcccgggcgcacttaggcgggctgtgcggagcgctttaccttccacagtgtccggcacacgcatccttttcgacatcatcacttgacctgctgcaataggtaacctacctggctctctcgcatcccgttatcagcgtcaagaagatttgcacgtaggcctttaaagccagccaccagccccgggcgccttcctctcactaaccccatgctgcctttccaaacggaagatgaacttagcaattctaggcgctgcctgtgtactagacaagtcttgctgtgttgcccaggccggagtgcagtggtgcaatctctgctcagtgcaacctctgcctcctgggttcaagtgatcattctgcctcaggctcctgactaattgggattacaggcatgcaccaccacaccagctaatgtttgtattttcagtggagacggggttttaccatgttggccaggctggtctcaaactcctgacctcaggtgattcgcctgcctcggcctcccaaagtgctgggtttacaggcgtgagccaccgcccggcctcatgtcatcaaaagaagagaaaacagaggcacaagagaagatgaccacagaagacagaggcagaggctggggttatgctaccacaaaccggagaatgccaaggattgctggcaaccaccaggagcctggggagaggcgtggaacccctcctccctcagaggccccagaaggatccaaccctgctaataccttgattttagacttcccacccccagaactgtgagaaaataaatttctagctgctttaagccaaaaagtgtg

SEQ ID NO: 59584 - DNA, 3048 bp, Homo sapiens
  misc_feature (3048)..(3048): n is a, c, g, or t
cgccggcggggaagatgaccgcgggcgccggcgtgctccttctgctgctctcgctctccggcgcgctccgggcccataatgaggatcttacaactagagagacctgcaaggctgggttctctgaagatgattacacggcattaatctcccaaaatattctagaaggggaaaagctacttcaagtcaagttcagcagctgtgtggggaccaaggggacacaatatgagaccaacagcatggacttcaaagttggggcagatgggacagtcttcgccacccgggagctgcaggtcccctccgagcaggtggcgttcacggtgactgcatgggacagccagacagcagagaaatgggacgccgtggtgcggttgctggtggcccagacctcgtccccgcactctggacacaagccgcagaaaggaaagaaggtcgtggctctggacccctctccgcctccgaaggacaccctgctgccgtggccccagcaccagaacgccaacgggctgaggcggcgcaaacgggactgggtcatcccgcccatcaacgtgcccgagaactcgcgcgggcccttcccgcagcagctcgtgaggatccggtccgacaaagacaatgacatccccatccggtacagcatcacgggagtgggcgccgaccagccccccatggaggtcttcagcattgactccatgtccggccggatgtacgtcacaaggcccatggaccgggaggagcacgcctcttaccacctccgagcccacgctgtggacatgaatggcaacaaggtggagaaccccatcgacctgtacatctacgtcatcgacatgaatgacaaccgccctgagttcatcaaccaggtctacaacggctccgtggacgagggctccaagccaggcacctacgtgatgaccgtcacggccaacgatgctgacgacagcaccacggccaacgggatggtgcggtaccggatcgtgacccagaccccacagagcccgtcccagaatatgttcaccatcaacagcgagactggagatatcgtcacagtggcggctggcctggaccgagagaaagttcagcagtacacagtcatcgttcaggccacagatatggaaggaaatctcaactatggcctctcaaacacagccacagccatcatcacggtgacagatgtgaatgacaacccgccagaatttaccgccagcacgtttgcaggggaggtccccgaaaaccgcgtggagaccgtggtcgcaaacctcacggtgatggaccgagatcagccccactctccaaactggaatgccgtttaccgcatcatcagtggggatccatccgggcacttcagcgtccgcacagaccccgtaaccaacgagggcatggtcaccgtggtgaaggcagtcgactacgagctcaacagagctttcatgctgacagtgatggtgtccaaccaggcgcccctggccagcggaatccagatgtccttccagtccacggcaggggtgaccatctccatcatggacatcaacgaggctccctacttcccctcaaaccacaagctgatccgcctggaggagggcgtgccccccggcaccgtgctgaccacgttttcagctgtggaccctgaccggttcatgcagcaggctgtgagatactcaaagctgtcagacccagcgagctggctgcacatcaatgccaccaacggccagatcaccacggcggcagtgctggaccgtgagtccctctacaccaaaaacaacgtctacgaggccaccttcctggcagctgacaatgggatacccccggccagcggcaccgggaccctccagatctatctcattgacatcaacgacaacgcccctgagctgctgcccaaggaggcgcagatctgcgagaagcccaacctgaacgccatcaacatcacggcggccgacgctgacgtcgaccccaacatcggcccctacgtcttcgagctgccctttgtcccggcggccgtgcggaagaactggaccatcacccgcctgaacggtgactatgcccaactcagcttgcgcatcctgtacctggaggccgggatgtatgacgtccccatcatcgtcacagactctggaaaccctcccctgtccaacacgtccatcatcaaagtcaaggtgtgcccatgtgatgacaacggggactgcaccaccattggcgcagtggcagcggctggtctgggcaccggtgccatcgtggccatcctcatctgcatcctcatcctgctgaccatggtcctgctgtttgtcatgtggatgaagcggcgagagaaggagcgccacacgaagcagctgctcattgaccccgaggacgacgtccgcgacaacatcctcaagtatgacgaggaaggcggtggcgaggaggaccaggactacgacctcagccagctgcagcagccggaagccatggggcacgtgccaagcaaagcccctggcgtgcgtcgcgtggatgagcggccggtgggcgctgagccccagtacccgatcaggcccatggtgccgcacccaggcgacatcggtgacttcatcaatgagggactccgcgctgctgacaacgaccccacggcacccccctatgactccctgctggtcttcgactacgaggggagcggctccaccgcaggctccgtcagctccctgaactcatccagttccggggaccaagactacgattacctcaacgactgggggcccagattcaagaagctggcggacatgtatggaggtggtgaagaggattgactgacctcgcatcttcggaccgaagtgagagccgtgctcggacgccggaggagcaggactgagcagaggcggccggtcttcccgactccctgcggctgtgtccttagtgctgttaggaggccccccaatccccacgttgagctgtctagcatgagcacccacccccacagcgccctgcacccggccgctgcccagcaccgcgctggctggcactgaaggacagcaagaggcactctgtcttcacttgaatttcctagaacagaagcactgtttttaaaaaaan

SEQ ID NO: 59585 - DNA, 335 bp, Homo sapiens
cttcaatgtgcctaagtttcttatatggattctaattttcccctcaggttaagtagtattttgagctatttatacctctttagtctcctgagaaagttctggttggacccagtgtgtaaaagaatgttggactcgaatttttttcttgtgttgggatgttggctggagttgaaagataaaaataatatgtgccccttatccccttatactaaagtaacctcaggataagctgctgaaaatctctgcaggacttgctaagaaaaaacataactctatttctctggtccagttatatatctggaagtttgagttttgataaaaattttttaggtagg

SEQ ID NO: 59586 - DNA, 410 bp, Homo sapiens
tgtataccgaggaaataattgcttttgggggaaatcattcattttagggaactgtaaccagtggagatgaactgagtttttagaattaagaaaaacccactgtattaggctgttcttgcattgctataaagaaataccagagactgggtaattatgaagagaagaggtggaattggctcacgcttctgcagctgtacaggaagcatggtgctggcatctgctcggcttctggtgaagccgcagggagctttcagtcatggcggaaggtgaagggggaacaggcacgccacaatgcaaaaacaggaatgagagagcgagagagtgagcgagcgtgagtagtgttgggagggaggtgccacacacttctaaatgaccagatctcatgagaactcactatcatgaagacagac

SEQ ID NO: 59587 - DNA, 243 bp, Homo sapiens
agatctttcaggtgatggaatagttctgtatcttgattttggtgaatctacacatgtgatgaagtaacgtgataaaatgacatagacctgtatgcctactacaatacagtatcaaaaccacggattgattcctggttctttttccaaattccacttttacaaacttatcctaaggtaatattaaaaaggcaccaaagagccctagatccctggataaacaggatcatttcaaagttgtttata

SEQ ID NO: 59588 - DNA, 2082 bp, Homo sapiens
aatgccttgcgcgccgcgggcccagagacgtgaggctgtcggcgtcctggtggccccgcctcgtgtccccccccggaccccacgccgcgggagcttgggggctgcggtcttctcttcctccgacctcaccttcgatgcggaagcgcaggggcaggtgcgccgccctcggcccgcgcaggcggtgggcccgtctggggcaaggcgcccggaagcgcctggttggttcagaaaatcggaccgcagcgggagggcgggcaccggcgcgtggtctcagtggccccaggcgaaccctgatgagcagcagccgcaagtggcttactaaaggagccactttctacgtttgtctggaatttacgtgaattaagctggcgggcgggcggccaggcctgtagtctcagcactttgggaggctcagcacttcgggaggctgtggcgggcggatcacctgagcctgggagttggagaccagcctgcgcaacgtagcaagaccctatctctaaaacagattcattaatacttagccaggcgcggtggctgaggtcccagctactcggcaggcccaggctggcctgagccagaccgctctggactgttttaattttttcagccttaatacctgccagaatttttttttactatgtatctttgtccttacgtatataaattttatgtacaattgagattatcctgtatttgcttttcccccctcacttttatatggtgacttttctcatgttaggctgaatactaacattttggaaactgtcggcctgaaaacgagcggagacacagtttctctaagtagagagtttatttgggccacacttgagcacaaattcaaggcgccctgaatgtgtactccgattagcagttaacagtggattttaaaggcaaaaaagggggccagggagtggactaataggaacttgtttgtgaggaattctcactggtttacagaaataacattgattagtgactgactatatgttgttcagctattgagtgtgggtatagtgtccattgtggcgtcattaggttaatttatagctgtttgtggcgctgttgccaccagtagcagtttaaagaggtgaacacaggtcaaggggtagtagggcgcgattgtcgcctcatttgaatgtctctctcggcctgataattaaaagaactcgcgttcctcagataaaaattctcttttctcaaaaccatttaaatgtggtaattagaatggcccagaaggggcacagtgccttttagccctcgccattacttgctcttaggagtgcattttttgtagctgtgggtttttgactatctctgctgctttctccagcccctaccctcgtgactacaagggaaaacgtgcggcgctcacgagagagcctttatgggatttttaaaaaatggggattgtgggaaaatggctccagcagtcacagtttttcagtttctcacaatcccataaaaacagagcaaccaggtaacaaaactaaagcatgggcaacatttacagaccactggatggtgaagaattcccatgaacccctggttcacaccgtaaggacacactactcagcatgggcaacatttacagactactggatggtgaagaattcccatgaacccctggttcacactgtaaggacagactactcagcatgggcaacatttacagaccactggatgatgaagaattcccatgaactcctggttccaactgtaaggacacactactcagctgtagcctgaagccgcctccttacatactgtaagtttagcctataggtttctccatacgtagtgaacagtcatctaattggatgtgtggacactgtaacctactcttgaatcagtcacaggcagcagcacttcaaactctgtttcaataagccagacacgagctgtagccaccctgctgtttgcaggcctcacctctgccttctgtgcctcactcccttttctgtccgtaagtctttggccacacagtggcactggagtctctctgagcctattctggtttgaggggttccctgattcctgaatcattctttgctcaattaaactctgtaaaatttaaaaaaaaaa

SEQ ID NO: 59589 - DNA, 437 bp, Homo sapiens
  misc_feature (2)..(3): n is a, c, g, or t
  misc_feature (109)..(109): n is a, c, g, or t
cnncatgaactcctggttccaactgtaaggacacactaccaggggtttcttttttgggttaaaagggcccccttggaaaaggccgcggcccccccctttcccccccccntttaacatactgtaagtttagcctataggtttctccatacgtagtgaacagtcatctaattggatgtgtggacactgtaacctactcttgaatcagtcacaggcagcagcacttcaaactctgtttcaataagccagacacgagctgtagccaccctgctgtttgcaggcctcacctctgccttctgtgcctcactcccttttctgtccgtaagtctttggccacacagtggcactggagtctctctgagcctattctggtttgaggggttccctgattcctgaatcattctttgctcaattaaactctgtaaaatttaaaaaaaaaa

SEQ ID NO: 59590 - DNA, 1982 bp, Homo sapiens
gcaggctggtacggtcggagtcttggatacttcgatgcggaagcgcaggggcaggtgcgccgccctcggcccgcgcaggcggtgggcccgtctggggcaaggcgcccggaagcgcctggttggttcagaaaatcggaccgcagcgggagggcgggcaccggcgcgtggtctcagtggccccaggcgaaccctgatgagcagcagccgcaagtggcttactaaaggagccactttctacgtttgtctggaatttacgtgaattaagctggcgggcgggcggccaggcctgtagtctcagcactttgggaggctcagcacttcgggaggctgtggcgggcggatcacctgagcctgggagttggagaccagcctgcgcaacgtagcaagaccctatctctaaaacagattcattaatacttagccaggcgcggtggctgaggtcccagctactcggcaggcccaggctggcctgagccagaccgctctggactgttttaattttttcagccttaatacctgccagaatttttttttactatgtatctttgtccttacgtatataaattttatgtacaattgagattatcctgtatttgcttttcccccctcacttttatatggtgacttttctcatgttaggctgaatactaacattttggaaactgtcggcctgaaaacgagcggagacacagtttctctaagtagagagtttatttgggccacacttgagcacaaattcaaggcgccctgaatgtgtactccgattagcagttaacagtggattttaaaggcaaaaaagggggccagggagtggactaataggaacttgtttgtgaggaattctcactggtttacagaaataacattgattagtgactgactatatgttgttcagctattgagtgtgggtatagtgtccattgtggcgtcattaggttaatttatagctgtttgtggcgctgttgccaccagtagcagtttaaagaggtgaacacaggtcaaggggtagtagggcgcgattgtcgcctcatttgaatgtctctctcggcctgataattaaaagaactcgcgttcctcagataaaaattctcttttctcaaaaccatttaaatgtggtaattagaatggcccagaaggggcacagtgccttttagccctcgccattacttgctcttaggagtgcattttttgtagctgtgggtttttgactatctctgctgctttctccagcccctaccctcgtgactacaagggaaaacgtgcggcgctcacgagagagcctttatgggatttttaaaaaatggggattgtgggaaaatggctccagcagtcacagtttttcagtttctcacaatcccataaaaacagagcaaccaggtaacaaaactaaagcatgggcaacatttacagaccactggatggtgaagaattcccatgaacccctggttcacaccgtaaggacacactactcagcatgggcaacatttacagactactggatggtgaagaattcccatgaacccctggttcacactgtaaggacagactactcagcatgggcaacatttacagaccactggatgatgaagaattcccatgaactcctggttccaactgtaaggacacactactcagctgtagcctgaagccgcctccttacatactgtaagtttagcctataggtttctccatacgtagtgaacagtcatctaattggatgtgtggacactgtaacctactcttgaatcagtcacaggcagcagcacttcaaactctgtttcaataagccagacacgagctgtagccaccctgctgtttgcaggcctcacctctgccttctgtgcctcactcccttttctgtccgtaagtctttggccacacagtggcactggagtctctctgagcctattctggtttgaggggttccctgattcctgaatcattctttgctcaattaaactctgtaaaatttaaaaaaaaaa

SEQ ID NO: 59591 - DNA, 2084 bp, Homo sapiens
aatgccttgcgcgccgcgggcccagagacgtgaggctgtcggcgtcctggtggccccgcctcgtgtccccccccggaccccacgccgcgggagcttgggggctgcggtcttctcttcctccgacctcaccttcgatgcggaagcgcaggggcaggtgcgccgccctcggcccgcgcaggcggtgggcccgtctggggcaaggcgcccggaagcgcctggttggttcagaaaatcggaccgcagcgggagggcgggcaccggcgcgtggtctcagtggccccaggcgaaccctgatgagcagcagccgcaagtggcttactaaaggagccactttctacgtttgtctggaatttacgtgaattaagctggcgggcgggcggccaggcctgtagtctcagcactttgggaggctcagcacttcgggaggctgtggcgggcggatcacctgagcctgggagttggagaccagcctgcgcaacgtagcaagaccctatctctaaaacagattcattaatacttagccaggcgcggtggctgaggtcccagctactcggcaggcccaggctggcctgagccagaccgctctggactgttttaattttttcagccttaatacctgccagaatttttttttactatgtatctttgtccttacgtatataaattttatgtacaattgagattatcctgtatttgcttttcccccctcacttttatatggtgacttttctcatgttaggctgaatactaacattttggaaactgtcggcctgaaaacgagcggagacacagtttctctaagtagagagtttatttgggccacacttgagcacaaattcaaggcgccctgaatgtgtactccgattagcagttaacagtggattttaaaggcaaaaaagggggccagggagtggactaataggaacttgtttgtgaggaattctcactggtttacagaaataacattgattagtgactgactatatgttgttcagctattgagtgtgggtatagtgtccattgtggcgtcattaggttaatttatagctgtttgtggcgctgttgccaccagtagcagtttaaagaggtgaacacaggtcaaggggtagtagggcgcgattgtcgcctcatttgaatgtctctctcggcctgataattaaaagaactcgcgttcctcagataaaaattctcttttctcaaaaccatttaaatgtggtaattagaatggcccagaaggggcacagtgccttttagccctcgccattacttgctcttaggagtgcattttttgtagctgtgggtttttgactatctctgctgctttctccagcccctaccctcgtgactacaagggaaaacgtgcggcgctcacgagagagcctttatgggatttttaaaaaatggggattgtgggaaaatggctccagcagtcacagtttttcagtttctcacaatcccataaaaacagagcaaccaggtaacaaaactaaagcatgggcaacatttacagaccactggatggtgaagaattcccatgaacccctggttcacaccgtaaggacacactactcagcatgggcaacatttacagactactggatggtgaagaattcccatgaacccctggttcacactgtaaggacagactactcagcatgggcaacatttacagaccactggatgatgaagaattcccatgaactcctggttccaactgtaaggacacactactcagctgtagcctgaagccgcctccttacatactgtaagtttagcctataggtttctccatacgtagtgaacagtcatctaattggatgtgtggacactgtaacctactcttgaatcagtcacaggcagcagcacttcaaactctgtttcaataagccagacacgagctgtagccaccctgctgtttgcaggcctcacctctgccttctgtgcctcactcccttttctgtccgtaagtctttggccacacagtggcactggagtctctctgagcctattctggtttgaggggttccctttttcactgggtagccatcgatacatcactcttctaagactatgcgcatgtccag

SEQ ID NO: 59592 - DNA, 2021 bp, Homo sapiens
aatgccttgcgcgccgcgggcccagagacgtgaggctgtcggcgtcctggtggccccgcctcgtgtccccccccggaccccacgccgcgggagcttgggggctgcggtcttctcttcctccgacctcaccttcgatgcggaagcgcaggggcaggtgcgccgccctcggcccgcgcaggcggtgggcccgtctggggcaaggcgcccggaagcgcctggttggttcagaaaatcggaccgcagcgggagggcgggcaccggcgcgtggtctcagtggccccaggcgaaccctgatgagcagcagccgcaagtggcttactaaaggagccactttctacgtttgtctggaatttacgtgaattaagctggcgggcgggcggccaggcctgtagtctcagcactttgggaggctcagcacttcgggaggctgtggcgggcggatcacctgagcctgggagttggagaccagcctgcgcaacgtagcaagaccctatctctaaaacagattcattaatacttagccaggcgcggtggctgaggtcccagctactcggcaggcccaggctggcctgagccagaccgctctggactgttttaattttttcagccttaatacctgccagaatttttttttactatgtatctttgtccttacgtatataaattttatgtacaattgagattatcctgtatttgcttttcccccctcacttttatatggtgacttttctcatgttaggctgaatactaacattttggaaactgtcggcctgaaaacgagcggagacacagtttctctaagtagagagtttatttgggccacacttgagcacaaattcaaggcgccctgaatgtgtactccgattagcagttaacagtggattttaaaggcaaaaaagggggccagggagtggactaataggaacttgtttgtgaggaattctcactggtttacagaaataacattgattagtgactgactatatgttgttcagctattgagtgtgggtatagtgtccattgtggcgtcattaggttaatttatagctgtttgtggcgctgttgccaccagtagcagtttaaagaggtgaacacaggtcaaggggtagtagggcgcgattgtcgcctcatttgaatgtctctctcggcctgataattaaaagaactcgcgttcctcagataaaaattctcttttctcaaaaccatttaaatgtggtaattagaatggcccagaaggggcacagtgccttttagccctcgccattacttgctcttaggagtgcattttttgtagctgtgggtttttgactatctctgctgctttctccagcccctaccctcgtgactacaagggaaaacgtgcggcgctcacgagagagcctttatgggatttttaaaaaatggggattgtgggaaaatggctccagcagtcacagtttttcagtttctcacaatcccataaaaacagagcaaccaggtaacaaaatcacaccgtaaggacacactactcagcatgggcaacatttacagactactggatggtgaagaattcccatgaacccctggttcacactgtaaggacagactactcagcatgggcaacatttacagaccactggatgatgaagaattcccatgaactcctggttccaactgtaaggacacactactcagctgtagcctgaagccgcctccttacatactgtaagtttagcctataggtttctccatacgtagtgaacagtcatctaattggatgtgtggacactgtaacctactcttgaatcagtcacaggcagcagcacttcaaactctgtttcaataagccagacacgagctgtagccaccctgctgtttgcaggcctcacctctgccttctgtgcctcactcccttttctgtccgtaagtctttggccacacagtggcactggagtctctctgagcctattctggtttgaggggttccctgattcctgaatcattctttgctcaattaaactctgtaaaatttaaaaaaaaaa

SEQ ID NO: 59593 - DNA, 1995 bp, Homo sapiens
aatgccttgcgcgccgcgggcccagagacgtgaggctgtcggcgtcctggtggccccgcctcgtgtccccccccggaccccacgccgcgggagcttgggggctgcggtcttctcttcctccgacctcaccttcgatgcggaagcgcaggggcaggtgcgccgccctcggcccgcgcaggcggtgggcccgtctggggcaaggcgcccggaagcgcctggttggttcagaaaatcggaccgcagcgggagggcgggcaccggcgcgtggtctcagtggccccaggcgaaccctgatgagcagcagccgcaagtggcttactaaaggagccactttctacgtttgtctggaatttacgtgaattaagctggcgggcgggcggccaggcctgtagtctcagcactttgggaggctcagcacttcgggaggctgtggcgggcggatcacctgagcctgggagttggagaccagcctgcgcaacgtagcaagaccctatctctaaaacagattcattaatacttagccaggcgcggtggctgaggtcccagctactcggcaggcccaggctggcctgagccagaccgctctggactgttttaattttttcagccttaatacctgccagaatttttttttactatgtatctttgtccttacgtatataaattttatgtacaattgagattatcctgtatttgcttttcccccctcacttttatatggtgacttttctcatgttaggctgaatactaacattttggaaactgtcggcctgaaaacgagcggagacacagtttctctaagtagagagtttatttgggccacacttgagcacaaattcaaggcgccctgaatgtgtactccgattagcagttaacagtggattttaaaggcaaaaaagggggccagggagtggactaataggaacttgtttgtgaggaattctcactggtttacagaaataacattgattagtgactgactatatgttgttcagctattgagtgtgggtatagtgtccattgtggcgtcattaggttaatttatagctgtttgtggcgctgttgccaccagtagcagtttaaagaggtgaacacaggtcaaggggtagtagggcgcgattgtcgcctcatttgaatgtctctctcggcctgataattaaaagaactcgcgttcctcagataaaaattctcttttctcaaaaccatttaaatgtggtaattagaatggcccagaaggggcacagtgccttttagccctcgccattacttgctcttaggagtgcattttttgtagctgtgggtttttgactatctctgctgctttctccagcccctaccctcgtgactacaagggaaaacgtgcggcgctcacgagagagcctttatgggatttttaaaaaatggggattgtgggaaaatggctccagcagtcacagtttttcagtttctcacaatcccataaaaacagagcaaccaggtaacaaaactaaagcatgggcaacatttacagaccactggatggtgaagaattcccatgaacccctggttgtaaggacagactactcagcatgggcaacatttacagaccactggatgatgaagaattcccatgaactcctggttccaactgtaaggacacactactcagctgtagcctgaagccgcctccttacatactgtaagtttagcctataggtttctccatacgtagtgaacagtcatctaattggatgtgtggacactgtaacctactcttgaatcagtcacaggcagcagcacttcaaactctgtttcaataagccagacacgagctgtagccaccctgctgtttgcaggcctcacctctgccttctgtgcctcactcccttttctgtccgtaagtctttggccacacagtggcactggagtctctctgagcctattctggtttgaggggttccctgattcctgaatcattctttgctcaattaaactctgtaaaatttaaaaaaaaaa

SEQ ID NO: 59594 - DNA, 1911 bp, Homo sapiens
  misc_feature (7)..(7): n is a, c, g, or t
ggccgcntcgggtttccggaggggccggagggcgggcgagggcgtcacgtgcgcgccgcccgcgggccggttggtccccgggcgggggaggggccgtgcgcagcctgggtcggggtcgggccggggtcggcacctgggacatccctgagggaagggccgggagcgggagcgccccagcggccggcgggcgggcgggcgagcggacgagcggcgcggagccggcccgaggcgcgcgccgagggagccccgtccccggtcgtgggggcaccgcccgcaggctctgcggggtgggcagctcccgggcctgccatgagctctccgccgcccgcccgcagtggcttttaccgccaggaggtgaccaagacggcctgggaggtgcgcgccgtgtaccgggacctgcagcccgtgggctcgggcgcctacggcgcggtgtgctcggccgtggacggccgcaccggcgctaaggtggccatcaagaagctgtatcggcccttccagtccgagctgttcgccaagcgcgcctaccgcgagctgcgcctgctcaagcacatgcgccacgagaacgtgatcgggctgctggacgtattcactcctgatgagaccctggatgacttcacggacttttacctggtgatgccgttcatgggcaccgacctgggcaagctcatgaaacatgagaagctaggcgaggaccggatccagttcctcgtgtaccagatgctgaaggggctgaggtatatccacgctgccggcatcatccacagagacctgaagcccggcaacctggctgtgaacgaagactgtgagctgaagatcctggacttcggcctggccaggcaggcagacagtgagatgactgggtacgtggtgacccggtggtaccgggctcccgaggtcatcttgaattggatgcgctacacgcagacggtggacatctggtccgtgggctgcatcatggcggagatgatcacaggcaagacgctgttcaagggcagcgaccacctggaccagctgaaggagatcatgaaggtgacggggacgcctccggctgagtttgtgcagcggctgcagagcgatgaggccaagaactacatgaagggcctccccgaattggagaagaaggattttgcctctatcctgaccaatgcaagccctctggctgtgaacctcctggagaagatgctggtgctggacgcggagcagcgggtgacggcaggcgaggcgctggcccatccctacttcgagtccctgcacgacacggaagatgagccccaggtccagaagtatgatgactcctttgacgacgttgaccgcacactggatgaatggaagcgtgttacttacaaagaggtgctcagcttcaagcctccccggcagctgggggccagggtctccaaggagacgcctctgtgaagatctctgggctccggggtggcagtgaggaccaccttcaccttccacctgagaggggactctcgttgccaccttgaccttggctggggcttgcatcccaaggcatccatcagagcagacgcccgggttccatggaccctcctccccacggccatgcctctgctcttgggcgcccatcatggaggagcacctgaactttctggacaagacctctggccgacctggggatggcctctgatccctggagcagtggcccacttgcccggtgctctcagaaacctcagagctggtggggctccagatcaggccttggcctctgagccctgcctgctctgggccatgcagaggaaggacagagggtgggcgcagggcaccaactcagggacatcccctctcctgggcgacgtcagtggaccttcctgcacccccagcctggaatgtaaatcagctgtgtggtgcccgcgtggctggaaggaaatagacccttttgtagctccc

SEQ ID NO: 59595 - DNA, 1834 bp, Homo sapiens
ggcggccggcggggcgggcggggcctgcgcggggtgcccggccttcccgctaagcggtccgccccgcagctcggccgtggacggccgcaccggcgctaaggtggccatcaagaagctgtatcggcccttccagtccgagctgttcgccaagcgcgcctaccgcgagctgcgcctgctcaagcacatgcgccacgagaacgtgatcgggctgctggacgtattcactcctgatgagaccctggatgacttcacggacttttacctggtgatgccgttcatgggcaccgacctgggcaagctcatgaaacatgagaagctaggcgaggaccggatccagttcctcgtgtaccagatgctgaaggggctgaggtatatccacgctgccggcatcatccacagagtgagtcccggtggagaagccgctcatcagccctcccccagtgcaatccccccgcctccacgtcccacctgtgaggatgtgatggggtctgggtgctgagccacgccctatgcacagcccctggtgggaacctgcctgggtgcccaggtaccttggtctgcccttgaagggctgcagagagcaagggggccaggtccggtggccccatctttaggtgccacccaggctcttggctgtgcccatgcttgggagggtggggcacagtggccacctttcctctgcccccaggacctgaagcccggcaacctggctgtgaacgaagactgtgagctgaagatcctggacttcggcctggccaggcaggcagacagtgagatgactgggtacgtggtgacccggtggtaccgggctcccgaggtcatcttgaattggatgcgctacacgcagacggtggacatctggtccgtgggctgcatcatggcggagatgatcacaggcaagacgctgttcaagggcagcgaccacctggaccagctgaaggagatcatgaaggtgacggggacgcctccggctgagtttgtgcagcggctgcagagcgatgaggccaagaactacatgaagggcctccccgaattggagaagaaggattttgcctctatcctgaccaatgcaagccctctggctgtgaacctcctggagaagatgctggtgctggacgcggagcagcgggtgacggcaggcgaggcgctggcccatccctacttcgagtccctgcacgacacggaagatgagccccaggtccagaagtatgatgactcctttgacgacgttgaccgcacactggatgaatggaagcgtgttacttacaaagaggtgctcagcttcaagcctccccggcagctgggggccagggtctccaaggagacgcctctgtgaagatctctgggctccggggtggcagtgaggaccaccttcaccttccacctgagaggggactctcgttgccaccttgaccttggctggggcttgcatcccaaggcatccatcagagcagacgcccgggttccatggaccctcctccccacggccatgcctctgctcttgggcgcccatcatggaggagcacctgaactttctggacaagacctctggccgacctggggatggcctctgatccctggagcagtggcccacttgcccggtgctctcagaaacctcagagctggtggggctccagatcaggccttggcctctgagccctgcctgctctgggccatgcagaggaaggacagagggtgggcgcagggcaccaactcagggacatcccctctcctgggcgacgtcagtggaccttcctgcacccccagcctggaatgtaaatcagctgtgtggtgcccgcgtggctggaaggaaatagacccttttgtagctccc

SEQ ID NO: 59596 - DNA, 1369 bp, Homo sapiens
ctagctcgaaagccacgtgggacaggcaagggggtgcgagaaagtcactcctgatgagaccctggatgacttcacggacttttacctggtgatgccgttcatgggcaccgacctgggcaagctcatgaaacatgagaagctaggcgaggaccggatccagttcctcgtgtaccagatgctgaaggggctgaggtatatccacgctgccggcatcatccacagagacctgaagcccggcaacctggctgtgaacgaagactgtgagctgaagatcctggacttcggcctggccaggcaggcagacagtgagatgactgggtacgtggtgacccggtggtaccgggctcccgaggtcatcttgaattggatgcgctacacgcagacggtggacatctggtccgtgggctgcatcatggcggagatgatcacaggcaagacgctgttcaagggcagcgaccacctggaccagctgaaggagatcatgaaggtgacggggacgcctccggctgagtttgtgcagcggctgcagagcgatgaggccaagaactacatgaagggcctccccgaattggagaagaaggattttgcctctatcctgaccaatgcaagccctctggctgtgaacctcctggagaagatgctggtgctggacgcggagcagcgggtgacggcaggcgaggcgctggcccatccctacttcgagtccctgcacgacacggaagatgagccccaggtccagaagtatgatgactcctttgacgacgttgaccgcacactggatgaatggaagcgtgttacttacaaagaggtgctcagcttcaagcctccccggcagctgggggccagggtctccaaggagacgcctctgtgaagatctctgggctccggggtggcagtgaggaccaccttcaccttccacctgagaggggactctcgttgccaccttgaccttggctggggcttgcatcccaaggcatccatcagagcagacgcccgggttccatggaccctcctccccacggccatgcctctgctcttgggcgcccatcatggaggagcacctgaactttctggacaagacctctggccgacctggggatggcctctgatccctggagcagtggcccacttgcccggtgctctcagaaacctcagagctggtggggctccagatcaggccttggcctctgagccctgcctgctctgggccatgcagaggaaggacagagggtgggcgcagggcaccaactcagggacatcccctctcctgggcgacgtcagtggaccttcctgcacccccagcctggaatgtaaatcagctgtgtggtgcccgcgtggctggaaggaaatagacccttttgtagctccc

SEQ ID NO: 59597 - DNA, 1738 bp, Homo sapiens
  misc_feature (7)..(7): n is a, c, g, or t
ggccgcntcgggtttccggaggggccggagggcgggcgagggcgtcacgtgcgcgccgcccgcgggccggttggtccccgggcgggggaggggccgtgcgcagcctgggtcggggtcgggccggggtcggcacctgggacatccctgagggaagggccgggagcgggagcgccccagcggccggcgggcgggcgggcgagcggacgagcggcgcggagccggcccgaggcgcgcgccgagggagccccgtccccggtcgtgggggcaccgcccgcaggctctgcggggtgggcagctcccgggcctgccatgagctctccgccgcccgcccgcagtggcttttaccgccaggaggtgaccaagacggcctgggaggtgcgcgccgtgtaccgggacctgcagcccgtgggctcgggcgcctacggcgcggtgtgctcggccgtggacggccgcaccggcgctaaggtggccatcaagaagctgtatcggcccttccagtccgagctgttcgccaagcgcgcctaccgcgagctgcgcctgctcaagcacatgcgccacgagaacgtgatcgggctgctggacgtattcactcctgatgagaccctggatgacttcacggacttttacctggtgatgccgttcatgggcaccgacctgggcaagctcatgaaacatgagaagctaggcgaggaccggatccagttcctcgtgtaccagatgctgaaggggctgaggtatatccacgctgccggcatcatccacagagacctgaagcccggcaacctggctgtgaacgaagactgtgagctgaagatcctggacttcggcctggccaggcaggcagacagtgagatgactgggtacgtggtgacccggtggtaccgggctcccgaggtcatcttgaattggatgcgctacacgcagacggtggacatctggtccgtgggctgcatcatggcggagatgatcacaggcaagacgctgttcaagggcagcgaccacctggaccagctgaaggagatcatgaaggtgacggggacgcctccggctgagtttgtgcagcggctgcagagcgatgaggccaagaactacatgaagggcctccccgaattggagaagaaggattttgcctctatcctgaccaatgcaagccctctggctgtgaacctcctggagaagatgctggtgctggacgcggagcagcgggtgacggcaggcgaggcgctggcccatccctacttcgagtccctgcacgacacggaagatgagccccaggtccagaagtatgatgactcctttgacgacgttgaccgcacactggatgaatggaagcgtgagtggggggctcctggcacggcctgtgtggacccaagtggggggctctgggcagggcctgtgtggacctgtgagttgggggctccgggtagggcctgtgtggacccgtgagttgggggctccgggtagggcctgtgtggaccctgtgggccctgtgcaggtggccaggctcagagtcctagatccccatccctgggatgcaggtcaggtgaggaggatgggaggtcagggcagcatggggccgtgtggcctggtggagatgacctctggctggagctggaagttgaagggaagggtgttcctggcaggctcagcacagaggctggcacagaaggagccgggagtggtgaaaggcagctgtgagtcagggaaccagggcccacttagcccctcctggccccca

SEQ ID NO: 59598 - DNA, 2003 bp, Homo sapiens
  misc_feature (7)..(7): n is a, c, g, or t
ggccgcntcgggtttccggaggggccggagggcgggcgagggcgtcacgtgcgcgccgcccgcgggccggttggtccccgggcgggggaggggccgtgcgcagcctgggtcggggtcgggccggggtcggcacctgggacatccctgagggaagggccgggagcgggagcgccccagcggccggcgggcgggcgggcgagcggacgagcggcgcggagccggcccgaggcgcgcgccgagggagccccgtccccggtcgtgggggcaccgcccgcaggctctgcggggtgggcagctcccgggcctgccatgagctctccgccgcccgcccgcagtggcttttaccgccaggaggtgaccaagacggcctgggaggtgcgcgccgtgtaccgggacctgcagcccgtgggctcgggcgcctacggcgcggtgtgctcggccgtggacggccgcaccggcgctaaggtggccatcaagaagctgtatcggcccttccagtccgagctgttcgccaagcgcgcctaccgcgagctgcgcctgctcaagcacatgcgccacgagaacgtgatcgggctgctggacgtattcactcctgatgagaccctggatgacttcacggacttttacctggtgatgccgttcatgggcaccgacctgggcaagctcatgaaacatgagaagctaggcgaggaccggatccagttcctcgtgtaccagatgctgaaggggctgaggtatatccacgctgccggcatcatccacagagacctgaagcccggcaacctggctgtgaacgaagactgtgagctgaagatcctggacttcggcctggccaggcaggcagacagtgagatgactgggtacgtggtgacccggtggtaccgggctcccgaggtcatcttgaattggatgcgctacacgcagacggtggacatctggtccgtgggctgcatcatggcggagatgatcacaggcaagacgctgttcaagggcagcgaccacctggaccagctgaaggagatcatgaaggtgacggggacgcctccggctgagtttgtgcagcggctgcagagcgatgaggccaagaactacatgaagggcctccccgaattggagaagaaggattttgcctctatcctgaccaatgcaagccctctggctgtgaacctcctggagaagatgctggtgctggacgcggagcagcgggtgacggcaggcgaggcgctggcccatccctacttcgagtccctgcacgacacggaagatgagccccaggtccagaagtatgatgactcctttgacgacgttgaccgcacactggatgaatggaagcgtgttacttacaaagaggtgctcagcttcaagcctccccggcagctgggggccagggtctccaaggagacgcctctgtgaagatctctgggctccggggtggcagtgaggaccaccttcaccttccacctgagaggggactctcgttgccaccttgaccttggctggggcttgcatcccaaggcatccatcagagcagacgcccgggttccatggaccctcctccccacggccatgcctctgctcttgggcgcccatcatggaggagcacctgaactttctggacaagacctctggccgacctggggatggcctctgatccctggagcagtggcccacttgcccggtgctctcagaaacctcagagctggtggggctccagatcaggccttggcctctgagccctgcctgctctgggccatgcagaggaaggacagagggtgggcgcagggcaccaactcagggacatcccctctcctgggcgacgtcagtggaccttcctgcacccccagcctggaatgtaaatcagctgtgtggtgcccgcgtggctggaaggaaatagacccttttgtagctcccaaaaaaaaacctatataagacataataaacaaacacacaagcaaacaaaaaaaaaaacacaacgaagggacagcaatcaataaaaacacagg

SEQ ID NO: 59599 - DNA, 1404 bp, Homo sapiens
ggcggccggcggggcgggcggggcctgcgcggggtgcccggccttcccgctaagcggtccgccccgcagctcggccgtggacggccgcaccggcgctaaggtggccatcaagaagctgtatcggcccttccagtccgagctgttcgccaagcgcgcctaccgcgagctgcgcctgctcaagcacatgcgccacgagaacgtgatcgggctgctggacgtattcactcctgatgagaccctggatgacttcacggacttgacctgaagcccggcaacctggctgtgaacgaagactgtgagctgaagatcctggacttcggcctggccaggcaggcagacagtgagatgactgggtacgtggtgacccggtggtaccgggctcccgaggtcatcttgaattggatgcgctacacgcagacggtggacatctggtccgtgggctgcatcatggcggagatgatcacaggcaagacgctgttcaagggcagcgaccacctggaccagctgaaggagatcatgaaggtgacggggacgcctccggctgagtttgtgcagcggctgcagagcgatgaggccaagaactacatgaagggcctccccgaattggagaagaaggattttgcctctatcctgaccaatgcaagccctctggctgtgaacctcctggagaagatgctggtgctggacgcggagcagcgggtgacggcaggcgaggcgctggcccatccctacttcgagtccctgcacgacacggaagatgagccccaggtccagaagtatgatgactcctttgacgacgttgaccgcacactggatgaatggaagcgtgttacttacaaagaggtgctcagcttcaagcctccccggcagctgggggccagggtctccaaggagacgcctctgtgaagatctctgggctccggggtggcagtgaggaccaccttcaccttccacctgagaggggactctcgttgccaccttgaccttggctggggcttgcatcccaaggcatccatcagagcagacgcccgggttccatggaccctcctccccacggccatgcctctgctcttgggcgcccatcatggaggagcacctgaactttctggacaagacctctggccgacctggggatggcctctgatccctggagcagtggcccacttgcccggtgctctcagaaacctcagagctggtggggctccagatcaggccttggcctctgagccctgcctgctctgggccatgcagaggaaggacagagggtgggcgcagggcaccaactcagggacatcccctctcctgggcgacgtcagtggaccttcctgcacccccagcctggaatgtaaatcagctgtgtggtgcccgcgtggctggaaggaaatagacccttttgtagctccc

SEQ ID NO: 59600 - DNA, 1839 bp, Homo sapiens
  misc_feature (7)..(7): n is a, c, g, or t
ggccgcntcgggtttccggaggggccggagggcgggcgagggcgtcacgtgcgcgccgcccgcgggccggttggtccccgggcgggggaggggccgtgcgcagcctgggtcggggtcgggccggggtcggcacctgggacatccctgagggaagggccgggagcgggagcgccccagcggccggcgggcgggcgggcgagcggacgagcggcgcggagccggcccgaggcgcgcgccgagggagccccgtccccggtcgtgggggcaccgcccgcaggctctgcggggtgggcagctcccgggcctgccatgagctctccgccgcccgcccgcagtggcttttaccgccaggaggtgaccaagacggcctgggaggtgcgcgccgtgtaccgggacctgcagcccgtgggctcgggcgcctacggcgcggtgtgctcggccgtggacggccgcaccggcgctaaggtggccatcaagaagctgtatcggcccttccagtccgagctgttcgccaagcgcgcctaccgcgagctgcgcctgctcaagcacatgcgccacgagaacgtgatcgggctgctggacgtattcactcctgatgagaccctggatgacttcacggacttttacctggtgatgccgttcatgggcaccgacctgggcaagctcatgaaacatgagaagctaggcgaggaccggatccagttcctcgtgtaccagatgctgaaggggctgaggtatatccacgctgccggcatcatccacagagacctgaagcccggcaacctggctgtgaacgaagactgtgagctgaagatcctggacttcggcctggccaggcaggcagacagtgagatgactgggtacgtggtgacccggtggtaccgggctcccgaggtcatcttgaattggatgcgctacacgcagacggacctggaccagctgaaggagatcatgaaggtgacggggacgcctccggctgagtttgtgcagcggctgcagagcgatgaggccaagaactacatgaagggcctccccgaattggagaagaaggattttgcctctatcctgaccaatgcaagccctctggctgtgaacctcctggagaagatgctggtgctggacgcggagcagcgggtgacggcaggcgaggcgctggcccatccctacttcgagtccctgcacgacacggaagatgagccccaggtccagaagtatgatgactcctttgacgacgttgaccgcacactggatgaatggaagcgtgttacttacaaagaggtgctcagcttcaagcctccccggcagctgggggccagggtctccaaggagacgcctctgtgaagatctctgggctccggggtggcagtgaggaccaccttcaccttccacctgagaggggactctcgttgccaccttgaccttggctggggcttgcatcccaaggcatccatcagagcagacgcccgggttccatggaccctcctccccacggccatgcctctgctcttgggcgcccatcatggaggagcacctgaactttctggacaagacctctggccgacctggggatggcctctgatccctggagcagtggcccacttgcccggtgctctcagaaacctcagagctggtggggctccagatcaggccttggcctctgagccctgcctgctctgggccatgcagaggaaggacagagggtgggcgcagggcaccaactcagggacatcccctctcctgggcgacgtcagtggaccttcctgcacccccagcctggaatgtaaatcagctgtgtggtgcccgcgtggctggaaggaaatagacccttttgtagctccc

SEQ ID NO: 59601 - DNA, 379 bp, Homo sapiens
gtgtgggaaagctggctgattgtttttttttttttttctggaaagagtatcaagtagataaaacttttgtccattctggacagtgagaaaactgaggctcagaggagttaggtgactatcctaagatcacacagcttccaggcaccaggcattgacgtcccccagttaacaaatgttatgctctttcttctctcttgctttgcctttgaagaatgaattctctttcacaggggtcacaaactcaatgacctttgaggtcaagcagatcagggtggggctgaggagcacaggacaatagggactgataagaagtgcagggaatattcgaaaagcattaaggttcagccttggcgtttaattctgtgccccctgatgacat

SEQ ID NO: 59602 - DNA, 106 bp, Homo sapiens
cgtgacttttggactctcccctccaaacgccttataggtatagtttggcaatcttgctcacacctgggtgtgaacctgcgtgtacccagcccgggagatattggag

SEQ ID NO: 59603 - DNA, 226 bp, Homo sapiens
ggaaggaatggccttccctcatctcccagaccctggaaccagaccctgggacttccaagatcccacctggactgggctggctggggcagaggagcagggctaggttttgagggaagagtgtggcagtggggtactactgcccaggccaggggtaacgttccagggtgggtggaggtgaggaggaagagagggaaggaagactaccgtcacaagtcaggatgggaag

SEQ ID NO: 59604 - DNA, 179 bp, Homo sapiens
aagttttagggtcttaaaaattattaagaattccaagtagcttttgtttttgtggctctatctctctatacttgccatcttataaattgaaattgagaatcttaacaatatttattgacatgatttaattacttaaaataacaataataaccctactataagtaaacataataaatttt

SEQ ID NO: 59605 - DNA, 204 bp, Homo sapiens
attcctgacctgtgatattggccattagagcctttcaagaatggtacctcctgccgatgattttttttaaagccttaatgaagagagtgtcctctggatccttccagagaagataggatgtgagtgagtaagttatgtataataatttcaccccaaaatttctatgtccttgataccattccctgtataccaaggaagggtatt

SEQ ID NO: 59606 - DNA, 462 bp, Homo sapiens
agtatagagttcagttataaattgtggtactgtatgaagagatttggaagagctatataaggattaaatccttcacctcaaatatagtgatatagagaagctaaaaaataagatacatgtcttataattttgccttgtctcagttctgtgtcttccccttttgacacaacctaaaaccaaattgccaagaaaaggaaacaactaccaaaaagcacagctggtgcgttagtgggactgaattcacggcaccagtcactcatgaatttgtgtagacacaggtggatctgaaggacttctcttcaaggcacatgcagtttagccaggcactgaccagctccaaattctccttgaccacttgctacctgaatactcaaggcccacttgctgctcaatccaaaattcactcaggccactagactgttctactaccttaacatgttaagtttggaaagctgttttcct

SEQ ID NO: 59607 - DNA, 1073 bp, Homo sapiens
ttgaggctgcaatgagctataattacaccactgcactccagcctgggtgacagaatgagtctttgtgccaaataaataaataatcattcatttaacagatattcaccatatactatttgccaggtactgttctaggtgctggttatgcagcagtgaataaaacagaaaaatctgtaccctcatggaacttacaatcttgtggaaagagagagaataaataagacatatggtatgttagacaggcaagctggttaatttttatgcctcagtttgttcaattatactaaaggtacttgaaacaatatctctaaggaccttcctagctctaaaatcccatgattctgtggtgttttaactttctcatttttttctactgtgctgacctcatccattgagtaaatatttacacacctaccatgtgtttataactgctatgcatgtgagagaatcaaaaagtagagcacaaagtttctgcctttgaattgtttatagtcggtctggaaacaagaggtatctgtatattaacactgttatttccagtgtgttcttattctgtccagaacagatccatattcttcaagggaatagcagctacttcagctgcaacctaatttctgggtgagggacagggttgcccctgaacacagtataatactccttttttttaatgttcttatatatgtaggaatcctcactgtagttctgtagcattattttatgttgtccacttattttcggtctggaacttagccaggataggaaaatttatctcagaatttagtagattggttttcattgggatttaatggatgatcactctctgccctccttatcttttgtgtgcctatatatgtctgtgtgtagtatccctcactgtctgctggggaccagttccaggaccacctgtggattccaaaatccactcaagccccacagttgcctgttgagaacttgtggatacaaaaagctggcctatttttgcagctttcgtgtcccacaataccatatttttgatccaagttggttgcagatgcaaaattgcccatactgagggctgacatatttattgcaaa

SEQ ID NO: 59608 - DNA, 561 bp, Homo sapiens
ttgaggctgcaatgagctataattacaccactgcactccagcctgggtgacagaatgagtctttgtgccaaataaataaataatcattcatttaacagatattcaccatatactatttgccaggtactgttctaggtgctggttatgcagcagtgaataaaacagaaaaatctgtaccctcatggaacttacaatcttgtggaaagagagagaataaataagacatatggtatgttagacaggataggaaaatttatctcagaatttagtagattggttttcattgggatttaatggatgatcactctctgccctccttatcttttgtgtgcctatatatgtctgtgtgtagtatccctcactgtctgctggggaccagttccaggaccacctgtggattccaaaatccactcaagccccacagttgcctgttgagaacttgtggatacaaaaagctggcctatttttgcagctttcgtgtcccacaataccatatttttgatccaagttggttgcagatgcaaaattgcccatactgagggctgacatatttattgcaaa

SEQ ID NO: 59609 - DNA, 269 bp, Homo sapiens
ttcttataaagattaggaaccactgagcccaactgtcaataattgtaactttttgcctgtttgccatataaccctttgagaaccactgtctctatccattcctggtgttctagagttgtttcattactacctgcaacagcagcttattcaatctttagtagtcacaagcattcaccaagcaatctaggtaagtttatctctataggaggaaaacacctttcctttaaatacgtcacaaattatatatatttattaaaatatgagagcaa

SEQ ID NO: 59610 - DNA, 359 bp, Homo sapiens
attcaggacataggcatgggcaaggacttcatgactaaaacaccaaaagcaatggcaacaaaagccgaaattgacaaatgggatctaattcaactaaagagcttctgcacattaaaagaaattaccatcagagtgaacaggcaaactacagaaaatctacccatctgacaaagggctaatatccagaatgctacctaatttttaaagactttttccggcatcttgaaaaaaaccaccattatttgacataggtaaaactgaaaaaacaaactattcataattacaatttgtgacacattatgtagtagctaggttcatcacataaattacatgataccccagttcaagttaaatttcag

SEQ ID NO: 59611 - DNA, 250 bp, Homo sapiens
gcagcctctaggagctgagggtgccctccagctgacatccagaaagaaattgaagccctaggttgtgaaaccacaaggacgtgaattctgccaacacataatgcaaacataatctattgtgaaagaaattggaccagtggatgctctggggattgagggcaagcattgacttggaaagggaatgggataacttcctgcagtgatggacatgttctgtgtcttgaggtgtaggtcacggaggtatatgcat

SEQ ID NO: 59612 - DNA, 245 bp, Homo sapiens
aaagttttgtgtctggcattactttcctctagtagatatagtctaaactgagagcatttaaacaattaaaaagagtacaatctcagcactttttgaagctgaggcaggcagtagtctcaactactcgggaggctgaggctgaggtgaggctgagtatggatacactgtactaatcaaagctatttcaatttaacctgagcctgggaggtcaaggctgcagtgagttgtgattgtgccactgcact

SEQ ID NO: 59613 - DNA, 258 bp, Homo sapiens
gattgcatgatggtcccaagaaaactccaccagatttttattcataatcatccaccaactgcaacacaccaagtaggaaaaaaaaaaacttactcatctgacagcctaaggagttatattttccctttagagagaatagcatgtttctaggatgaaacacgaagtggtttattaatatgcctaattgatgatgatgcagcacgggcagccctggagactaaggcgaggtgccaacactgagagcatggccccagattt

SEQ ID NO: 59614 - DNA, 954 bp, Homo sapiens
aggtatgaacaggtgtgctctaagtcagagggcggagtggaggggaacctgcatgaagtatctttccttagcaggccaggcacattccctgctgtttttggggagcgggctccaggatcctttccctcttggaaaagagcagaaagtgccaattggatctctggtcactgaataaaactgatctaccctctgagtgtggcccagctcttaacaggagcaaattgagacctcaactgaattctgccttgaagatcttttgtgatgtttactggtccacgaagacaggagagtgagggtaggaaggtgcaaggacagatagttgctgccaaaatgaatttggccaggttcattcatctgctctcccttgcacacagctctctcattccttcctctttgactttttaaaaaataaactttttgttgtagtatagtttcagatgtatgggaaaaatgaggctataatacagagaattcccacatatcctgtatctagtttcccccattattatcttaagttagaatggtatgtttatcacacttaatgagccaatacagttaccttataattagctaaagtctgtgctttattcacctttcctcagttgatacttaatgttctttttcggtccggggatcccatccaggatgcggtgtcacatttagttgtcgtggagccccaggctatttttggttgtgacagtgtcccagactttccttgtttttgatgatcttgacagtttcgaggagtactggtcaggtgttttgtagaatacccctcaattgagatttgtctgttgtttttctgtggcgattcaactggggttgtggattttgagggggaggatgacagaggtaaagtgccattttcatcacatatcagtgtgacttatcacatgctgatccttatcacttggcggaggtagcgtttgccaagtttctgtactgtaaactgaa

SEQ ID NO: 59615 - DNA, 1062 bp, Homo sapiens
tagtggctgctgcctcctgatgaactgtttggggaccccagctctactcaaaagggagcggagataaatggaacccctcacactgctgaggcccgtgttactgttcattcagccaggtggcatgtacctcacagactgttgtgcagtgtccgttattgcagattttaatcatttgcatgctcatcaatttctaagataaatagggtctagagtcataagaatccattgttttcaaggaacttgcagaattacatcatttcctattagtagagagcactacccattttgaaaatctgatatgaaagttgttttttactcttgtaaaaaagactttcttagtcaaactaacttttcatattttcaagcattctgattcatactcttgctagtggaagaagagagcaagctgccctgctcttttcctttgaggactgaaatagttaaagagaaatcaatgaacaaagtcactcccaaccattttcctgtaaagctggttattatttctcaaggaacctacactttgaatatgtgttaccgagatacctctacatgtggaattatcaacatgttttgaatgagagcagaaatgaacagactggaaaaatctatctcttggtttctatttctctgactttttgagtcgaaaagcataaaggtagaaattcttatttaagctgcttctagtggtgcctgagctggttttgatggtggcatcaaactaccgatttaaaactggaagttgctggtactcaaaccaaaagttcatactctggcgacacgaagggtttcctttgagcaacgtcagctgctgagtccttgtgttcagttcccattgaggagagttggcttttatccatttcaaagcatttgtaggccagccaagggctttcattattgaggcttctagtggcctctggttaacctagaagttagtgggtttttcttgatgacaccaacctctcacagcgtttttccttagagacttaagcagagttttaaaatcctcttttgcgaaaagaacaaatatgttttatgactttgatgatatcttcattctgggca

SEQ ID NO: 59616 - DNA, 606 bp, Homo sapiens
tagtggctgctgcctcctgatgaactgtttggggaccccagctctactcaaaagggagcggagataaatggaacccctcacactgctgaggcccgtgttactgttcattcagccaggtggcatgtacctcacagactgttgtgcagtgtccgttattgcagattttaatcatttgcatgctcatcaatttctaagataaatagggtctagagtcataagaatccattgttttcaaggaacttgcagaattacatcatttcctattagtagagagcactacccattttgaaaatctgatatgaaagttgttttttactcttgtaaaaaagactttcttagtcaaactaacttttcatattttcaagcattctgattcatactcttgctagtggaagaagagagcaagctgccctgctcttttcctttgaggactgaaatagttaaagagaaatcaatgaacaaagtcactcccaaccattttcctgtaaagctggttattatttctcaaggaacctacactttgaatatgtgttaccgagatacctctacatgtggaattatcaacatgttttgaatgagagcagaaatgaacagactggaaaaatc

SEQ ID NO: 59617 - DNA, 1450 bp, Homo sapiens
tgcgcgtccgctcccgccgttgcgacggacgggtaggggaggcgaccccggcgttctgctccgcactgtggaggaggtggggaggtgttgggccagggctgaggtaggagggagtctgtccctcgacgcctcctgcgacgccagcccctgagcgatgatgcgaacgtgcgtcctactctccgcggtgctctggtgcctcacaggagacaaaatatatgtagagttacatcaaaatagtccagtccttatctgtatggattttaagctttctaaaaaagaaatagtggaccccacctacttatggattgggcctaatgaaaagacgttaacaggaaataatagaataaatataactgaaactggacagctgatggtgaaagattttttggagcctttgtctggactttacacatgtactctttcttataagactgttaaagcagaaactcaagaagaaaaaacagtcaaaaagagatatgactttatggtctttgcctatcgggaacctgattattcatatcagatggctgtacgttttaccacaaggtcttgtatagggagatacaatgatgtattctttagagtgctgaagaaaatcttggatagtctaatttctgatttgtcatgccatgtcatagagccatcatataaatgccattctgttgaaattccagaacatggcctcatacatgagctatttatagcatttcaagttaatccttttgcgccggggtggaaaggtgcttgcaatggatctgttgactgtgaagataccactaatcataatatcctccaggcaagagatcgaatagaagacttttttcggagccaagcatatattttctaccataactttaataaaactctaccagcaatgcattttgtggaccacagtttgcaagtagtacgtctggatagctgtcgaccaggctttggaaaaaatgaacgtctacacagtaattgcgctagctgttgtgtggtttgtagtcctgcgacttttagtcctgatgttaatgtaacttgtcagacctgcgtttccgtccttacctatggagctaaatcttgcccacaaacttcaaacaaaaatcagcaatatgaagattagaggtgaaagcattgttacttacttgtggaagtcggggacataagatgattttcacatcccagagcatcatagatagttccattaagtaaaatcagtaagaccaaaccactggaaaacatgcattttggaaactttaaaataaatggttaacatggcatttctaagaaggcatttaatccagtatctctagtgtacaaaggaaacttgaagttttaatggattatttttaatgaaatgttttattgtttacaaacggtatgttgctgtgtacctaagagtatagtaaggtcaagaagagtatcaaagtataataaaataaaaattgtatactctccataaaaaaat

SEQ ID NO: 59618 - DNA, 1424 bp, Homo sapiens
aggaggctgaatacgggatggagggtatggagggaccgggtctgtcccctgtggagagttggagtgtgtgcaggtgatgtagagggagtctgtccctcgacgcctcctgcgacgccagcccctgagcgatgatgcgaacgtgcgtcctactctccgcggtgctctggtgcctcacaggagacaaaatatatgtagagttacatcaaaatagtccagtccttatctgtatggattttaagctttctaaaaaagaaatagtggaccccacctacttatggattgggcctaatgaaaagacgttaacaggaaataatagaataaatataactgaaactggacagctgatggtgaaagattttttggagcctttgtctggactttacacatgtactctttcttataagactgttaaagcagaaactcaagaagaaaaaacagtcaaaaagagatatgactttatggtctttgcctatcgggaacctgattattcatatcagatggctgtacgttttaccacaaggtcttgtatagggagatacaatgatgtattctttagagtgctgaagaaaatcttggatagtctaatttctgatttgtcatgccatgtcatagagccatcatataaatgccattctgttgaaattccagaacatggcctcatacatgagctatttatagcatttcaagttaatccttttgcgccggggtggaaaggtgcttgcaatggatctgttgactgtgaagataccactaatcataatatcctccaggcaagagatcgaatagaagacttttttcggagccaagcatatattttctaccataactttaataaaactctaccagcaatgcattttgtggaccacagtttgcaagtagtacgtctggatagctgtcgaccaggctttggaaaaaatgaacgtctacacagtaattgcgctagctgttgtgtggtttgtagtcctgcgacttttagtcctgatgttaatgtaacttgtcagacctgcgtttccgtccttacctatggagctaaatcttgcccacaaacttcaaacaaaaatcagcaatatgaagattagaggtgaaagcattgttacttacttgtggaagtcggggacataagatgattttcacatcccagagcatcatagatagttccattaagtaaaatcagtaagaccaaaccactggaaaacatgcattttggaaactttaaaataaatggttaacatggcatttctaagaaggcatttaatccagtatctctagtgtacaaaggaaacttgaagttttaatggattatttttaatgaaatgttttattgtttacaaacggtatgttgctgtgtacctaagagtatagtaaggtcaagaagagtatcaaagtataataaaataaaaattgtatactctccataaaaaaat

SEQ ID NO: 59619 - DNA, 1162 bp, Homo sapiens
tgcgcgtccgctcccgccgttgcgacggacgggtaggggaggcgaccccggcgttctgctccgcactgtggaggaggtggggaggtgttgggccagggctgaggtaggagggagtctgtccctcgacgcctcctgcgacgccagcccctgagcgatgatgcgaacgtgcgtcctactctccgcggtgctctggtgcctcacaggagcctatcgggaacctgattattcatatcagatggctgtacgttttaccacaaggtcttgtatagggagatacaatgatgtattctttagagtgctgaagaaaatcttggatagtctaatttctgatttgtcatgccatgtcatagagccatcatataaatgccattctgttgaaattccagaacatggcctcatacatgagctatttatagcatttcaagttaatccttttgcgccggggtggaaaggtgcttgcaatggatctgttgactgtgaagataccactaatcataatatcctccaggcaagagatcgaatagaagacttttttcggagccaagcatatattttctaccataactttaataaaactctaccagcaatgcattttgtggaccacagtttgcaagtagtacgtctggatagctgtcgaccaggctttggaaaaaatgaacgtctacacagtaattgcgctagctgttgtgtggtttgtagtcctgcgacttttagtcctgatgttaatgtaacttgtcagacctgcgtttccgtccttacctatggagctaaatcttgcccacaaacttcaaacaaaaatcagcaatatgaagattagaggtgaaagcattgttacttacttgtggaagtcggggacataagatgattttcacatcccagagcatcatagatagttccattaagtaaaatcagtaagaccaaaccactggaaaacatgcattttggaaactttaaaataaatggttaacatggcatttctaagaaggcatttaatccagtatctctagtgtacaaaggaaacttgaagttttaatggattatttttaatgaaatgttttattgtttacaaacggtatgttgctgtgtacctaagagtatagtaaggtcaagaagagtatcaaagtataataaaataaaaattgtatactctccataaaaaaat

SEQ ID NO: 59620 - DNA, 1490 bp, Homo sapiens
aggaggctgaatacgggatggagggtatggagggaccgggtctgtcccctgtggagagttggagtgtgtgcaggtgatgtagagggagtctgtccctcgacgcctcctgcgacgccagcccctgagcgatgatgcgaacgtgcgtcctactctccgcggtgctctggtgcctcacaggagtccaatgcccgcgttttaccttattcaataagaagggcttcatttatggcaagacaggacagccagacaaaatatatgtagagttacatcaaaatagtccagtccttatctgtatggattttaagctttctaaaaaagaaatagtggaccccacctacttatggattgggcctaatgaaaagacgttaacaggaaataatagaataaatataactgaaactggacagctgatggtgaaagattttttggagcctttgtctggactttacacatgtactctttcttataagactgttaaagcagaaactcaagaagaaaaaacagtcaaaaagagatatgactttatggtctttgcctatcgggaacctgattattcatatcagatggctgtacgttttaccacaaggtcttgtatagggagatacaatgatgtattctttagagtgctgaagaaaatcttggatagtctaatttctgatttgtcatgccatgtcatagagccatcatataaatgccattctgttgaaattccagaacatggcctcatacatgagctatttatagcatttcaagttaatccttttgcgccggggtggaaaggtgcttgcaatggatctgttgactgtgaagataccactaatcataatatcctccaggcaagagatcgaatagaagacttttttcggagccaagcatatattttctaccataactttaataaaactctaccagcaatgcattttgtggaccacagtttgcaagtagtacgtctggatagctgtcgaccaggctttggaaaaaatgaacgtctacacagtaattgcgctagctgttgtgtggtttgtagtcctgcgacttttagtcctgatgttaatgtaacttgtcagacctgcgtttccgtccttacctatggagctaaatcttgcccacaaacttcaaacaaaaatcagcaatatgaagattagaggtgaaagcattgttacttacttgtggaagtcggggacataagatgattttcacatcccagagcatcatagatagttccattaagtaaaatcagtaagaccaaaccactggaaaacatgcattttggaaactttaaaataaatggttaacatggcatttctaagaaggcatttaatccagtatctctagtgtacaaaggaaacttgaagttttaatggattatttttaatgaaatgttttattgtttacaaacggtatgttgctgtgtacctaagagtatagtaaggtcaagaagagtatcaaagtataataaaataaaaattgtatactctccataaaaaaat

SEQ ID NO: 59621 - DNA, 202 bp, Homo sapiens
tgggaaactccatcaacccctgcttctcaaatccagacaggccacactggctagaacttccacccagcagtcctgctcctgcccgaagtctgcaagcaagtgcaaccacatgttgctatggaaagcacacagacaacagattagggcagacctggcaaagatatggcctgtctgccatcttcagcccctgtttgagggaggc

SEQ ID NO: 59622 - DNA, 170 bp, Homo sapiens
ctttttttggacacatttgtgtccaaacctactgaatcagaaaccttggggttagggtgtagtaatatgtagtttaacaagccctccaggtgattctgaaacataaagtggagaactcctactatactgaacatactttaggaattcctgttgccttctaaagcactatt

SEQ ID NO: 59623 - DNA, 341 bp, Homo sapiens
tttcagtgccagtgggtgggtgtcctgatgaattagataagacagtgtgtatgccatgcgattctcatttggaaagtgaacatgcttcccatcggtaccttccaattttggagaattaaaagtatttggattaaaaaaagtcagcaatgatcatttagtaaatcagtgtttccattttttactttgagcaaatgaaatatttattacaaattctcattgatttaagagtataaacaatatttaaatgtataaggaagaatgtaaagctgtaagaaaatgtattttcatttatttgaagaaatctctcccaacactggaatagagaagcagaaatctcttat

SEQ ID NO: 59624 - DNA, 369 bp, Homo sapiens
acacatgctatcaattgtttttcttctatctgtagacactaatcttactttctgcctcttccatctcaattgtcatcaacattttgcaaaaaaaggtcttatagtacacacattgttttgtacatagcttttttctcatcgaattttagtccttttatcatgttagtactcattatttcagctcatagtttatatcagccacctagcactccccaaggataatggctatggcatgatttaatcattcccctattgatgaacatttggatagatttaatttttttagctgttacaaataacacttcagtgaatattcttgtacctacacctttgctaatgtgtacaaagtattaccgcaagtggaaacac

SEQ ID NO: 59625 - DNA, 312 bp, Homo sapiens
atttttatgaatacataagaaagagttcagccataaactgtgatgttgacatccatgccaatatccataattactgttaataaaatataaagcacaaaacagatatgacaatataatacttcagttgtgcaggatatgcaacagacacaattcctaagtgctggtatgaggcaattaaatcatgcacttatgcaaaatgttagggaaaaaaattataattacagaattgcttgatgtacttttagtttgtattatgttttgtcagcttattagaaacacaagaaaaacagtcaatgaaaataatactagcag

SEQ ID NO: 59626 - DNA, 307 bp, Homo sapiens
tctaatcccaatctctttccaaatgagctaaggaagcactgttttttttcctgtatagcaaaatgagttcaagatattctttgcctaatttcagctctagctagaaccagtcaatatggaaataaacaatgagggtatctaatctactgaacactgaaccatcagcctaactctatgcaatatagtcatactaaaatatttctcataaaaaagttcttaacagtttgttcactatacaaagacaaaaatctggtagaaaacttaagaaaacatggagctaacatatttattatagcggattgaagtt

SEQ ID NO: 59627 - DNA, 188 bp, Homo sapiens
aaataaaaaataaggtccaagccaatgcctaacagataataagagctcagtaaatgttgattgaatactaacaaagtagtgaaagcagacgacacagtacctggcacactactaaactgtaaatgttttcaaatctgaatctgtagaattctgtaaggttttatgtaatatgatgtcattagctatta

SEQ ID NO: 59628 - DNA, 1152 bp, Homo sapiens
acctattgtttcataaaaggctgctttgtgcttgtatatggccaattctcttgaaaggttagtacattttattgatgtacacatgtaagtattataatatttgaacaactacttagacatcaaagcagtttcagatgttcaagggtttttcttttattcttgggtaaagcaacaagggaaaagggtttaatataaaaattgtataagttgagaatgaggtctgattggttaaaaggttaggggactgtatgaagcacattaaaggttaatgttcagtttaagtttgtgtctgtctgaatctgtcttaaagattgtacaggtaaaaaaatagacatagcaaatgttttactgtttgtacaaagaataattagtctatatttaaaaatggcattatttcatttttcaatgtttgggaaaaagactgcctttatggaaggagaaatgtggaatgtctgtcttcgtttgattattcttatttttaaaccatgtgcagtatcccttacatcaaaaagagatacaaagaaatgttttctattataagagtcatccaacatgaaataaactgcttttgctgagtttgttgctgttgttgttattgctgcagcagctgctgccgttttgtttaatcgcagattccatagagcataaccttctttcaggaatcatttttttagggattcctgtactggatagactactgaacaaaatcatcaaaatctctcctcccctacccagagtcagtgctaatcactagattatagtaaaatgatgaaagaaatttaaaaattatatatgtatatatgcctatatacatgtgcaacattggcagccctttatctctggtagaaccattttttcttctaagttttttggtggattaggtatatgaacctaatcctattttaattatgatagatgctattggtttaatttaatgcctttgcagagcaaaagaacatactgacattatattttcatctgatcctcactgccctctctctgctgtgggggatattttactggtccatgaaatccaagtctgggaaccactgaagtaagtgatctcaatggttatttcataatcattctatgtaaatctacccaattaacagattttgcaacggcttttaattgtatagagccaggacccta

SEQ ID NO: 59629 - DNA, 801 bp, Homo sapiens
cgatcccttcctgcctcagggtcccgggctcagcctcccgtccacgctccctgctcagcttcctttgccttgcagtgcgcgtcccgggacgactggcgctgtgcgcgctccatgcacgagttttccgccaaggacatcgacgggcacatggttaacctggacaagtaccggggcttcgtgtgcatcgtcaccaacgtggcctcccagtgaggcaagaccgaagtaaactacactcagctcgtcgacctgcacgcccgatacgctgagtgtggtttgcggatcctggccttcccgtgtaaccagttcgggaagcaggagccagggagtaacgaagagatcaaagagttcgccgcgggctacaacgtcaaattcgatatgttcagcaagatctgcgtgaacggggacgacgcccacccgctgtggaagtggatgaagatccaacccaagggcaagggcatcctgggaaatgccatcaagtggaacttcaccaagttcctcatcgacaagaacggctgcgtggtgaagcgctacggacccatggaggagcccctggtgatagagaaggacctgccccactatttctagctccacaagtgtgtggccccgcccgagcccctgcccacgcccttggagccttccaccggcactcatgacggcctgcctgcaaacctgctggtggggcagacccgaaaatccagcgtgcaccccgccggaggaaggtcccatggcctgctgggcttggctcggcgcccccacccctggctaccttgtgggaataaacagacaaattagcctgctgga

SEQ ID NO: 59630 - DNA, 1541 bp, Homo sapiens
agcgctctggagggcgtggccgtgggaaaggaggcgcggaaagccgacgcgcgtccattggtcggctggacgaggggaggagccgctggctcccagccccgccgcgatgagcctcggccgcctttgccgcctactgaagccggcgctgctctgtggggctctggccgcgcctggcctggccgggaccatgtgcgcgtcccgggacgactggcgctgtgcgcgctccatgcacgagttttccgccaaggacatcgacgggcacatggttaacctggacaagtaccggggcttcgtgtgcatcgtcaccaacgtggcctcccagtgaggcaagaccgaagtaaactacactcagctcgtcgacctgcacgcccgatacgctgagtgtggtttgcggatcctggccttcccgtgtaaccagttcgggaagcaggagccagggagtaacgaagagatcaaagagttcgccgcgggctacaacgtcaaattcgatatgttcagcaagatctgcgtgaacggggacgacgcccacccgctgtggaagtggatgaagatccaacccaagggcaagggcatcctgggaaatgccatcaagtggaacttcaccaagttcctcatcgacaagaacggctgcgtggtgaagcgctacggacccatggaggagcccctggtgatagagaaggacctgccccactatttctagctccacaagtgtgtggccccgcccgagcccctgcccacgcccttggagccttccaccggcactcatgacggcctgcctgcaaacctgctggtggggcagacccgaaaatccagcgtgcaccccgccggaggaaggtcccatggcctgctgggcttggctcggcgcccccacccctggctaccttgtgggaataaacagacaaattagcctgctggaaaaaaaaaaaaaaaaaaacaaaaaaaaaaaaaaaaaaacaccaaaaacacaaaaaaaaaaaaaaaaaaaaaaaaaaaaaacaaaaaaaaaaaaagggggagcgaacaacacaaccaaaagaggcacagaaaagccacaacaccaaacaacgcacacacaggagaacacaaagaagcacaaaaaagaaaagaagaagacccacagacacacacaacgcacggaaaacaagaaacagaaactaggcggcacaggaaaaagaggagaacacacacgaacacaacccacaaaaaaaaggaagacgagaaaaaaaacaaacaacaacagacggcaacaacgcagaccggagccgagaaaaatgcaaagcaaagagagaacaacaagcaccaagagacagaggagaccacaagagacgagagagagcacagccagaaaacaacaacaagagaagggagaaacaacagggaagcaggaagagacggaagaaacgagaagacggagcacaaacagaaaggacggaggggcaaacgaagacacgaaagcgacaagaaacacacagagccaggagagaaacagaaagaacgagaacgaagaagcagaagaaagaaaaaaaggagcgcgaggaaac

SEQ ID NO: 59631 - DNA, 938 bp, Homo sapiens
agcgctctggagggcgtggccgtgggaaaggaggcgcggaaagccgacgcgcgtccattggtcggctggacgaggggaggagccgctggctcccagccccgccgcgatgagcctcggccgcctttgccgcctactgaagccggcgctgctctgtggggctctggccgcgcctggcctggccgggaccatgtgcgcgtcccgggacgactggcgctgtgcgcgctccatgcacgagttttccgccaaggacatcgacgggcacatggttaacctggacaagtaccggggcttcgtgtgcatcgtcaccaacgtggcctcccagtgaggcaagaccgaagtaaactacactcagctcgtcgacctgcacgcccgatacgctgagtgtggtttgcggatcctggccttcccgtgtaaccagttcgggaagcaggagccagggagtaacgaagagatcaaagagttcgccgcgggctacaacgtcaaattcgatatgttcagcaagatctgcgtgaacggggacgacgcccacccgctgtggaagtggatgaagatccaacccaagggcaagggcatcctgggaaatgccatcaagtggaacttcaccaagtttggacaccgtctctccacagttcctcatcgacaagaacggctgcgtggtgaagcgctacggacccatggaggagcccctggtgatagagaaggacctgccccactatttctagctccacaagtgtgtggccccgcccgagcccctgcccacgcccttggagccttccaccggcactcatgacggcctgcctgcaaacctgctggtggggcagacccgaaaatccagcgtgcaccccgccggaggaaggtcccatggcctgctgggcttggctcggcgcccccacccctggctaccttgtgggaataaacagacaaattagcctgctgga

SEQ ID NO: 59632 - DNA, 855 bp, Homo sapiens
agcgctctggagggcgtggccgtgggaaaggaggcgcggaaagccgacgcgcgtccattggtcggctggacgaggggaggagccgctggctcccagccccgccgcgatgagcctcggccgcctttgccgcctactgaagccggcgctgctctgtggggctctggccgcgcctggcctggccgggaccatgtgcgcgtcccgggacgactggcgctgtgcgcgctccatgcacgagttttccgccaaggacatcgacgggcacatggttaacctggacaagtaccggggcttcgtgtgcatcgtcaccaacgtggcctcccagtgaggcaagaccgaagtaaactacactcagctcgtcgacctgcacgcccgatacgctgagtgtggtttgcggatcctggccttcccgtgtaaccagttcgggaagcaggagccagggagtaacgaagagatcaaagagttcgccgcgggctacaacgtcaaattcgatatgttcagcaagatctgcgtgaacggggacgacgcccacccgctgtggaagtggatgaagatccaacccaagggcaagggcatcctgggaaagtgatagagaaggacctgccccactatttctagctccacaagtgtgtggccccgcccgagcccctgcccacgcccttggagccttccaccggcactcatgacggcctgcctgcaaacctgctggtggggcagacccgaaaatccagcgtgcaccccgccggaggaaggtcccatggcctgctgggcttggctcggcgcccccacccctggctaccttgtgggaataaacagacaaattagcctgctggaaacaacaaaacacaaccaaaaaac

SEQ ID NO: 59633 - DNA, 534 bp, Homo sapiens
accagaactgatagacagctaaaggatattgcaagcatcattattggaattgggagattccacagaacaatctgagaatgatctcatatcaaatccaatcagatgagttattctgagactaattccaatagttctagagacttttttttttatggtggacattgtttttattgtgtaaataagcaatttttaaagtatatttaaagaaatgaaacataaggaagtgtataggctgtcaggtatgtggggaagtgaagttcatgtagttttcatgtggagcccctggtgatagagaaggacctgccccactatttctagctccacaagtgtgtggccccgcccgagcccctgcccacgcccttggagccttccaccggcactcatgacggcctgcctgcaaacctgctggtggggcagacccgaaaatccagcgtgcaccccgccggaggaaggtcccatggcctgctgggcttggctcggcgcccccacccctggctaccttgtgggaataaacagacaaattagcctgctgga

SEQ ID NO: 59634 - DNA, 229 bp, Homo sapiens
tttgaagaaagactaatcgaaccatctagtagctggtgagcccctgcccacgcccttggagccttccaccggcactcatgacggcctgcctgcaaacctgctggtggggcagacccgaaaatccagcgtgcaccccgccggaggaaggtcccatggcctgctgggcttggctcggcgcccccacccctggctaccttgtgggaataaacagacaaattagcctgctgga

SEQ ID NO: 59635 - DNA, 239 bp, Homo sapiens
attcgaccgcgcatctcggtcgaatggttaacctggacaagtaccggggcttcgtgtgcatcgtcaccaacgtggcctcccagtgaggcaagaccgaagtaaactacactcagctcgtcgacctgcacgcccgatacgctgagtgtggtttgcggatcctggccttcccgtgtaaccagttcgggaagcaggagccagggataacgaagagatctacattcgagcgcgagattcaccgc

SEQ ID NO: 59636 - DNA, 149 bp, Homo sapiens
gccagattttggtaacagagtgatgttggactagtttaaaatccagcgtgcaccccgccggaggaaggtcccatggcctgctgggcttggctcggcgcccccacccctggctaccttgtgggaataaacagacaaattagcctgctgga

SEQ ID NO: 59637 - DNA, 1455 bp, Homo sapiens
ggcgtggggaaccctcaggctccagtgaccttggtggggggcgtctgggggctccccctccccacccccggccgggcacggacgcgggtgaccgtactgcgacgcgctccgcggccctccaggccgttgtaggcgcgcgggctggggtcggggaaggggaaggggttgttccacgcgcgcgggtcgtggtcggggaaggggccgtccaggccgttgcaggcgcgcgtgccggggccggggtcgggggtccaggcttgcagggggcggggtccgggacggctggggcggagctggaccgttgagggccacggcggggcgtctccgggccgagcggggctgctgcgcccgagcggttgggggcgcggagggctggaaatcccggatcacgcgcccccgggcgccgccccgcccccgcaccttggcctagcgcggtggcgtcacagtcgcgcagtcctgactacggcctccgggccctttgtccccgctagcggcgctcggggtgggggagccaggaggggcgggagacgggcgggtatgggccgcgcgggcgcaggctcccccgggcgccgcaggcagcggtgccagagccggggcaggcggcggccgcgagcccctcggcggcggaaggccccagcgtgcaggcgcaggagggcgcggcgccggcggaagaagccctgtccccgcagcttgcgaccggagatccacgaatgtcccaagtcccaggacccgtgcgcgtcccgggacgactggcgctgtgcgcgctccatgcacgagttttccgccaaggacatcgacgggcacatggttaacctggacaagtaccggggcttcgtgtgcatcgtcaccaacgtggcctcccagtgaggcaagaccgaagtaaactacactcagctcgtcgacctgcacgcccgatacgctgagtgtggtttgcggatcctggccttcccgtgtaaccagttcgggaagcaggagccagggagtaacgaagagatcaaagagttcgccgcgggctacaacgtcaaattcgatatgttcagcaagatctgcgtgaacggggacgacgcccacccgctgtggaagtggatgaagatccaacccaagggcaagggcatcctgggaaatgccatcaagtggaacttcaccaagttcctcatcgacaagaacggctgcgtggtgaagcgctacggacccatggaggagcccctggtgatagagaaggacctgccccactatttctagctccacaagtgtgtggccccgcccgagcccctgcccacgcccttggagccttccaccggcactcatgacggcctgcctgcaaacctgctggtggggcagacccgaaaatccagcgtgcaccccgccggaggaaggtcccatggcctgctgggcttggctcggcgcccccacccctggctaccttgtgggaataaacagacaaattagcctgctgga

SEQ ID NO: 59638 - DNA, 708 bp, Homo sapiens
  misc_feature (3)..(3): n is a, c, g, or t
  misc_feature (36)..(36): n is a, c, g, or t
  misc_feature (47)..(47): n is a, c, g, or t
  misc_feature (58)..(58): n is a, c, g, or t
  misc_feature (76)..(76): n is a, c, g, or t
aantgaatctattccgtggagcgcgcacagcgccantcgtcccgggncgggcacatgnttaacctggacaagtacnggggcttcgtgtgcatcgtcaccaacgtggcctcccagtgaggcaagaccgaagtaaactacactcagctcgtcgacctgcacgcccgatacgctgagtgtggtttgcggatcctggccttcccgtgtaaccagttcgggaagcaggagccagggagtaacgaagagatcaaagagttcgccgcgggctacaacgtcaaattcgatatgttcagcaagatctgcgtgaacggggacgacgcccacccgctgtggaagtggatgaagatccaacccaagggcaagggcatcctgggaaatgccatcaagtggaacttcaccaagttcctcatcgacaagaacggctgcgtggtgaagcgctacggacccatggaggagcccctggtgatagagaaggacctgccccactatttctagctccacaagtgtgtggccccgcccgagcccctgcccacgcccttggagccttccaccggcactcatgacggcctgcctgcaaacctgctggtggggcagacccgaaaatccagcgtgcaccccgccggaggaaggtcccatggcctgctgggcttggctcggcgcccccacccctggctaccttgtgggaataaacagacaaattagcctgctgga

SEQ ID NO: 59639 - DNA, 677 bp, Homo sapiens
  misc_feature (37)..(37): n is a, c, g, or t
  misc_feature (61)..(61): n is a, c, g, or t
  misc_feature (64)..(64): n is a, c, g, or t
  misc_feature (76)..(76): n is a, c, g, or t
  misc_feature (80)..(80): n is a, c, g, or t
  misc_feature (96)..(96): n is a, c, g, or t
  misc_feature (111)..(111): n is a, c, g, or t
caccatggttcaaccttgtcacaagtgaccggccccncccccgcccccctccccccacacnctncccctccccacnccangccaaccaccgcacantcccacgagactcgnggctcgtcgacctgcacgcccgatacgctgagtgtggtttgcggatcctggccttcccgtgtaaccagttcgggaagcaggagccagggagtaacgaagagatcaaagagttcgccgcgggctacaacgtcaaattcgatatgttcagcaagatctgcgtgaacggggacgacgcccacccgctgtggaagtggatgaagatccaacccaagggcaagggcatcctgggaaatgccatcaagtggaacttcaccaagttcctcatcgacaagaacggctgcgtggtgaagcgctacggacccatggaggagcccctggtgatagagaaggacctgccccactatttctagctccacaagtgtgtggccccgcccgagcccctgcccacgcccttggagccttccaccggcactcatgacggcctgcctgcaaacctgctggtggggcagacccgaaaatccagcgtgcaccccgccggaggaaggtcccatggcctgctgggcttggctcggcgcccccacccctggctaccttgtgggaataaacagacaaattagcctgctgga

SEQ ID NO: 59640 - DNA, 1580 bp, Homo sapiens
agcgctctggagggcgtggccgtgggaaaggaggcgcggaaagccgacgcgcgtccattggtcggctggacgaggggaggagccgctggctcccagccccgccgcgatgagcctcggccgcctttgccgcctactgaagccggcgctgctctgtggggctctggccgcgcctggcctggccgggaccatgtgcgcgtcccgggacgactggcgctgtgcgcgctccatgcacgagttttccgccaaggacatcgacgggcacatggttaacctggacaagtaccggggcttcgtgtgcatcgtcaccaacgtggcctcccagtgaggcaagaccgaagtaaactacactcagctcgtcgacctgcacgcccgatacgctgagtgtggtttgcggatcctggccttcccgtgtaaccagttcgggaagcaggagccagggagtaacgaagagatcaaagagttcgccgcgggctacaacgtcaaattcgatatgttcagcaagatctgcgtgaacggggacgacgcccacccgctgtggaagtggatgaagatccaacccaagggcaagggcatcctgggaaatgccatcaagtggaacttcaccaagttcctcatcgacaagaacggctgcgtggtgaagcgctacggacccatggaggagcccctggtgatagagaaggacctgccccactatttctagctccacaagtgtgtggccccgcccgagcccctgcccacgcccttggagccttccaccggcactcatgacggcctgcctgcaaacctgctggtggggcagacccgaaaatccagcgtgcaccccgccggaggaaggtcccatggcctgctgggcttggctcggcgcccccacccctggctaccttgtgggaataaacagacaaattagcctgctggaacacacaccacaaaaagggacgaacagaacaaaaagatatcctcgaagtggggcacagcatacccccgataacccacacaacagaggaacacacgtgcaccatacaagcgaacagcaccaacacaccaagaactgagccgaagaaaaaaaacaacaaaaaatgcagaaaataggaacgcacgccgaaaccacacgaaacacgcaccaccaaccaccaggcagaacgcacaacacccggacaaaagcacacacaacagaccaatacacagcccaaacggcacacccacccaccccaacgaagcacacacagcatgcacagccacccacaccacgcacacacccacaaaacacggcaccaagcgcaacaaaacacacacacacaactacacaccagcaacaacacgccacaagacacagaaacaaaacacaaaaaagacaacaagcagaaacaaaaaccgaggaagaagaacaaaagaagagcgcattacacaggccgatccaccgaagacacacaaagcactaaggcaacaaacaacaacaagaaccaccgacccccacacgagaaagaagaacggagaaaggacagacaaaaggggaaacgagaaaacacaacatctctcagcccacttcgcataaagacgcgcagacgaacccgaccagacaa

SEQ ID NO: 59641 - DNA, 938 bp, Homo sapiens
agcgctctggagggcgtggccgtgggaaaggaggcgcggaaagccgacgcgcgtccattggtcggctggacgaggggaggagccgctggctcccagccccgccgcgatgagcctcggccgcctttgccgcctactgaagccggcgctgctctgtggggctctggccgcgcctggcctggccgggaccatgtgcgcgtcccgggacgactggcgctgtgcgcgctccatgcacgagttttccgccaaggacatcgacgggcacatggttaacctggacaagtaccggggcttcgtgtgcatcgtcaccaacgtggcctcccagtgaggcaagaccgaagtaaactacactcagctcgtcgacctgcacgcccgatacgctgagtgtggtttgcggatcctggccttcccgtgtaaccagttcgggaagcaggagccagggagtaacgaagagatcaaagagttcgccgcgggctacaacgtcaaattcgatatgttcagcaagatctgcgtgaacggggacgacgcccacccgctgtggaagtggatgaagatccaacccaagggcaagggcatcctgggaaatgccatcaagtggaacttcaccaagttcctcatcgacaagaacggctgcgtggtgaagcgctacggacccatggaggagcccctggtgatagagaaggacctgccccactatttctagctccacaagtgtgtggccccgcccacaaccctgggttgtgggcgcgcctgcagaggatcaagacagcacgtggacctcgcacagcctctcccacaggtaccatgaaggtctccgcggcagccctcgctgtcatcctcattgctactgccctctgcgctcccgcatctgcctccccatattcctcggacaccaaaccctgctgctttgcctacattgcccgcccactgcccgcgcccac

SEQ ID NO: 59642 - DNA, 883 bp, Homo sapiens
agcgctctggagggcgtggccgtgggaaaggaggcgcggaaagccgacgcgcgtccattggtcggctggacgaggggaggagccgctggctcccagccccgccgcgatgagcctcggccgcctttgccgcctactgaagccggcgctgctctgtggggctctggccgcgcctggcctggccgggaccatgtgcgcgtcccgggacgactggcgctgtgcgcgctccatgcacgagttttccgccaaggacatcgacgggcacatggttaacctggacaagtaccggggcttcgtgtgcatcgtcaccaacgtggcctcccagtgaggcaagaccgaagtaaactacactcagctcgtcgacctgcacgcccgatacgctgagtgtggtttgcggatcctggccttcccgtgtaaccagttcgggaagcaggagccagggagtaacgaagagatcaaagagttcgccgcgggctacaacgtcaaattcgatatgttcagcaagatctgcgtgaacggggacgacgcccacccgctgtggaagtggatgaagatccaacccaagggcaagggcatcctgggaaatgccatcaagtggaacttcaccaagttcctcatcgacaagaacggctgcgtggtgaagcgctacggacccatggaggagcccctgctccacaagtgtgtggccccgcccgagcccctgcccacgcccttggagccttccaccggcactcatgacggcctgcctgcaaacctgctggtggggcagacccgaaaatccagcgtgcaccccgccggaggaaggtcccatggcctgctgggcttggctcggcgcccccacccctggctaccttgtgggaataaacagacaaattagcctgctgga

SEQ ID NO: 59643 - DNA, 977 bp, Homo sapiens
agcgctctggagggcgtggccgtgggaaaggaggcgcggaaagccgacgcgcgtccattggtcggctggacgaggggaggagccgctggctcccagccccgccgcgatgagcctcggccgcctttgccgcctactgaagccggcgctgctctgtggggctctggccgcgcctggcctggccgggaccatgtgcgcgtcccgggacgactggcgctgtgcgcgctccatgcacgagttttccgccaaggacatcgacgggcacatggttaacctggacaagtaccggggcttcgtgtgcatcgtcaccaacgtggcctcccagtgaggcaagaccgaagtaaactacactcagctcgtcgacctgcacgcccgatacgctgagtgtggtttgcggatcctggccttcccgtgtaaccagttcgggaagcaggagccagggagtaacgaagagatcaaagagttcgccgcgggctacaacgtcaaattcgatatgttcagcaagatctgcgtgaacggggacgacgcccacccgctgtggaagtggatgaagatccaacccaagggcaagggcatcctgggaaagacagcttggggactgtggggggctgctggggacgctcacgtccatgtgcttcttttccagtgccatcaagtggaacttcaccaagttcctcatcgacaagaacggctgcgtggtgaagcgctacggacccatggaggagcccctggtgatagagaaggacctgccccactatttctagctccacaagtgtgtggccccgcccgagcccctgcccacgcccttggagccttccaccggcactcatgacggcctgcctgcaaacctgctggtggggcagacccgaaaatccagcgtgcaccccgccggaggaaggtcccatggcctgctgggcttggctcggcgcccccacccctggctaccttgtgggaataaacagacaaattagcctgctgga

SEQ ID NO: 59644 - DNA, 859 bp, Homo sapiens
agcgctctggagggcgtggccgtgggaaaggaggcgcggaaagccgacgcgcgtccattggtcggctggacgaggggaggagccgctggctcccagccccgccgcgatgagcctcggccgcctttgccgcctactgaagccggcgctgctctgtggggctctggccgcgcctggcctggccgggaccatgtgcgcgtcccgggacgactggcgctgtgcgcgctccatgcacgagttttccgccaaggacatcgacgggcacatggttaacctggacaagtaccggggcttcgtgtgcatcgtcaccaacgtggcctcccagtgaggcaagaccgaagtaaactacactcagctcgtcgacctgcacgcccgatacgctgagtgtggtttgcggatcctggccttcccgtgtaaccagttcgggaagcaggagccagggagtaacgaagagatcaaagagttcgccgcgggctacaacgtcaaattcgatatgttcagcaagatctgcgtgaacggggacgacgcccacccgctgtggaagtggatgaagatccaacccaagggcaagggcatcctgggaaatgccatcaagtggaacttcaccaagttcctcatcgacaagaacggctgcgtggtgaagcgctacggacccatggaggagcccctggagcccctgcccacgcccttggagccttccaccggcactcatgacggcctgcctgcaaacctgctggtggggcagacccgaaaatccagcgtgcaccccgccggaggaaggtcccatggcctgctgggcttggctcggcgcccccacccctggctaccttgtgggaataaacagacaaattagcctgctgga

SEQ ID NO: 59645 - DNA, 916 bp, Homo sapiens
agcgctctggagggcgtggccgtgggaaaggaggcgcggaaagccgacgcgcgtccattggtcggctggacgaggggaggagccgctggctcccagccccgccgcgatgagcctcggccgcctttgccgcctactgaagccggcgctgctctgtggggctctggccgcgcctggcctggccgggaccatgtgcgcgtcccgggacgactggcgctgtgcgcgctccatgcacgagttttccgccaaggacatcgacgggcacatggttaacctggacaagtaccggggcttcgtgtgcatcgtcaccaacgtggcctcccagtgaggcaagaccgaagtaaactacactcagctcgtcgacctgcacgcccgatacgctgagtgtggtttgcggatcctggccttcccgtgtaaccagttcgggaagcaggagccagggagtaacgaagagatcaaagagttcgccgcgggctacaacgtcaaattcgatatgttcagcaagatctgcgtgaacggggacgacgcccacccgctgtggaagtggatgaagatccaacccaagggcaagggcatcctgggaaatgccatcaagtggaacttcaccaagttcctcatcgacaagaacggctgcgtggtgaagcgctacggacccatggaggagcccctggtgatagagaaggacctgccccactatttctagctccacaagtgtgtggccccgcccgagcccctgcccacgcccttggagccttccaccggcactcatgacggcctgcctgcaaacctgctggtggggcagacccgaaaatccagcgtgcaccccgccggaggaaggtcccatggcctgctgggcttggctcggcgcccccacccctggctaccttgtgggaataaacagacaaattagcctgctgga

SEQ ID NO: 59646 - DNA, 1036 bp, Homo sapiens
agcgctctggagggcgtggccgtgggaaaggaggcgcggaaagccgacgcgcgtccattggtcggctggacgaggggaggagccgctggctcccagccccgccgcgatgagcctcggccgcctttgccgcctactgaagccggcgctgctctgtggggctctggccgcgcctggcctggccgggaccatgtgcgcgtcccgggacgactggcgctgtgcgcgctccatgcacgagttttccgccaaggacatcgacgggcacatggttaacctggacaagtaccggggcttcgtgtgcatcgtcaccaacgtggcctcccagtgaggcaagaccgaagtaaactacactcagctcgtcgacctgcacgcccgatacgctgagtgtggtttgcggatcctggccttcccgtgtaaccagttcgggaagcaggagccagggagtaacgaagagatcaaagagttcgccgcgggctacaacgtcaaattcgatatgttcagcaagatctgcgtgaacggggacgacgcccacccgctgtggaagtggatgaagatccaacccaagggcaagggcatcctgggaaatgccatcaagtggaacttcaccaagttcctcatcgacaagaacggctgcgtggtgaagcgctacggacccatggaggagcccctggtgatagagaaggacctgccccactatttctagctccacaagtgtgtggccccgcccgagcccctgcccacgcccttggagccttccaccggcactcatgacggcctgcctgcaaacctgctggtggggcagacccgaaaatccagcgtgcaccccgccggaggaaggtcccatggcctgctgggcttggtcgggccccacctggtactgtgggataacgacatgaaaaaaaaacaacacaaaaaaaaaggcggcgcccggaagtaactgggggaatagaatggaaggtagaggggaaggggtgacaaaccggggggacaaggtgtgtacgtaccccgaggtgagaaagatgaagtggaaaggcggcac

SEQ ID NO: 59647 - DNA, 620 bp, Homo sapiens
ctgggagtgtgcagggggcccggactgagggggtgccagcccccgactcactcacacaccttggccgccacaggagccagggagtaacgaagagatcaaagagttcgccgcgggctacaacgtcaaattcgatatgttcagcaagatctgcgtgaacggggacgacgcccacccgctgtggaagtggatgaagatccaacccaagggcaagggcatcctgggaaagacagcttggggactgtggggggctgctggggacgctcacgtccatgtgcttcttttccagtgccatcaagtggaacttcaccaagttcctcatcgacaagaacggctgcgtggtgaagcgctacggacccatggaggagcccctggtgatagagaaggacctgccccactatttctagctccacaagtgtgtggccccgcccgagcccctgcccacgcccttggagccttccaccggcactcatgacggcctgcctgcaaacctgctggtggggcagacccgaaaatccagcgtgcaccccgccggaggaaggtcccatggcctgctgggcttggctcggcgcccccacccctggctaccttgtgggaataaacagacaaattagcctgctgga

SEQ ID NO: 59648 - DNA, 1194 bp, Homo sapiens
cgtgacgcgtgggtcgacccacgcgtacgcaggacgcgatgggtgagccagggagtaacgaagagatcaaagagttcgccgcgggctacaacgtcaaattcgatatgttcagcaagatctgcgtgaacggggacgacgcccacccgctgtggaagtggatgaagatccaacccaagggcaagggcatcctgggaaatgccatcaagtggaacttcaccaagttcctcatcgacaagaacggctgcgtggtgaagcgctacggacccatggaggagcccctggtgatagagaaggacctgccccactatttctagctccacaagtgtgtggccccgcccgagcccctgcccacgcccttggagccttccaccggcactcatgacggcctgcctgcaaacctgctggtggggcagacccgaaaatccagcgtgcaccccgccggaggaaggtcccatggcctgctgggcttggctcggcgcccccacccctggctaccttgtgggaataaacagacaaattagcctgctggaacacacaccacaaaaagggacgaacagaacaaaaagatatcctcgaagtggggcacagcatacccccgataacccacacaacagaggaacacacgtgcaccatacaagcgaacagcaccaacacaccaagaactgagccgaagaaaaaaaacaacaaaaaatgcagaaaataggaacgcacgccgaaaccacacgaaacacgcaccaccaaccaccaggcagaacgcacaacacccggacaaaagcacacacaacagaccaatacacagcccaaacggcacacccacccaccccaacgaagcacacacagcatgcacagccacccacaccacgcacacacccacaaaacacggcaccaagcgcaacaaaacacacacacacaactacacaccagcaacaacacgccacaagacacagaaacaaaacacaaaaaagacaacaagcagaaacaaaaaccgaggaagaagaacaaaagaagagcgcattacacaggccgatccaccgaagacacacaaagcactaaggcaacaaacaacaacaagaaccaccgacccccacacgagaaagaagaacggagaaaggacagacaaaaggggaaacgagaaaacacaacatctctcagcccacttcgcataaagacgcgcagacgaacccgaccagacaa

SEQ ID NO: 59649 - DNA, 958 bp, Homo sapiens
agcgctctggagggcgtggccgtgggaaaggaggcgcggaaagccgacgcgcgtccattggtcggctggacgaggggaggagccgctggctcccagccccgccgcgatgagcctcggccgcctttgccgcctactgaagccggcgctgctctgtggggctctggccgcgcctggcctggccgggaccatgtgcgcgtcccgggacgactggcgctgtgcgcgctccatgcacgagttttccgccaaggacatcgacgggcacatggttaacctggacaagtaccggggcttcgtgtgcatcgtcaccaacgtggcctcccagtgaggcaagaccgaagtaaactacactcagctcgtcgacctgcacgcccgatacgctgagtgtggtttgcggatcctggccttcccgtgtaaccagttcgggaagcaggagccagggagtaacgaagagatcaaagagttcgccgcgggctacaacgtcaaattcgatatgttcagcaagatctgcgtgaacggggacgacgcccacccgctgtggaagtggatgaagatccaacccaagggcaagggcatcctgggaaatgccatcaagtggaacttcaccaagttcctcatcgacaagaacggctgcgtggtgaagcgctacggacccatggaggagcccctggtgatagagaaggacctgccccactatttctagctccacaagtgtgtggccccgcccgagcccctgcccacgcccttggagccttccaccggcactcatgacggcctgcctgcaaacctgctggtggggcagacccgaaaatccagcgtgcaccccgccggaggaaggtcccatggcctgctgggcttggctcggcgcccccacccctggctaccttgtgggaataaacagacaaattagcctgctggaaaaaataaaaaaataaaaaactcgagactagttctctctctc

SEQ ID NO: 59650 - DNA, 865 bp, Homo sapiens
agcgctctggagggcgtggccgtgggaaaggaggcgcggaaagccgacgcgcgtccattggtcggctggacgaggggaggagccgctggctcccagccccgccgcgatgagcctcggccgcctttgccgcctactgaagccggcgctgctctgtggggctctggccgcgcctggcctggccgggaccatgtgcgcgtcccgggacgactggcgctgtgcgcgctccatgcacgagttttccgccaaggacatcgacgggcacatggttaacctggacaagtaccggggcttcgtgtgcatcgtcaccaacgtggcctcccagtgaggcaagaccgaagtaaactacactcagctcgtcgacctgcacgcccgatacgctgagtgtggtttgcggatcctggccttcccgtgtaaccagttcgggaagcaggagccagggagtaacgaagagatcaaagagttcgccgcgggctacaacgtcaaattcgatatgttcagcaagatctgcgtgaacggggacgacgcccacccgctgtggaagtggatgaagatccaacccaagggcaagggcatcctgggaaatgccatcaagtggaacttcaccaagttcctcatcgacaagaacggctgcgtggtgaagcgctacggacccatggaggagcccctggtgatagagaaggacctgccccactatttctagctccacaagtgtgtggccccgcccgagcccctgcccacgcccttggagccttccaccggcactcatgacggcctgcctgcaaacctgctggtggggcagacccgggctcggcgcccccacccctggctaccttgtgggaataaacagacaaattagcctgctgga

SEQ ID NO: 59651 - DNA, 1349 bp, Homo sapiens
agcgctctggagggcgtggccgtgggaaaggaggcgcggaaagccgacgcgcgtccattggtcggctggacgaggggaggagccgctggctcccagccccgccgcgatgagcctcggccgcctttgccgcctactgaagccggcgctgctctgtggggctctggccgcgcctggcctggccgggaccatgtgcgcgtcccgggacgactggcgctgtgcgcgctccatgcacgagttttccgccaaggacatcgacgggcacatggttaacctggacaagtaccggggcttcgtgtgcatcgtcaccaacgtggcctcccagtgaggcaagaccgaagtaaactacactcagctcgtcgacctgcacgcccgatacgctgagtgtggtttgcggatcctggccttcccgtgtaaccagttcgggaagcaggagccagggagtaacgaagagatcaaagagttcgccgcgggctacaacgtcaaattcgatatgttcagcaagatctgcgtgaacggggacgacgcccacccgctgtggaagtggatgaagatccaacccaagggcaagggcatcctgggaaaagtgcgtgacctctggggacagtacggctgctggggtgggggtgggggggctgctgggatgctcacacctccctggggcagaatggctcatggctcggggggcggttgcggggaggtgctgggactctcacatcgcgtggcctcctgggggtaagatggctcagggggacatagagggctgtggaggcagccagggatgcccacacctttgtggcctcctggggacaggatggctcgggggcctgtggggggctgttgggactctcacactgcatggcctcctggggtaagatggctctgggggggcttgggggcactgtggctgtggaggcagccggggaagctcacacccttgtggcctcctggagacaggacagcttggggactgtggggggctgctggggacgctcacgtccatgtgcttcttttccagtgccatcaagtggaacttcaccaagttcctcatcgacaagaacggctgcgtggtgaagcgctacggacccatggaggagcccctggtgatagagaaggacctgccccactatttctagctccacaagtgtgtggccccgcccgagcccctgcccacgcccttggagccttccaccggcactcatgacggcctgcctgcaaacctgctggtggggcagacccgaaaatccagcgtgcaccccgccggaggaaggtcccatggcctgctgggcttggctcggcgcccccacccctggctaccttgtgggaataaacagacaaattagcctgctgga

SEQ ID NO: 59652 - DNA, 1482 bp, Homo sapiens
agcgctctggagggcgtggccgtgggaaaggaggcgcggaaagccgacgcgcgtccattggtcggctggacgaggggaggagccgctggctcccagccccgccgcgatgagcctcggccgcctttgccgcctactgaagccggcgctgctctgtggggctctggccgcgcctggcctggccgggaccatgtgcgcgtcccgggacgactggcgctgtgcgcgctccatgcacgagttttccgccaaggacatcgacgggcacatggttaacctggacaagtaccggggcttcgtgtgcatcgtcaccaacgtggcctcccagtgaggcaagaccgaagtaaactacactcagctcgtcgacctgcacgcccgatacgctgagtgtggtttgcggatcctggccttcccgtgtaaccagttcgggaagcaggagccagggagtaacgaagagatcaaagagttcgccgcgggctacaacgtcaaattcgatatgttcagcaagatctgcgtgaacggggacgacgcccacccgctgtggaagtggatgaagatccaacccaagggcaagggcatcctgggaaaagtgcgtgacctctggggacagtacggctgctggggtgggggtgggggggctgctgggatgctcacacctccctggggcagaatggctcatggctcggggggcggttgcggggaggtgctgggactctcacatcgcgtggcctcctgggggtaagatggctcagggggacatagagggctgtggaggcagccagggatgcccacacctttgtggcctcctggggacaggatggctcgggggcctgtggggggctgttgggactctcacactgcatggcctcctggggtaagatggctctgggggggcttgggggcactgtggctgtggaggcagccggggaagctcacacccttgtggcctcctggagacaggacagcttggggactgtggggggctgctggggacgctcacgtccatgtgcttcttttccagtgccatcaagtggaacttcaccaaggtaagggggctgtggggggtaggggaccagcttcccctggccacagccgtggcccagatgggcagcggacaggaagggcagcctcagccccttgcaggggtggccccacagtttggacaccgtctctccacagttcctcatcgacaagaacggctgcgtggtgaagcgctacggacccatggaggagcccctggtgatagagaaggacctgccccactatttctagctccacaagtgtgtggccccgcccgagcccctgcccacgcccttggagccttccaccggcactcatgacggcctgcctgcaaacctgctggtggggcagacccgaaaatccagcgtgcaccccgccggaggaaggtcccatggcctgctgggcttggctcggcgcccccacccctggctaccttgtgggaataaacagacaaattagcctgctgga

SEQ ID NO: 59653 - DNA, 891 bp, Homo sapiens
agcgctctggagggcgtggccgtgggaaaggaggcgcggaaagccgacgcgcgtccattggtcggctggacgaggggaggagccgctggctcccagccccgccgcgatgagcctcggccgcctttgccgcctactgaagccggcgctgctctgtggggctctggccgcgcctggcctggccgggaccatgtgcgcgtcccgggacgactggcgctgtgcgcgctccatgcacgagttttccgccaaggacatcgacgggcacatggttaacctggacaagtaccggggcttcgtgtgcatcgtcaccaacgtggcctcccagtgaggcaagaccgaagtaaactacactcagctcgtcgacctgcacgcccgatacgctgagtgtggtttgcggatcctggccttcccgtgtaaccagttcgggaagcaggagccagggagtaacgaagagatcaaagagttcgccgcgggctacaacgtcaaattcgatatgttcagcaagatctgcgtgaacggggacgacgcccacccgctgtggaagtggatgaagatccaacccaagggcaagggcatcctgggaaattcctcatcgacaagaacggctgcgtggtgaagcgctacggacccatggaggagcccctggtgatagagaaggacctgccccactatttctagctccacaagtgtgtggccccgcccgagcccctgcccacgcccttggagccttccaccggcactcatgacggcctgcctgcaaacctgctggtggggcagacccgaaaatccagcgtgcaccccgccggaggaaggtcccatggcctgctgggcttggctcggcgcccccacccctggctaccttgtgggaataaacagacaaattagcctgctgga

SEQ ID NO: 59654 - DNA, 661 bp, Homo sapiens
gcgatccaaccacctcagcctccagagtatctgggactacacatgcatgccaccacacctagatatttttgaataaatgaatgacaagaatgagcaaaccttgtcttgggccccagtgtgctgtgtagagcagagaagaagtgtcaggagccctctgtatagacaagggtagagagaagctcaggaggtccttagcagcaccctgtgggagagcagggaaggccacaggaaacctgacccctaagacctgggtccgggactcaagagaatggaaatggagaggaaccaagaggaagcacagactggtagtgggcaccctgtcattggagctatgtgaggcgataaggtttggctgtgtccccacccaaatctcatcttgaattgtagttcccataatccccacgtgtcatgggagggacccgatgggaggtaattgaatcgtgggagcggtttcccccatgctattcctgtgatactgagtcagttctcacaagatctgatggttttataaggggctttttcctttttgctgggcacttcttgctgccgccatggaagaaggatatgtttgctcccccttctgccacgattgtaaatttcctgaggccttcccggccctgccaaacttggtcaattaaacctctttcctttataaattacc

SEQ ID NO: 59655 - DNA, 2275 bp, Homo sapiens
tttttgatgttctttcacccttttctgtttgctaagtgaggatgaaaaaataacactgtactgcaataaggggagagtaaccctgtctaatgaaacctgtgtctctgagagtagagtcactggaacactaatgaggaaactgcactgttttattttaattcagttgttagtgtgtcttagtgtgtgcaattttttttcttactaatatccatggtttgcaggttctgttaggccctttccttctccttacttcttatccccaactccctacccacccctcttcagttttcagattggagattcaagatttgttccactttacaagcaagaggaaaaaaaagcaaccttcaaactaattctccatgggggctctccatgttaccctccactccttggcccaaacctctgatggagatagacattgttggagaagtgggctgccttccccaagtggggcactgcttaagcacttattcagtggagaacacaggtgaaaagcaactcaggatgagggtggtggagagggcaggggcagatgtgcagtcagagaaggactcctgaagttactgctgctcagaaaaacagttcctttaatgtggaagagccatttcataggtcataggtggtatggtatatttctttcagagtcaaccttgggccctgagaagtatgtcctcctggtgtgctcaggctcaacggcagtctggtggctgaaggcacttggcctcctaaaccaagcagaattttgggaagagataacagccagggagatattgcccatgattctcactttttctttgcctggcatctaagcaggaacccattgtggagtagactctcttcttctatggagcctctgacatggggagcaatgctaagcaagctaagtgtaaaagaaaagtgacagaataattttggaagaggaagcctcatcaaaagctcacacaaaatagagcttcccatggtgtgccctatcctaggtttaagaaaacacgtatgaagtttatgctgatgcaaagaacttgggtttttatgttaatataaagtgttgttttagcatgtggccagatgatgctctgtcatctttagaaagtgagataaccaaggaaataattgaaggagtatagggagatggattaagttgataatgacatttagggcaacttaagacctttgatcccaggttctaactcaaagaggctgaccttcccccagctaagatagcatgaggacgttgtattccaatatacgtatgattggggctacaaagctgaactaaagcaagattggtgaagtggcagggtttatagagagaagcccaggctgagttcagcttttgttggaagtgagaatccctgacatatagctttcttggagatcccaactctcattcttggtgcaactggcttccagctctccagcagtcactctcctaggtgcatgattcagtgcgtgccatgtgtcattagcttttactgataaccatattctggcttgttcccttaccccctacttctatccaattttctctgctaggggttatcattagcaattgacatgctaaaggttttggagcccacctaggggtaggtgcagctttattggcttttctgtggattctctcagtggacccacaccatctctatgtctctccactctcctgccttcagccatagcaaagaatccttccaaaatcaaactcttcacttttttgactcaagtgttgttgttcagtctctcgcgtgtcaatgtggtcatggttcatgaaaccggaccctcaagatggatgattgcttttaactactgccagctgatgtctctcagcccctgccctcatacaagatttttctcagccttcagcctaccactgcagaatccgatgtgacccaccattagggagtctgcatcttggaagagttggaaataaccctttaacatcaacatgcttcaaagactttttgcctttggcctagtaagatgcctctccagctactgagcccacaagtaacatgagcggataaaaagagacttgtttgtgctagaaatgagggtctatgctatgagggggtccaagactctggcgaaatgtgctttttcatcaatggagaaatgaaaggaaaacacaagcaagaaaaaagttaacttgtattatgtatttttactacacttttcttaaaaatagagcattgggaaaactctgaaagagactgacatttttctcaacaggaatccatacttaacagttctggctttcattaaattttgctctttggta

SEQ ID NO: 59656 - DNA, 431 bp, Homo sapiens
cggcacgagggaagttactgctgctgcagaatccgatgtgacccaccattagggagtctgcatcttggaagagttggaaataaccctttaacatcaacatgcttcaaagactttttgcctttggcctagtaagatgcctctccagctactgagcccacaagtaacatgagcggataaaaagagacttgtttgtgctagaaatgagggtctatgctatgagggggtccaagactctggcgaaatgtgctttttcatcaatggagaaatgaaaggaaaacacaagcaagaaaaaagttaacttgtattatgtatttttactacacttttcttaaaaatagagcattgggaaaactctgaaagagactgacatttttctcaacaggaatccatacttaacagttctggctttcattaaattttgctctttggta

SEQ ID NO: 59657 - DNA, 1021 bp, Homo sapiens
tttttgatgttctttcacccttttctgtttgctaagtgaggatgaaaaaataacactgtactgcaataaggggagagtaaccctgtctaatgaaacctgtgtctctgagagtagagtcactggaacactaatgaggaaactgcactgttttattttaattcagttgttagtgtgtcttagtgtgtgcaattttttttcttactaatatccatggtttgcaggttctgttaggccctttccttctccttacttcttatccccaactccctacccacccctcttcagttttcagattggagattcaagatttgttccactttacaagcaagaggaaaaaaaagcaaccttcaaactaattctccatgggggctctccatgttaccctccactccttggcccaaacctctgatggagatagacattgttggagaagtgggctgccttccccaagtggggcactgcttaagcacttattcagtggagaacacaggtgaaaagcaactcaggatgagggtggtggagagggcaggggcagatgtgcagtcagagaaggactcctgaagttactgctgctcagaaaaacagttcctttaatgtggaagagccatttcataggtcataggtggtatggtatatttctttcagatctgcatcttggaagagttggaaataaccctttaacatcaacatgcttcaaagactttttgcctttggcctagtaagatgcctctccagctactgagcccacaagtaacatgagcggataaaaagagacttgtttgtgctagaaatgagggtctatgctatgagggggtccaagactctggcgaaatgtgctttttcatcaatggagaaatgaaaggaaaacacaagcaagaaaaaagttaacttgtattatgtatttttactacacttttcttaaaaatagagcattgggaaaactctgaaagagactgacatttttctcaacaggaatccatacttaacagttctggctttcattaaattttgctctttggta

SEQ ID NO: 59658 - DNA, 2221 bp, Homo sapiens
tttttgatgttctttcacccttttctgtttgctaagtgaggatgaaaaaataacactgtactgcaataaggggagagtaaccctgtctaatgaaacctgtgtctctgagagtagagtcactggaacactaatgaggaaactgcactgttttattttaattcagttgttagtgtgtcttagtgtgtgcaattttttttcttactaatatccatggtttgcaggttctgttaggccctttccttctccttacttcttatccccaactccctacccacccctcttcagttttcagattggagattcaagatttgttccactttacaagcaagaggaaaaaaaagcaaccttcaaactaattctccatgggggctctccatgttaccctccactccttggcccaaacctctgatggagatagacattgttggagaagtgggctgccttccccaagtggggcactgcttaagcacttattcagtggagaacacaggtgaaaagcaactcaggatgagggtggtggagagggcaggggcagatgtgcagtcagagaaggactcctgaagttactgctgctcagaaaaacagttcctttaatgtggaagagccatttcataggtcataggtggtatggtatatttctttcagagtcaaccttgggccctgagaagtatgtcctcctggtgtgctcaggctcaacggcagtctggtggctgaaggcacttggcctcctaaaccaagcagaattttgggaagagataacagccagggagatattgcccatgattctcactttttctttgcctggcatctaagcaggaacccattgtggagtagactctcttcttctatggagcctctgacatggggagcaatgctaagcaagctaagtgtaaaagaaaagtgacagaataattttggaagaggaagcctcatcaaaagctcacacaaaatagagcttcccatggtgtgccctatcctaggtttaagtaaagtgttgttttagcatgtggccagatgatgctctgtcatctttagaaagtgagataaccaaggaaataattgaaggagtatagggagatggattaagttgataatgacatttagggcaacttaagacctttgatcccaggttctaactcaaagaggctgaccttcccccagctaagatagcatgaggacgttgtattccaatatacgtatgattggggctacaaagctgaactaaagcaagattggtgaagtggcagggtttatagagagaagcccaggctgagttcagcttttgttggaagtgagaatccctgacatatagctttcttggagatcccaactctcattcttggtgcaactggcttccagctctccagcagtcactctcctaggtgcatgattcagtgcgtgccatgtgtcattagcttttactgataaccatattctggcttgttcccttaccccctacttctatccaattttctctgctaggggttatcattagcaattgacatgctaaaggttttggagcccacctaggggtaggtgcagctttattggcttttctgtggattctctcagtggacccacaccatctctatgtctctccactctcctgccttcagccatagcaaagaatccttccaaaatcaaactcttcacttttttgactcaagtgttgttgttcagtctctcgcgtgtcaatgtggtcatggttcatgaaaccggaccctcaagatggatgattgcttttaactactgccagctgatgtctctcagcccctgccctcatacaagatttttctcagccttcagcctaccactgcagaatccgatgtgacccaccattagggagtctgcatcttggaagagttggaaataaccctttaacatcaacatgcttcaaagactttttgcctttggcctagtaagatgcctctccagctactgagcccacaagtaacatgagcggataaaaagagacttgtttgtgctagaaatgagggtctatgctatgagggggtccaagactctggcgaaatgtgctttttcatcaatggagaaatgaaaggaaaacacaagcaagaaaaaagttaacttgtattatgtatttttactacacttttcttaaaaatagagcattgggaaaactctgaaagagactgacatttttctcaacaggaatccatacttaacagttctggctttcattaaattttgctctttggta

SEQ ID NO: 59659 - DNA, 2463 bp, Homo sapiens
tttttgatgttctttcacccttttctgtttgctaagtgaggatgaaaaaataacactgtactgcaataaggggagagtaaccctgtctaatgaaacctgtgtctctgagagtagagtcactggaacactaatgaggaaactgcactgttttattttaattcagttgttagtgtgtcttagtgtgtgcaattttttttcttactaatatccatggtttgcaggttctgttaggccctttccttctccttacttcttatccccaactccctacccacccctcttcagttttcagattggagattcaagatttgttccactttacaagcaagaggaaaaaaaagcaaccttcaaactaattctccatgggggctctccatgttaccctccactccttggcccaaacctctgatggagatagacattgttggagaagtgggctgccttccccaagtggggcactgcttaagcacttattcagtggagaacacaggtgaaaagcaactcaggatgagggtggtggagagggcaggggcagatgtgcagtcagagaaggactcctgaagttactgctgctcagaaaaacagttcctttaatgtggaagagccatttcataggtcataggtggtatggtatatttctttcagagtcaaccttgggccctgagaagtatgtcctcctggtgtgctcaggctcaacggcagtctggtggctgaaggcacttggcctcctaaaccaagcagaattttgggaagagataacagccagggagatattgcccatgattctcactttttctttgcctggcatctaagcaggaacccattgtggagtagactctcttcttctatggagcctctgacatggggagcaatgctaagcaagctaagtgtaaaagaaaagtgacagaataattttggaagaggaagcctcatcaaaagctcacacaaaatagagcttcccatggtgtgccctatcctaggtttaagaaaacacgtatgaagtttatgctgatgcaaagaacttgggtttttatgttaatataaagtgttgttttagcatgtggccagatgatgctctgtcatctttagaaagtgagataaccaaggaaataattgaaggagtatagggagatggattaagttgataatgacatttagggcaacttaagacctttgatcccaggttctaactcaaagaggctgaccttcccccagctaagatagcatgaggacgttgtattccaatatacgtatgattggggctacaaagctgaactaaagcaagattggtgaagtggcagggtttatagagagaagcccaggctgagttcagcttttgttggaagtgagaatccctgacatatagctttcttggagatcccaactctcattcttggtgcaactggcttccagctctccagcagtcactctcctaggtgcatgattcagtgcgtgccatgtgtcattagcttttactgataaccatattctggcttgttcccttaccccctacttctatccaattttctctgctaggggttatcattagcaattgacatgctaaaggttttggagcccacctaggggtaggtgcagctttattggcttttctgtggattctctcagtggacccacaccatctctatgtctctccactctcctgccttcagccatagcaaagaatccttccaaaatcaaactcttcacttttttgactcaagtgttgttgttcagtctctcgcgtgtcaatgtggtcatggttcatgaaaccggaccctcaagatggatgattgcttttaactactgccagctgatgtctctcagcccctgccctcatacaagatttttctcagccttcagcctaccactgcagaatccgatgtgacccaccattagggagtctgcatcttggaagagttggaaataaccctttaacatcaacatgcttcaaagactttttgcctttggcctagtaagatgcctctccagctactgagcccacaagtaacatgagcggataaaaagagacttgtttgtgctagaaatgagggtctatgctatgagggggtccaagactctggcgaaatgtgctttttcatcaatggagaaatgaaaggaaaacacaagcaagaaaaaagttaacttgtattatgtatttttactacacttttcttaaaaatagagcattgggaaaactctgaaagagactgacatttttctcaacaggaatccatacttaacagttctggctttcattaaattttgctctttggtacctgggccttttatttaacatctatatttgttttaactctcttggcagatgtgtgaaaggattcttgcttgatcaaacactaagtatttttttggttcttgtttttctttcaaatagccaggtttttttcttttggtatttgcataaaatgaaaatatcaccgaatattaaatcactgtggatccatt

SEQ ID NO: 59660 - DNA, 1004 bp, Homo sapiens
  misc_feature (912)..(912): n is a, c, g, or t
  misc_feature (918)..(918): n is a, c, g, or t
  misc_feature (927)..(927): n is a, c, g, or t
  misc_feature (932)..(932): n is a, c, g, or t
  misc_feature (934)..(934): n is a, c, g, or t
  misc_feature (940)..(940): n is a, c, g, or t
  misc_feature (944)..(944): n is a, c, g, or t
  misc_feature (949)..(950): n is a, c, g, or t
  misc_feature (958)..(958): n is a, c, g, or t
  misc_feature (966)..(967): n is a, c, g, or t
  misc_feature (974)..(974): n is a, c, g, or t
  misc_feature (985)..(985): n is a, c, g, or t
  misc_feature (989)..(989): n is a, c, g, or t
gcgctaggtacgaggcctggtgttggaagaacacaatggatctggtgctaaaaagatgccttcttcatttggctgtgataggtgctttgctggctgtgggggctacaaaagtacccagaaaccaggactggcttggtgtctcaaggcaactcagaaccaaagcctggaacaggcagctgtatccagagtggacagaagcccagagacttgactgctggagaggtggtcaagtgtccctcaaggtcagtaatgatgggcctacactgattggtgcaaatgcctccttctctattgccttgaacttccctggaagccaaaaggtattgccagatgggcaggttatctgggtcaacaataccatcatcaatgggagccaggtgtggggaggacagccagtgtatccccaggaaactgacgatgcctgcatcttccctgatggtggaccttgcccatctggctcttggtctcagaagagaagctttgtttatgtctggaagacctggggccaatactggcaagttctagggggcccagtgtctgggctgagcattgggacaggcagggcaatgctgggcacacacaccatggaagtgactgtctaccatcgccggggatcccggagctatgtgcctcttgctcattccagctcagccttcaccattactgaccaggtgcctttctccgtgagcgtgtcccagttgcgggccttggatggagggaacaagcacttcctgagaaatcagcctctgacctttgccctccagctccatgaccctagtggctatctggctgaagctgacctctcctacacctgggactttggagacagtagtggaaccctgatctctcgggcacttgtggtcactcatacttacctggagcctggcccagtcactgccggtgctggggggntcctcnccctgggcncccgncngccccntggncggcnnggggcctnccagggcnngccccangggtcccggcnccgncctggcttgttgccg

SEQ ID NO: 59661 - DNA, 2160 bp, Homo sapiens
ctaagggtatggggcaaggatcacatctaatgctagtgcctttggttgctggagggaagaacacaatggatctggtgctaaaaagatgccttcttcatttggctgtgataggtgctttgctggctgtgggggctacaaaagtacccagaaaccaggactggcttggtgtctcaaggcaactcagaaccaaagcctggaacaggcagctgtatccagagtggacagaagcccagagacttgactgctggagaggtggtcaagtgtccctcaaggtcagtaatgatgggcctacactgattggtgcaaatgcctccttctctattgccttgaacttccctggaagccaaaaggtattgccagatgggcaggttatctgggtcaacaataccatcatcaatgggagccaggtgtggggaggacagccagtgtatccccaggaaactgacgatgcctgcatcttccctgatggtggaccttgcccatctggctcttggtctcagaagagaagctttgtttatgtctggaagacctggggccaatactggcaagttctagggggcccagtgtctgggctgagcattgggacaggcagggcaatgctgggcacacacaccatggaagtgactgtctaccatcgccggggatcccggagctatgtgcctcttgctcattccagctcagccttcaccattactgaccaggtgcctttctccgtgagcgtgtcccagttgcgggccttggatggagggaacaagcacttcctgagaaatcagcctctgacctttgccctccagctccatgaccctagtggctatctggctgaagctgacctctcctacacctgggactttggagacagtagtggaaccctgatctctcgggcacttgtggtcactcatacttacctggagcctggcccagtcactgcccaggtggtcctgcaggctgccattcctctcacctcctgtggctcctccccagttccaggcaccacagatgggcacaggccaactgcagaggcccctaacaccacagctggccaagtgcctactacagaagttgtgggtactacacctggtcaggcgccaactgcagagccctctggaaccacatctgtgcaggtgccaaccactgaagtcataagcactgcacctgtgcagatgccaactgcagagagcacaggtatgacacctgagaaggtgccagtttcagaggtcatgggtaccacactggcagagatgtcaactccagaggctacaggtatgacacctgcagaggtatcaattgtggtgctttctggaaccacagctgcacaggtaacaactacagagtgggtggagaccacagctagagagctacctatccctgagcctgaaggtccagatgccagctcaatcatgtctacggaaagtattacaggttccctgggccccctgctggatggtacagccaccttaaggctggtgaagagacaagtccccctggattgtgttctgtatcgatatggttccttttccgtcaccctggacattgtccagggtattgaaagtgccgagatcctgcaggctgtgccgtccggtgagggggatgcatttgagctgactgtgtcctgccaaggcgggctgcccaaggaagcctgcatggagatctcatcgccagggtgccagccccctgcccagcggctgtgccagcctgtgctacccagcccagcctgccagctggttctgcaccagatactgaagggtggctcggggacatactgcctcaatgtgtctctggctgataccaacagcctggcagtggtcagcacccagcttatcatgcctggtcaagaagcaggccttgggcaggttccgctgatcgtgggcatcttgctggtgttgatggctgtggtccttgcatctctgatatataggcgcagacttatgaagcaagacttctccgtaccccagttgccacatagcagcagtcactggctgcgtctaccccgcatcttctgctcttgtcccattggtgagaatagccccctcctcagtgggcagcaggtctgagtactctcatatgatgctgtgattttcctggagttgacagaaacacctatatttcccccagtcttccctgggagactactattaactgaaataaatactcagagcctga

SEQ ID NO: 59662 - DNA, 2131 bp, Homo sapiens
ggctggtaccggtctggagagtttgggaagaacacaatggatctggtgctaaaaagatgccttcttcatttggctgtgataggtgctttgctggctgtgggggctacaaaagtacccagaaaccaggactggcttggtgtctcaaggcaactcagaaccaaagcctggaacaggcagctgtatccagagtggacagaagcccagagacttgactgctggagaggtggtcaagtgtccctcaaggtcagtaatgatgggcctacactgattggtgcaaatgcctccttctctattgccttgaacttccctggaagccaaaaggtattgccagatgggcaggttatctgggtcaacaataccatcatcaatgggagccaggtgtggggaggacagccagtgtatccccaggaaactgacgatgcctgcatcttccctgatggtggaccttgcccatctggctcttggtctcagaagagaagctttgtttatgtctggaagacctggggccaatactggcaagttctagggggcccagtgtctgggctgagcattgggacaggcagggcaatgctgggcacacacaccatggaagtgactgtctaccatcgccggggatcccggagctatgtgcctcttgctcattccagctcagccttcaccattactgaccaggtgcctttctccgtgagcgtgtcccagttgcgggccttggatggagggaacaagcacttcctgagaaatcagcctctgacctttgccctccagctccatgaccctagtggctatctggctgaagctgacctctcctacacctgggactttggagacagtagtggaaccctgatctctcgggcacttgtggtcactcatacttacctggagcctggcccagtcactgcccaggtggtcctgcaggctgccattcctctcacctcctgtggctcctccccagttccaggcaccacagatgggcacaggccaactgcagaggcccctaacaccacagctggccaagtgcctactacagaagttgtgggtactacacctggtcaggcgccaactgcagagccctctggaaccacatctgtgcaggtgccaaccactgaagtcataagcactgcacctgtgcagatgccaactgcagagagcacaggtatgacacctgagaaggtgccagtttcagaggtcatgggtaccacactggcagagatgtcaactccagaggctacaggtatgacacctgcagaggtatcaattgtggtgctttctggaaccacagctgcacaggtaacaactacagagtgggtggagaccacagctagagagctacctatccctgagcctgaaggtccagatgccagctcaatcatgtctacggaaagtattacaggttccctgggccccctgctggatggtacagccaccttaaggctggtgaagagacaagtccccctggattgtgttctgtatcgatatggttccttttccgtcaccctggacattgtccagggtattgaaagtgccgagatcctgcaggctgtgccgtccggtgagggggatgcatttgagctgactgtgtcctgccaaggcgggctgcccaaggaagcctgcatggagatctcatcgccagggtgccagccccctgcccagcggctgtgccagcctgtgctacccagcccagcctgccagctggttctgcaccagatactgaagggtggctcggggacatactgcctcaatgtgtctctggctgataccaacagcctggcagtggtcagcacccagcttatcatgcctggtcaagaagcaggccttgggcaggttccgctgatcgtgggcatcttgctggtgttgatggctgtggtccttgcatctctgatatataggcgcagacttatgaagcaagacttctccgtaccccagttgccacatagcagcagtcactggctgcgtctaccccgcatcttctgctcttgtcccattggtgagaatagccccctcctcagtgggcagcaggtctgagtactctcatatgatgctgtgattttcctggagttgacagaaacacctatatttcccccagtcttccctgggagactactattaactgaaataaatactcagagcctga

SEQ ID NO: 59663 - DNA, 2181 bp, Homo sapiens
ctaagggtatggggcaaggatcacatctaatgctagtgcctttggttgctggagggaagaacacaatggatctggtgctaaaaagatgccttcttcatttggctgtgataggtgctttgctggctgtgggggctacaaaagtacccagaaaccaggactggcttggtgtctcaaggcaactcagaaccaaagcctggaacaggcagctgtatccagagtggacagaagcccagagacttgactgctggagaggtggtcaagtgtccctcaaggtcagtaatgatgggcctacactgattggtgcaaatgcctccttctctattgccttgaacttccctggaagccaaaaggtattgccagatgggcaggttatctgggtcaacaataccatcatcaatgggagccaggtgtggggaggacagccagtgtatccccaggaaactgacgatgcctgcatcttccctgatggtggaccttgcccatctggctcttggtctcagaagagaagctttgtttatgtctggaagacctggggccaatactggcaagttctagggggcccagtgtctgggctgagcattgggacaggcagggcaatgctgggcacacacaccatggaagtgactgtctaccatcgccggggatcccggagctatgtgcctcttgctcattccagctcagccttcaccattactgaccaggtgcctttctccgtgagcgtgtcccagttgcgggccttggatggagggaacaagcacttcctgagaaatcagcctctgacctttgccctccagctccatgaccctagtggctatctggctgaagctgacctctcctacacctgggactttggagacagtagtggaaccctgatctctcgggcacttgtggtcactcatacttacctggagcctggcccagtcactgcccaggtggtcctgcaggctgccattcctctcacctcctgtggctcctccccagttccaggcaccacagatgggcacaggccaactgcagaggcccctaacaccacagctggccaagtgcctactacagaagttgtgggtactacacctggtcaggcgccaactgcagagccctctggaaccacatctgtgcaggtgccaaccactgaagtcataagcactgcacctgtgcagatgccaactgcagagagcacaggtatgacacctgagaaggtgccagtttcagaggtcatgggtaccacactggcagagatgtcaactccagaggctacaggtatgacacctgcagaggtatcaattgtggtgctttctggaaccacagctgcacaggtaacaactacagagtgggtggagaccacagctagagagctacctatccctgagcctgaaggtccagatgccagctcaatcatgtctacggaaagtattacaggttccctgggccccctgctggatggtacagccaccttaaggctggtgaagagacaagtccccctggattgtgttctgtatcgatatggttccttttccgtcaccctggacattgtccagggtattgaaagtgccgagatcctgcaggctgtgccgtccggtgagggggatgcatttgagctgactgtgtcctgccaaggcgggctgcccaaggaagcctgcatggagatctcatcgccagggtgccagccccctgcccagcggctgtgccagcctgtgctacccagcccagcctgccagctggttctgcaccagatactgaagggtggctcggggacatactgcctcaatgtgtctctggctgataccaacagcctggcagtggtcagcacccagcttatcatgcctggtcaagaagcaggccttgggcaggttccgctgatcgtgggcatcttgctggtgttgatggctgtggtccttgcatctctgatatataggcgcagacttatgaagcaagacttctccgtaccccagttgccacatagcagcagtcactggctgcgtctaccccgcatcttctgctcttgtcccattggtgagaatagccccctcctcagtgggcagcaggtctgagtactctcatatgatgctgtgattttcctggagttgacagaaacacctatatttcccccagtcttccctgggagactactattaactgaaataaatactcagagcctgaaaaaaaaaagaaaaagaaaaa

SEQ ID NO: 59664 - DNA, 2370 bp, Homo sapiens
  misc_feature (2169)..(2169): n is a, c, g, or t
ctaagggtatggggcaaggatcacatctaatgctagtgcctttggttgctggagggaagaacacaatggatctggtgctaaaaagatgccttcttcatttggctgtgataggtgctttgctggctgtgggggctacaaaagtacccagaaaccaggactggcttggtgtctcaaggcaactcagaaccaaagcctggaacaggcagctgtatccagagtggacagaagcccagagacttgactgctggagaggtggtcaagtgtccctcaaggtcagtaatgatgggcctacactgattggtgcaaatgcctccttctctattgccttgaacttccctggaagccaaaaggtattgccagatgggcaggttatctgggtcaacaataccatcatcaatgggagccaggtgtggggaggacagccagtgtatccccaggaaactgacgatgcctgcatcttccctgatggtggaccttgcccatctggctcttggtctcagaagagaagctttgtttatgtctggaagacctggggccaatactggcaagttctagggggcccagtgtctgggctgagcattgggacaggcagggcaatgctgggcacacacaccatggaagtgactgtctaccatcgccggggatcccggagctatgtgcctcttgctcattccagctcagccttcaccattactgaccaggtgcctttctccgtgagcgtgtcccagttgcgggccttggatggagggaacaagcacttcctgagaaatcagcctctgacctttgccctccagctccatgaccctagtggctatctggctgaagctgacctctcctacacctgggactttggagacagtagtggaaccctgatctctcgggcacttgtggtcactcatacttacctggagcctggcccagtcactgcccaggtggtcctgcaggctgccattcctctcacctcctgtggctcctccccagttccaggcaccacagatgggcacaggccaactgcagaggcccctaacaccacagctggccaagtgcctactacagaagttgtgggtactacacctggtcaggcgccaactgcagagccctctggaaccacatctgtgcaggtgccaaccactgaagtcataagcactgcacctgtgcagatgccaactgcagagagcacaggtatgacacctgagaaggtgccagtttcagaggtcatgggtaccacactggcagagatgtcaactccagaggctacaggtatgacacctgcagaggtatcaattgtggtgctttctggaaccacagctgcacaggtaacaactacagagtgggtggagaccacagctagagagctacctatccctgagcctgaaggtccagatgccagctcaatcatgtctacggaaagtattacaggttccctgggccccctgctggatggtacagccaccttaaggctggtgaagagacaagtccccctggattgtgttctgtatcgatatggttccttttccgtcaccctggacattgtccagggtattgaaagtgccgagatcctgcaggctgtgccgtccggtgagggggatgcatttgagctgactgtgtcctgccaaggcgggctgcccaaggaagcctgcatggagatctcatcgccagggtgccagccccctgcccagcggctgtgccagcctgtgctacccagcccagcctgccagctggttctgcaccagatactgaagggtggctcggggacatactgcctcaatgtgtctctggctgataccaacagcctggcagtggtcagcacccagcttatcatgcctggtcaagaagcaggccttgggcaggttccgctgatcgtgggcatcttgctggtgttgatggctgtggtccttgcatctctgatatataggcgcagacttatgaagcaagacttctccgtaccccagttgccacatagcagcagtcactggctgcgtctaccccgcatcttctgctcttgtcccattggtgagaatagccccctcctcagtgggcagcaggtctgagtactctcatatgatgctgtgattttcctggagttgacagaaacacctatatttcccccagtcttccctgggagactactattaactgaaataaatactcagagcctgaaaaaaaaanaaaaataaaaaaacaattcccggggctctcctaatgtgccggggggggcgacacaggcggggctctcgaatttggcgaccttgggtcattacgtgtgtttccctggcccccactctttttttttctacccacgggggcaacactccgcggggccgccccaaaaaggagggccgtaaaatccgaaaaccccggtacctggta

SEQ ID NO: 59665 - DNA, 2082 bp, Homo sapiens
ctaagggtatggggcaaggatcacatctaatgctagtgcctttggttgctggagggaagaacacaatggatctggtgctaaaaagatgccttcttcatttggctgtgataggtgctttgctggctgtgggggctacaaaagtacccagaaaccaggactggcttggtgtctcaaggcaactcagaaccaaagcctggaacaggcagctgtatccagagtggacagaagcccagagacttgactgctggagaggtggtcaagtgtccctcaaggtcagtaatgatgggcctacactgattggtgcaaatgcctccttctctattgccttgaacttccctggaagccaaaaggtattgccagatgggcaggttatctgggtcaacaataccatcatcaatgggagccaggtgtggggaggacagccagtgtatccccaggaaactgacgatgcctgcatcttccctgatggtggaccttgcccatctggctcttggtctcagaagagaagctttgtttatgtctggaagacctggggccaatactggcaagttctagggggcccagtgtctgggctgagcattgggacaggcagggcaatgctgggcacacacaccatggaagtgactgtctaccatcgccggggatcccggagctatgtgcctcttgctcattccagctcagccttcaccattactgaccaggtgcctttctccgtgagcgtgtcccagttgcgggccttggatggagggaacaagcacttcctgagaaatcagcctctgacctttgccctccagctccatgaccctagtggctatctggctgaagctgacctctcctacacctgggactttggagacagtagtggaaccctgatctctcgggcacttgtggtcactcatacttacctggagcctggcccagtcactgcccaggtggtcctgcaggctgccattcctctcacctccttgcctactacagaagttgtgggtactacacctggtcaggcgccaactgcagagccctctggaaccacatctgtgcaggtgccaaccactgaagtcataagcactgcacctgtgcagatgccaactgcagagagcacaggtatgacacctgagaaggtgccagtttcagaggtcatgggtaccacactggcagagatgtcaactccagaggctacaggtatgacacctgcagaggtatcaattgtggtgctttctggaaccacagctgcacaggtaacaactacagagtgggtggagaccacagctagagagctacctatccctgagcctgaaggtccagatgccagctcaatcatgtctacggaaagtattacaggttccctgggccccctgctggatggtacagccaccttaaggctggtgaagagacaagtccccctggattgtgttctgtatcgatatggttccttttccgtcaccctggacattgtccagggtattgaaagtgccgagatcctgcaggctgtgccgtccggtgagggggatgcatttgagctgactgtgtcctgccaaggcgggctgcccaaggaagcctgcatggagatctcatcgccagggtgccagccccctgcccagcggctgtgccagcctgtgctacccagcccagcctgccagctggttctgcaccagatactgaagggtggctcggggacatactgcctcaatgtgtctctggctgataccaacagcctggcagtggtcagcacccagcttatcatgcctggtcaagaagcaggccttgggcaggttccgctgatcgtgggcatcttgctggtgttgatggctgtggtccttgcatctctgatatataggcgcagacttatgaagcaagacttctccgtaccccagttgccacatagcagcagtcactggctgcgtctaccccgcatcttctgctcttgtcccattggtgagaatagccccctcctcagtgggcagcaggtctgagtactctcatatgatgctgtgattttcctggagttgacagaaacacctatatttcccccagtcttccctgggagactactattaactgaaataaatactcagagcctga

SEQ ID NO: 59666 - DNA, 2034 bp, Homo sapiens
ctaagggtatggggcaaggatcacatctaatgctagtgcctttggttgctggagggaagaacacaatggatctggtgctaaaaagatgccttcttcatttggctgtgataggtgctttgctggctgtgggggctacaaaagtacccagaaaccaggactggcttggtgtctcaaggcaactcagaaccaaagcctggaacaggcagctgtatccagagtggacagaagcccagagacttgactgctggagaggtggtcaagtgtccctcaaggtcagtaatgatgggcctacactgattggtgcaaatgcctccttctctattgccttgaacttccctggaagccaaaaggtattgccagatgggcaggttatctgggtcaacaataccatcatcaatgggagccaggtgtggggaggacagccagtgtatccccaggaaactgacgatgcctgcatcttccctgatggtggaccttgcccatctggctcttggtctcagaagagaagctttgtttatgtctggaagacctggggccaatactggcaagttctagggggcccagtgtctgggctgagcattgggacaggcagggcaatgctgggcacacacaccatggaagtgactgtctaccatcgccggggatcccggagctatgtgcctcttgctcattccagctcagccttcaccattactgaccaggtgcctttctccgtgagcgtgtcccagttgcgggccttggatggagggaacaagcacttcctgagaaatcagcctctgacctttgccctccagctccatgaccctagtggctatctggctgaagctgacctctcctacacctgggactttggagacagtagtggaaccctgatctctcgggcacttgtggtcactcatacttacctggagcctggcccagtcactgcccaggtggtcctgcaggctgccattcctctcacctcctgtggctcctccccagttccaggcaccacagatgggcacaggccaactgcagaggcccctaacaccacagctggccaagtgcctactacagaagttgtgggtactacacctggtcaggcgccaactgcagagccctctggaaccacatctgtgcaggtgccaaccactgaagtcataagcactgcacctgtgcagatgccaactgcagagagcacagctgcacaggtaacaactacagagtgggtggagaccacagctagagagctacctatccctgagcctgaaggtccagatgccagctcaatcatgtctacggaaagtattacaggttccctgggccccctgctggatggtacagccaccttaaggctggtgaagagacaagtccccctggattgtgttctgtatcgatatggttccttttccgtcaccctggacattgtccagggtattgaaagtgccgagatcctgcaggctgtgccgtccggtgagggggatgcatttgagctgactgtgtcctgccaaggcgggctgcccaaggaagcctgcatggagatctcatcgccagggtgccagccccctgcccagcggctgtgccagcctgtgctacccagcccagcctgccagctggttctgcaccagatactgaagggtggctcggggacatactgcctcaatgtgtctctggctgataccaacagcctggcagtggtcagcacccagcttatcatgcctggtcaagaagcaggccttgggcaggttccgctgatcgtgggcatcttgctggtgttgatggctgtggtccttgcatctctgatatataggcgcagacttatgaagcaagacttctccgtaccccagttgccacatagcagcagtcactggctgcgtctaccccgcatcttctgctcttgtcccattggtgagaatagccccctcctcagtgggcagcaggtctgagtactctcatatgatgctgtgattttcctggagttgacagaaacacctatatttcccccagtcttccctgggagactactattaactgaaataaatactcagagcctga

SEQ ID NO: 59667 - DNA, 1699 bp, Homo sapiens
ctaagggtatggggcaaggatcacatctaatgctagtgcctttggttgctggagggaagaacacaatggatctggtgctaaaaagatgccttcttcatttggctgtgataggtgctttgctggctgtgggggctacaaaagtacccagaaaccaggactggcttggtgtctcaaggcaactcagaaccaaagcctggaacaggcagctgtatccagagtggacagaagcccagagacttgactgctggagaggtggtcaagtgtccctcaaggtcagtaatgatgggcctacactgattggtgcaaatgcctccttctctattgccttgaacttccctggaagccaaaaggtattgccagatgggcaggttatctgggtcaacaataccatcatcaatgggagccaggtgtggggaggacagccagtgtatccccaggaaactgacgatgcctgcatcttccctgatggtggaccttgcccatctggctcttggtctcagaagagaagctttgtttatgtctggaagacctggggccaatactggcaagttctagggggcccagtgtctgggctgagcattgggacaggcagggcaatgctgggcacacacaccatggaagtgactgtctaccatcgccggggatcccggagctatgtgcctcttgctcattccagctcagccttcaccattactgaccaggtgcctttctccgtgagcgtgtcccagttgcgggccttggatggagggaacaagcacttcctgagaaatcagcctctgacctttgccctccagctccatgaccctagtggctatctggctgaagctgacctctcctacacctgggactttggagacagtagtggaaccctgatctctcgggcacttgtggtcactcatacttacctggagcctggcccagtcactgcccaggtggtcctgcaggctgccattcctctcacctcctgtggctcctccccagttccaggcaccacagatgggcacaggccaactgcagaggcccctaacaccacagctggccaagtgcctactacagaagttgtgggtactacacctggtcaggcgccaactgcagagccctctggaaccacatctgtgcaggtgccaaccactgaagtcataagcactgcacctgtgcagatgccaactgcagagagcacaggtatgacacctgagaaggtgccagtttcagaggtcatgggtaccacactggcagagatgtcaactccagatactgaagggtggctcggggacatactgcctcaatgtgtctctggctgataccaacagcctggcagtggtcagcacccagcttatcatgcctgtgcctgggattcttctcacaggtcaagaagcaggccttgggcaggttccgctgatcgtgggcatcttgctggtgttgatggctgtggtccttgcatctctgatatataggcgcagacttatgaagcaagacttctccgtaccccagttgccacatagcagcagtcactggctgcgtctaccccgcatcttctgctcttgtcccattggtgagaatagccccctcctcagtgggcagcaggtctgagtactctcatatgatgctgtgattttcctggagttgacagaaacacctatatttcccccagtcttccctgggagactactattaactgaaataaatactcagagcctga

SEQ ID NO: 59668 - DNA, 2120 bp, Homo sapiens
  misc_feature (28)..(28): n is a, c, g, or t
  misc_feature (32)..(32): n is a, c, g, or t
  misc_feature (35)..(35): n is a, c, g, or t
  misc_feature (40)..(40): n is a, c, g, or t
  misc_feature (43)..(43): n is a, c, g, or t
  misc_feature (45)..(46): n is a, c, g, or t
tatttcattctggggcggggctttaatngatnctngtacngtncnntttcttcttcatttggctgtgataggtgctttgctggctgtgggggctacaaaagtacccagaaaccaggactggcttggtgtctcaaggcaactcagaaccaaagcctggaacaggcagctgtatccagagtggacagaagcccagagacttgactgctggagaggtggtcaagtgtccctcaaggtcagtaatgatgggcctacactgattggtgcaaatgcctccttctctattgccttgaacttccctggaagccaaaaggtattgccagatgggcaggttatctgggtcaacaataccatcatcaatgggagccaggtgtggggaggacagccagtgtatccccaggaaactgacgatgcctgcatcttccctgatggtggaccttgcccatctggctcttggtctcagaagagaagctttgtttatgtctggaagacctggggccaatactggcaagttctagggggcccagtgtctgggctgagcattgggacaggcagggcaatgctgggcacacacaccatggaagtgactgtctaccatcgccggggatcccggagctatgtgcctcttgctcattccagctcagccttcaccattactgaccaggtgcctttctccgtgagcgtgtcccagttgcgggccttggatggagggaacaagcacttcctgagaaatcagcctctgacctttgccctccagctccatgaccctagtggctatctggctgaagctgacctctcctacacctgggactttggagacagtagtggaaccctgatctctcgggcacttgtggtcactcatacttacctggagcctggcccagtcactgcccaggtggtcctgcaggctgccattcctctcacctcctgtggctcctccccagttccaggcaccacagatgggcacaggccaactgcagaggcccctaacaccacagctggccaagtgcctactacagaagttgtgggtactacacctggtcaggcgccaactgcagagccctctggaaccacatctgtgcaggtgccaaccactgaagtcataagcactgcacctgtgcagatgccaactgcagagagcacaggtatgacacctgagaaggtgccagtttcagaggtcatgggtaccacactggcagagatgtcaactccagaggctacaggtatgacacctgcagaggtatcaattgtggtgctttctggaaccacagctgcacaggtaacaactacagagtgggtggagaccacagctagagagctacctatccctgagcctgaaggtccagatgccagctcaatcatgtctacggaaagtattacaggttccctgggccccctgctggatggtacagccaccttaaggctggtgaagagacaagtccccctggattgtgttctgtatcgatatggttccttttccgtcaccctggacattgtccagggtattgaaagtgccgagatcctgcaggctgtgccgtccggtgagggggatgcatttgagctgactgtgtcctgccaaggcgggctgcccaaggaagcctgcatggagatctcatcgccagggtgccagccccctgcccagcggctgtgccagcctgtgctacccagcccagcctgccagctggttctgcaccagatactgaagggtggctcggggacatactgcctcaatgtgtctctggctgataccaacagcctggcagtggtcagcacccagcttatcatgcctggtcaagaagcaggccttgggcaggttccgctgatcgtgggcatcttgctggtgttgatggctgtggtccttgcatctctgatatataggcgcagacttatgaagcaagacttctccgtaccccagttgccacatagcagcagtcactggctgcgtctaccccgcatcttctgctcttgtcccattggtgagaatagccccctcctcagtgggcagcaggtctgagtactctcatatgatgctgtgattttcctggagttgacagaaacacctatatttcccccagtcttccctgggagactactattaactgaaataaatactcagagcctga

SEQ ID NO: 59669 - DNA, 1902 bp, Homo sapiens
ctaagggtatggggcaaggatcacatctaatgctagtgcctttggttgctggagggaagaacacaatggatctggtgctaaaaagatgccttcttcatttggctgtgataggtgctttgctggctgtgggggctacaaaagggagccaggtgtggggaggacagccagtgtatccccaggaaactgacgatgcctgcatcttccctgatggtggaccttgcccatctggctcttggtctcagaagagaagctttgtttatgtctggaagacctggggccaatactggcaagttctagggggcccagtgtctgggctgagcattgggacaggcagggcaatgctgggcacacacaccatggaagtgactgtctaccatcgccggggatcccggagctatgtgcctcttgctcattccagctcagccttcaccattactgaccaggtgcctttctccgtgagcgtgtcccagttgcgggccttggatggagggaacaagcacttcctgagaaatcagcctctgacctttgccctccagctccatgaccctagtggctatctggctgaagctgacctctcctacacctgggactttggagacagtagtggaaccctgatctctcgggcacttgtggtcactcatacttacctggagcctggcccagtcactgcccaggtggtcctgcaggctgccattcctctcacctcctgtggctcctccccagttccaggcaccacagatgggcacaggccaactgcagaggcccctaacaccacagctggccaagtgcctactacagaagttgtgggtactacacctggtcaggcgccaactgcagagccctctggaaccacatctgtgcaggtgccaaccactgaagtcataagcactgcacctgtgcagatgccaactgcagagagcacaggtatgacacctgagaaggtgccagtttcagaggtcatgggtaccacactggcagagatgtcaactccagaggctacaggtatgacacctgcagaggtatcaattgtggtgctttctggaaccacagctgcacaggtaacaactacagagtgggtggagaccacagctagagagctacctatccctgagcctgaaggtccagatgccagctcaatcatgtctacggaaagtattacaggttccctgggccccctgctggatggtacagccaccttaaggctggtgaagagacaagtccccctggattgtgttctgtatcgatatggttccttttccgtcaccctggacattgtccagggtattgaaagtgccgagatcctgcaggctgtgccgtccggtgagggggatgcatttgagctgactgtgtcctgccaaggcgggctgcccaaggaagcctgcatggagatctcatcgccagggtgccagccccctgcccagcggctgtgccagcctgtgctacccagcccagcctgccagctggttctgcaccagatactgaagggtggctcggggacatactgcctcaatgtgtctctggctgataccaacagcctggcagtggtcagcacccagcttatcatgcctggtcaagaagcaggccttgggcaggttccgctgatcgtgggcatcttgctggtgttgatggctgtggtccttgcatctctgatatataggcgcagacttatgaagcaagacttctccgtaccccagttgccacatagcagcagtcactggctgcgtctaccccgcatcttctgctcttgtcccattggtgagaatagccccctcctcagtgggcagcaggtctgagtactctcatatgatgctgtgattttcctggagttgacagaaacacctatatttcccccagtcttccctgggagactactattaactgaaataaatactcagagcctga

SEQ ID NO: 59670 - DNA, 1989 bp, Homo sapiens
cggacgcgtgggtcgacccacgcgtccgagggaagaacacaatggatctggtgctaaaaagatgccttcttcatttggctgtgataggtgctttgctggctgtgggggctacaaaagtacccagaaaccaggactggcttggtgtctcaaggcaactcagaaccaaagcctggaacaggcagctgtatccagagtggacagaagcccagagacttgactgctggagagggagccaggtgtggggaggacagccagtgtatccccaggaaactgacgatgcctgcatcttccctgatggtggaccttgcccatctggctcttggtctcagaagagaagctttgtttatgtctggaagacctggggccaatactggcaagttctagggggcccagtgtctgggctgagcattgggacaggcagggcaatgctgggcacacacaccatggaagtgactgtctaccatcgccggggatcccggagctatgtgcctcttgctcattccagctcagccttcaccattactgaccaggtgcctttctccgtgagcgtgtcccagttgcgggccttggatggagggaacaagcacttcctgagaaatcagcctctgacctttgccctccagctccatgaccctagtggctatctggctgaagctgacctctcctacacctgggactttggagacagtagtggaaccctgatctctcgggcacttgtggtcactcatacttacctggagcctggcccagtcactgcccaggtggtcctgcaggctgccattcctctcacctcctgtggctcctccccagttccaggcaccacagatgggcacaggccaactgcagaggcccctaacaccacagctggccaagtgcctactacagaagttgtgggtactacacctggtcaggcgccaactgcagagccctctggaaccacatctgtgcaggtgccaaccactgaagtcataagcactgcacctgtgcagatgccaactgcagagagcacaggtatgacacctgagaaggtgccagtttcagaggtcatgggtaccacactggcagagatgtcaactccagaggctacaggtatgacacctgcagaggtatcaattgtggtgctttctggaaccacagctgcacaggtaacaactacagagtgggtggagaccacagctagagagctacctatccctgagcctgaaggtccagatgccagctcaatcatgtctacggaaagtattacaggttccctgggccccctgctggatggtacagccaccttaaggctggtgaagagacaagtccccctggattgtgttctgtatcgatatggttccttttccgtcaccctggacattgtccagggtattgaaagtgccgagatcctgcaggctgtgccgtccggtgagggggatgcatttgagctgactgtgtcctgccaaggcgggctgcccaaggaagcctgcatggagatctcatcgccagggtgccagccccctgcccagcggctgtgccagcctgtgctacccagcccagcctgccagctggttctgcaccagatactgaagggtggctcggggacatactgcctcaatgtgtctctggctgataccaacagcctggcagtggtcagcacccagcttatcatgcctggtcaagaagcaggccttgggcaggttccgctgatcgtgggcatcttgctggtgttgatggctgtggtccttgcatctctgatatataggcgcagacttatgaagcaagacttctccgtaccccagttgccacatagcagcagtcactggctgcgtctaccccgcatcttctgctcttgtcccattggtgagaatagccccctcctcagtgggcagcaggtctgagtactctcatatgatgctgtgattttcctggagttgacagaaacacctatatttcccccagtcttccctgggagactactattaactgaaataaatactcagagcctga

SEQ ID NO: 59671 - DNA, 1686 bp, Homo sapiens
  misc_feature (10)..(10): n is a, c, g, or t
tatcgggctntagaacgagctgcgtggtgaagaagcttgtttatgtctggaagacctggggccaatactggcaagttctagggggcccagtgtctgggctgagcattgggacaggcagggcaatgctgggcacacacaccatggaagtgactgtctaccatcgccggggatcccggagctatgtgcctcttgctcattccagctcagccttcaccattactgaccaggtgcctttctccgtgagcgtgtcccagttgcgggccttggatggagggaacaagcacttcctgagaaatcagcctctgacctttgccctccagctccatgaccctagtggctatctggctgaagctgacctctcctacacctgggactttggagacagtagtggaaccctgatctctcgggcacttgtggtcactcatacttacctggagcctggcccagtcactgcccaggtggtcctgcaggctgccattcctctcacctcctgtggctcctccccagttccaggcaccacagatgggcacaggccaactgcagaggcccctaacaccacagctggccaagtgcctactacagaagttgtgggtactacacctggtcaggcgccaactgcagagccctctggaaccacatctgtgcaggtgccaaccactgaagtcataagcactgcacctgtgcagatgccaactgcagagagcacaggtatgacacctgagaaggtgccagtttcagaggtcatgggtaccacactggcagagatgtcaactccagaggctacaggtatgacacctgcagaggtatcaattgtggtgctttctggaaccacagctgcacaggtaacaactacagagtgggtggagaccacagctagagagctacctatccctgagcctgaaggtccagatgccagctcaatcatgtctacggaaagtattacaggttccctgggccccctgctggatggtacagccaccttaaggctggtgaagagacaagtccccctggattgtgttctgtatcgatatggttccttttccgtcaccctggacattgtccagggtattgaaagtgccgagatcctgcaggctgtgccgtccggtgagggggatgcatttgagctgactgtgtcctgccaaggcgggctgcccaaggaagcctgcatggagatctcatcgccagggtgccagccccctgcccagcggctgtgccagcctgtgctacccagcccagcctgccagctggttctgcaccagatactgaagggtggctcggggacatactgcctcaatgtgtctctggctgataccaacagcctggcagtggtcagcacccagcttatcatgcctggtcaagaagcaggccttgggcaggttccgctgatcgtgggcatcttgctggtgttgatggctgtggtccttgcatctctgatatataggcgcagacttatgaagcaagacttctccgtaccccagttgccacatagcagcagtcactggctgcgtctaccccgcatcttctgctcttgtcccattggtgagaatagccccctcctcagtgggcagcaggtctgagtactctcatatgatgctgtgattttcctggagttgacagaaacacctatatttcccccagtcttccctgggagactactattaactgaaataaatactcagagcctga

SEQ ID NO: 59672 - DNA, 731 bp, Homo sapiens
cggacgcgtgggtcgacccacgcgtccgaggctggtgaagagacaagtccccctggattgtgttctgtatcgatatggttccttttccgtcaccctggacattgtccagggtattgaaagtgccgagatcctgcaggctgtgccgtccggtgagggggatgcatttgagctgactgtgtcctgccaaggcgggctgcccaaggaagcctgcatggagatctcatcgccagggtgccagccccctgcccagcggctgtgccagcctgtgctacccagcccagcctgccagctggttctgcaccagatactgaagggtggctcggggacatactgcctcaatgtgtctctggctgataccaacagcctggcagtggtcagcacccagcttatcatgcctggtcaagaagcaggccttgggcaggttccgctgatcgtgggcatcttgctggtgttgatggctgtggtccttgcatctctgatatataggcgcagacttatgaagcaagacttctccgtaccccagttgccacatagcagcagtcactggctgcgtctaccccgcatcttctgctcttgtcccattggtgagaatagccccctcctcagtgggcagcaggtctgagtactctcatatgatgctgtgattttcctggagttgacagaaacacctatatttcccccagtcttccctgggagactactattaactgaaataaatactcagagcctga

SEQ ID NO: 59673 - DNA, 679 bp, Homo sapiens
gcaaccaatagctagtagaggccgggtggtgaatcggccgaggctggacattgtcagggtattgaaagtgccgagatcctgcaggctgtgccgtccggtgagggggatgcatttgagctgactgtgtcctgccaaggcgggctgcccaaggaagcctgcatggagatctcatcgccagggtgccagccccctgcccagcggctgtgccagcctgtgctacccagcccagcctgccagctggttctgcaccagatactgaagggtggctcggggacatactgcctcaatgtgtctctggctgataccaacagcctggcagtggtcagcacccagcttatcatgcctggtcaagaagcaggccttgggcaggttccgctgatcgtgggcatcttgctggtgttgatggctgtggtccttgcatctctgatatataggcgcagacttatgaagcaagacttctccgtaccccagttgccacatagcagcagtcactggctgcgtctaccccgcatcttctgctcttgtcccattggtgagaatagccccctcctcagtgggcagcaggtctgagtactctcatatgatgctgtgattttcctggagttgacagaaacacctatatttcccccagtcttccctgggagactactattaactgaaataaatactcagagcctga

SEQ ID NO: 59674 - DNA, 811 bp, Homo sapiens
cggacgcgtgggtcgacccacgcgtccgagggaagaacacaatggatctggtgctaaaaagatgccttcttcatttggctgtgataggtgctttgctggctgtgggggctacaaaagtacccagaaaccaggactggcttggtgtctcaaggcaactcagaaccaaagcctggaacaggcagctgtatccagagtggacagaagcccagagacttgactgctggagaggtggtcaagtgtccctcaaggtcagtaatgatgggcctacactgattggtgcaaatgcctccttctctattgccttgaacttccctggaagccaaaaggtattgccagatgggcaggttatctgggtcaacaataccatcatcaatgggagccaggtgtggggaggacagccagtgtatccccaggaaactgacgatgcctgcatcttccctgatggtggaccttgcccatctggctcttggtctcagaagagaagctttgtttatgtctggaagacctggggtgagggactcccttctcagcctatcatccacacttgtgtttacttctttctacctgatcacctttcttttggccgccccttccaccttaacttctgtgattttctctaatcttcattttcctcttagatcttttctctttcttagcacctagcccccttcaactctatcataattctttctggcaactcttcctcaattgtagtcctaccccatggaatgcctcattaggaccccttccctgtccccccatatcacagccttccaaacaccctcagaagtaatcatacttcctgacctcc

SEQ ID NO: 59675 - DNA, 941 bp, Homo sapiens
  misc_feature (740)..(740): n is a, c, g, or t
cggacgcgtgggtcgacccacgcgtccgaggctggtgaagagacaagtccccctggattgtgttctgtatcgatatggttccttttccgtcaccctggacattgtccagggtattgaaagtgccgagatcctgcaggctgtgccgtccggtgagggggatgcatttgagctgactgtgtcctgccaaggcgggctgcccaaggaagcctgcatggagatctcatcgccagggtgccagccccctgcccagcggctgtgccagcctgtgctacccagcccagcctgccagctggttctgcaccagatactgaagggtggctcggggacatactgcctcaatgtgtctctggctgataccaacagcctggcagtggtcagcacccagcttatcatgcctggtcaagaagcaggccttgggcaggttccgctgatcgtgggcatcttgctggtgttgatggctgtggtccttgcatctctgatatataggcgcagacttatgaagcaagacttctccgtaccccagttgccacatagcagcagtcactggctgcgtctaccccgcatcttctgctcttgtcccattggtgagaatagccccctcctcagtgggcagcaggtctgagtactctcatatgatgctgtgattttcctggagttgacagaaacacctatatttcccccagtcttccctgggagactactattaactgaaataaatactcagagcctgaaaaaaaaanaaaaataaaaaaacaattcccggggctctcctaatgtgccggggggggcgacacaggcggggctctcgaatttggcgaccttgggtcattacgtgtgtttccctggcccccactctttttttttctacccacgggggcaacactccgcggggccgccccaaaaaggagggccgtaaaatccgaaaaccccggtacctggta

SEQ ID NO: 59676 - DNA, 2136 bp, Homo sapiens
cggacgcgtgggtcgacccacgcgtccgagggaagaacacaatggatctggtgctaaaaagatgccttcttcatttggctgtgataggtgctttgctggctgtgggggctacaaaagtacccagaaaccaggactggcttggtgtctcaaggcaactcagaaccaaagcctggaacaggcagctgtatccagagtggacagaagcccagagacttgactgctggagaggtggtcaagtgtccctcaaggtcagtaatgatgggcctacactgattggtgcaaatgcctccttctctattgccttgaacttccctggaagccaaaaggtattgccagatgggcaggttatctgggtcaacaataccatcatcaatgggagccaggtgtggggaggacagccagtgtatccccaggaaactgacgatgcctgcatcttccctgatggtggaccttgcccatctggctcttggtctcagaagagaagctttgtttatgtctggaagacctggggccaatactggcaagttctagggggcccagtgtctgggctgagcattgggacaggcagggcaatgctgggcacacacaccatggaagtgactgtctaccatcgccggggatcccggagctatgtgcctcttgctcattccagctcagccttcaccattactgaccaggtgcctttctccgtgagcgtgtcccagttgcgggccttggatggagggaacaagcacttcctgagaaatcagcctctgacctttgccctccagctccatgaccctagtggctatctggctgaagctgacctctcctacacctgggactttggagacagtagtggaaccctgatctctcgggcacttgtggtcactcatacttacctggagcctggcccagtcactgcccaggtggtcctgcaggctgccattcctctcacctcctgtggctcctccccagttccaggcaccacagatgggcacaggccaactgcagaggcccctaacaccacagctggccaagtgcctactacagaagttgtgggtactacacctggtcaggcgccaactgcagagccctctggaaccacatctgtgcaggtgccaaccactgaagtcataagcactgcacctgtgcagatgccaactgcagagagcacaggtatgacacctgagaaggtgccagtttcagaggtcatgggtaccacactggcagagatgtcaactccagaggctacaggtatgacacctgcagaggtatcaattgtggtgctttctggaaccacagctgcacaggtaacaactacagagtgggtggagaccacagctagagagctacctatccctgagcctgaaggtccagatgccagctcaatcatgtctacggaaagtattacaggttccctgggccccctgctggatggtacagccaccttaaggctggtgaagagacaagtccccctggattgtgttctgtatcgatatggttccttttccgtcaccctggacattgtccagggtattgaaagtgccgagatcctgcaggctgtgccgtccggtgagggggatgcatttgagctgactgtgtcctgccaaggcgggctgcccaaggaagcctgcatggagatctcatcgccagggtgccagccccctgcccagcggctgtgccagcctgtgctacccagcccagcctgccagctggttctgcaccagatactgaagggtggctcggggacatactgcctcaatgtgtctctggctgataccaacagcctggcagtggtcagcacccagcttatcatgcctggtcaagaagcaggccttgggcaggttccgctgatcgtgggcatcttgctggtgttgatggctgtggtccttgcatctctgatatataggcgcagacttatgaagcaagacttctccgtaccccagttgccacatagcagcagtcactggctgcgtctaccccgcatcttctgctcttgtcccattggtgagaatagccccctcctcagtgggcagcaggtctgagtactctcatatgatgctgtgattttcctggagttgacagaaacacctatatttcccccagtcttccctgggagactactattaactgaaataaatactcagagcctga

SEQ ID NO: 59677 - DNA, 2362 bp, Homo sapiens
ctaagggtatggggcaaggatcacatctaatgctagtgcctttggttgctggagggaagaacacaatggatctggtgctaaaaagatgccttcttcatttggctgtgataggtgctttgctggctgtgggggctacaaaagtacccagaaaccaggactggcttggtgtctcaaggcaactcagaaccaaagcctggaacaggcagctgtatccagagtggacagaagcccagagacttgactgctggagaggtggtcaagtgtccctcaaggtcagtaatgatgggcctacactgattggtgcaaatgcctccttctctattgccttgaacttccctggaagccaaaaggtattgccagatgggcaggttatctgggtcaacaataccatcatcaatgggagccaggtgtggggaggacagccagtgtatccccaggaaactgacgatgcctgcatcttccctgatggtggaccttgcccatctggctcttggtctcagaagagaagctttgtttatgtctggaagacctggggccaatactggcaagttctagggggcccagtgtctgggctgagcattgggacaggcagggcaatgctgggcacacacaccatggaagtgactgtctaccatcgccggggatcccggagctatgtgcctcttgctcattccagctcagccttcaccattactgaccaggtgcctttctccgtgagcgtgtcccagttgcgggccttggatggagggaacaagcacttcctgagaaatcagcctctgacctttgccctccagctccatgaccctagtggctatctggctgaagctgacctctcctacacctgggactttggagacagtagtggaaccctgatctctcgggcacttgtggtcactcatacttacctggagcctggcccagtcactgcccaggtggtcctgcaggctgccattcctctcacctcctgtggctcctccccagttccaggcaccacagatgggcacaggccaactgcagaggcccctaacaccacagctggccaagtgcctactacagaagttgtgggtactacacctggtcaggcgccaactgcagagccctctggaaccacatctgtgcaggtgccaaccactgaagtcataagcactgcacctgtgcagatgccaactgcagagagcacaggtatgacacctgagaaggtgccagtttcagaggtcatgggtaccacactggcagagatgtcaactccagaggctacaggtatgacacctgcagaggtatcaattgtggtgctttctggaaccacagctgcacaggtaacaactacagagtgggtggagaccacagctagagagctacctatccctgagcctgaaggtccagatgccagctcaatcatgtctacggaaagtattacaggttccctgggccccctgctggatggtacagccaccttaaggctggtgaagagacaagtccccctggattgtgttctgtatcgatatggttccttttccgtcaccctggacattgtccagggtattgaaagtgccgagatcctgcaggctgtgccgtccggtgagggggatgcatttgagctgactgtgtcctgccaaggcgggctgcccaaggaagcctgcatggagatctcatcgccagggtgccagccccctgcccagcggctgtgccagcctgtgctacccagcccagcctgccagctggttctgcaccagatactgaagggtggctcggggacatactgcctcaatgtgtctctggctgataccaacagcctggcagtggtcagcacccagcttatcatgcctggtcaagaagcaggccttgggcaggttccgctgatcgtgggcatcttgctggtgttgatggctgtggtccttgcatctctgatatataggcgcagacttatgaagcaagacttctccgtaccccagttgccacatagcagcagtcactggctgcgtctaccccgcatcttctgctcttgtcccattggtgagaatagccccctcctcagtgggcagcaggtctgagtactctcatatgatgctgtgattttcctggagttgacagaaacacctatatttcccccagtcttccctgggagactactattaactgaaataaatactcagagcctgaaaaaaaaaaaaacaacacaaaaaaaactccgggcgcatatatatgccggggggcgcgaacacaccgggctctgtcgacacggcgaccattggcccatgagctgtttttcctgacccccgttttcttgctcccacgggtgaaacttgcacggtctccccataagggaagccgaataaattcgaataacgcgggttacctgtaa

SEQ ID NO: 59678 - DNA, 2181 bp, Homo sapiens
ctaagggtatggggcaaggatcacatctaatgctagtgcctttggttgctggagggaagaacacaatggatctggtgctaaaaagatgccttcttcatttggctgtgataggtgctttgctggctgtgggggctacaaaagtacccagaaaccaggactggcttggtgtctcaaggcaactcagaaccaaagcctggaacaggcagctgtatccagagtggacagaagcccagagacttgactgctggagaggtggtcaagtgtccctcaaggtcagtaatgatgggcctacactgattggtgcaaatgcctccttctctattgccttgaacttccctggaagccaaaaggtattgccagatgggcaggttatctgggtcaacaataccatcatcaatgggagccaggtgtggggaggacagccagtgtatccccaggaaactgacgatgcctgcatcttccctgatggtggaccttgcccatctggctcttggtctcagaagagaagctttgtttatgtctggaagacctggggccaatactggcaagttctagggggcccagtgtctgggctgagcattgggacaggcagggcaatgctgggcacacacaccatggaagtgactgtctaccatcgccggggatcccggagctatgtgcctcttgctcattccagctcagccttcaccattactgaccaggtgcctttctccgtgagcgtgtcccagttgcgggccttggatggagggaacaagcacttcctgagaaatcagcctctgacctttgccctccagctccatgaccctagtggctatctggctgaagctgacctctcctacacctgggactttggagacagtagtggaaccctgatctctcgggcacttgtggtcactcatacttacctggagcctggcccagtcactgcccaggtggtcctgcaggctgccattcctctcacctcctgtggctcctccccagttccaggcaccacagatgggcacaggccaactgcagaggcccctaacaccacagctggccaagtgcctactacagaagttgtgggtactacacctggtcaggcgccaactgcagagccctctggaaccacatctgtgcaggtgccaaccactgaagtcataagcactgcacctgtgcagatgccaactgcagagagcacaggtatgacacctgagaaggtgccagtttcagaggtcatgggtaccacactggcagagatgtcaactccagaggctacaggtatgacacctgcagaggtatcaattgtggtgctttctggaaccacagctgcacaggtaacaactacagagtgggtggagaccacagctagagagctacctatccctgagcctgaaggtccagatgccagctcaatcatgtctacggaaagtattacaggttccctgggccccctgctggatggtacagccaccttaaggctggtgaagagacaagtccccctggattgtgttctgtatcgatatggttccttttccgtcaccctggacattgtccagggtattgaaagtgccgagatcctgcaggctgtgccgtccggtgagggggatgcatttgagctgactgtgtcctgccaaggcgggctgcccaaggaagcctgcatggagatctcatcgccagggtgccagccccctgcccagcggctgtgccagcctgtgctacccagcccagcctgccagctggttctgcaccagatactgaagggtggctcggggacatactgcctcaatgtgtctctggctgataccaacagcctggcagtggtcagcacccagcttatcatgcctgtgcctgggattcttctcacaggtcaagaagcaggccttgggcaggttccgctgatcgtgggcatcttgctggtgttgatggctgtggtccttgcatctctgatatataggcgcagacttatgaagcaagacttctccgtaccccagttgccacatagcagcagtcactggctgcgtctaccccgcatcttctgctcttgtcccattggtgagaatagccccctcctcagtgggcagcaggtctgagtactctcatatgatgctgtgattttcctggagttgacagaaacacctatatttcccccagtcttccctgggagactactattaactgaaataaatactcagagcctga

SEQ ID NO: 59679 - DNA, 1677 bp, Homo sapiens
ctaagggtatggggcaaggatcacatctaatgctagtgcctttggttgctggagggaagaacacaatggatctggtgctaaaaagatgccttcttcatttggctgtgataggtgctttgctggctgtgggggctacaaaagtacccagaaaccaggactggcttggtgtctcaaggcaactcagaaccaaagcctggaacaggcagctgtatccagagtggacagaagcccagagacttgactgctggagaggtggtcaagtgtccctcaaggtcagtaatgatgggcctacactgattggtgcaaatgcctccttctctattgccttgaacttccctggaagccaaaaggtattgccagatgggcaggttatctgggtcaacaataccatcatcaatgggagccaggtgtggggaggacagccagtgtatccccaggaaactgacgatgcctgcatcttccctgatggtggaccttgcccatctggctcttggtctcagaagagaagctttgtttatgtctggaagacctggggccaatactggcaagttctagggggcccagtgtctgggctgagcattgggacaggcagggcaatgctgggcacacacaccatggaagtgactgtctaccatcgccggggatcccggagctatgtgcctcttgctcattccagctcagccttcaccattactgaccaggtgcctttctccgtgagcgtgtcccagttgcgggccttggatggagggaacaagcacttcctgagaaatcagcctctgacctttgccctccagctccatgaccctagtggctatctggctgaagctgacctctcctacacctgggactttggagacagtagtggaaccctgatctctcgggcacttgtggtcactcatacttacctggagcctggcccagtcactgcccaggtggtcctgcaggctgccattcctctcacctcctgtggctcctccccagttccaggcaccacagatgggcacaggccaactgcagaggcccctaacaccacagctggccaagtgcctactacagaagttgtgggtactacacctggtcaggcgccaactgcagagccctctggaaccacatctgtgcaggtgccaaccactgaagtcataagcactgcacctgtgcagatgccaactgcagagagcacaggtatgacacctgagaaggtgccagtttcagaggtcatgggtaccacactggcagagatgtcaactccagaggctacaggtatgacacctgcagaggtatcaattgtggtgctttctggaaccacagctgcacaggtaacaactacagagtgggtggagaccacagctagagagctacctatccctgagcctgaaggtccagatgccagctcaatcatgtctacggaaagtattacaggttccctgggccccctgctggatggtacagccaccttaaggctggtgaagagacaagtccccctggattgtgttctgtatcgatatggttccttttccgtcaccctggacattgtccatggtattgaaagttccgagatcctgcaggctataccgtcctgttatgtgaatgtatttattattatctgttccatataacacattactttcctattaaacctgcttgtatattttatatcctaattttctgtttaatctt

SEQ ID NO: 59680 - DNA, 1487 bp, Homo sapiens
ctaagggtatggggcaaggatcacatctaatgctagtgcctttggttgctggagggaagaacacaatggatctggtgctaaaaagatgccttcttcatttggctgtgataggtgctttgctggctgtgggggctacaaaagtacccagaaaccaggactggcttggtgtctcaaggcaactcagaaccaaagcctggaacaggcagctgtatccagagtggacagaagcccagagacttgactgctggagaggtggtcaagtgtccctcaaggtcagtaatgatgggcctacactgattggtgcaaatgcctccttctctattgccttgaacttccctggaagccaaaaggtattgccagatgggcaggttatctgggtcaacaataccatcatcaatgggagccaggtgtggggaggacagccagtgtatccccaggaaactgacgatgcctgcatcttccctgatggtggaccttgcccatctggctcttggtctcagaagagaagctttgtttatgtctggaagacctggggccaatactggcaagttctagggggcccagtgtctgggctgagcattgggacaggcagggcaatgctgggcacacacaccatggaagtgactgtctaccatcgccggggatcccggagctatgtgcctcttgctcattccagctcagccttcaccattactgaccaggtgcctttctccgtgagcgtgtcccagttgcgggccttggatggagggaacaagcacttcctgagaaatcagcctctgacctttgccctccagctccatgaccctagtggctatctggctgaagctgacctctcctacacctgggactttggagacagtagtggaaccctgatctctcgggcacttgtggtcactcatacttacctggagcctggcccagtcactgcccaggtggtcctgcaggctgccattcctctcacctcctgtggctcctccccagttccaggcaccacagatgggcacaggccaactgcagaggcccctaacaccacagctggccaagtgcctactacagaagttgtgggtactacacctggtcaggcgccaactgcagagccctctggaaccacatctgtgcaggtgccaaccactgaagtcataagcactgcacctgtgcagatgccaactgcagagagcacagctgcacaggtaacaactacagagtgggtggagaccacagctagagagctacctatccctgagcctgaaggtccagatgccagctcaatcatgtctacggaaagtattacaggttccctgggccccccccttgacttggcaatgcggtaaccagcccaacctttaagggctggctgaagagacaagttccccccttggcattctgtgtttcctgtaattcgaatattgggttccccttttttccccggttccaaaacaccccttggggaccacattttggttcccaagcggctacatttggcacaa

SEQ ID NO: 59681 - DNA, 1034 bp, Homo sapiens
  misc_feature (942)..(942): n is a, c, g, or t
  misc_feature (948)..(948): n is a, c, g, or t
  misc_feature (957)..(957): n is a, c, g, or t
  misc_feature (962)..(962): n is a, c, g, or t
  misc_feature (964)..(964): n is a, c, g, or t
  misc_feature (970)..(970): n is a, c, g, or t
  misc_feature (974)..(974): n is a, c, g, or t
  misc_feature (979)..(980): n is a, c, g, or t
  misc_feature (988)..(988): n is a, c, g, or t
  misc_feature (996)..(997): n is a, c, g, or t
  misc_feature (1004)..(1004): n is a, c, g, or t
  misc_feature (1015)..(1015): n is a, c, g, or t
  misc_feature (1019)..(1019): n is a, c, g, or t
ctaagggtatggggcaaggatcacatctaatgctagtgcctttggttgctggagggaagaacacaatggatctggtgctaaaaagatgccttcttcatttggctgtgataggtgctttgctggctgtgggggctacaaaagtacccagaaaccaggactggcttggtgtctcaaggcaactcagaaccaaagcctggaacaggcagctgtatccagagtggacagaagcccagagacttgactgctggagaggtggtcaagtgtccctcaaggtcagtaatgatgggcctacactgattggtgcaaatgcctccttctctattgccttgaacttccctggaagccaaaaggtattgccagatgggcaggttatctgggtcaacaataccatcatcaatgggagccaggtgtggggaggacagccagtgtatccccaggaaactgacgatgcctgcatcttccctgatggtggaccttgcccatctggctcttggtctcagaagagaagctttgtttatgtctggaagacctggggccaatactggcaagttctagggggcccagtgtctgggctgagcattgggacaggcagggcaatgctgggcacacacaccatggaagtgactgtctaccatcgccggggatcccggagctatgtgcctcttgctcattccagctcagccttcaccattactgaccaggtgcctttctccgtgagcgtgtcccagttgcgggccttggatggagggaacaagcacttcctgagaaatcagcctctgacctttgccctccagctccatgaccctagtggctatctggctgaagctgacctctcctacacctgggactttggagacagtagtggaaccctgatctctcgggcacttgtggtcactcatacttacctggagcctggcccagtcactgccggtgctggggggntcctcnccctgggcncccgncngccccntggncggcnnggggcctnccagggcnngccccangggtcccggcnccgncctggcttgttgccg

SEQ ID NO: 59682 - DNA, 1830 bp, Homo sapiens
caattttaggggtttgatatacaaaaaagaatgccagggtttgagagtgactctgtatttatctttcagggagccaggtgtggggaggacagccagtgtatccccaggaaactgacgatgcctgcatcttccctgatggtggaccttgcccatctggctcttggtctcagaagagaagctttgtttatgtctggaagacctggggccaatactggcaagttctagggggcccagtgtctgggctgagcattgggacaggcagggcaatgctgggcacacacaccatggaagtgactgtctaccatcgccggggatcccggagctatgtgcctcttgctcattccagctcagccttcaccattactgaccaggtgcctttctccgtgagcgtgtcccagttgcgggccttggatggagggaacaagcacttcctgagaaatcagcctctgacctttgccctccagctccatgaccctagtggctatctggctgaagctgacctctcctacacctgggactttggagacagtagtggaaccctgatctctcgggcacttgtggtcactcatacttacctggagcctggcccagtcactgcccaggtggtcctgcaggctgccattcctctcacctcctgtggctcctccccagttccaggcaccacagatgggcacaggccaactgcagaggcccctaacaccacagctggccaagtgcctactacagaagttgtgggtactacacctggtcaggcgccaactgcagagccctctggaaccacatctgtgcaggtgccaaccactgaagtcataagcactgcacctgtgcagatgccaactgcagagagcacaggtatgacacctgagaaggtgccagtttcagaggtcatgggtaccacactggcagagatgtcaactccagaggctacaggtatgacacctgcagaggtatcaattgtggtgctttctggaaccacagctgcacaggtaacaactacagagtgggtggagaccacagctagagagctacctatccctgagcctgaaggtccagatgccagctcaatcatgtctacggaaagtattacaggttccctgggccccctgctggatggtacagccaccttaaggctggtgaagagacaagtccccctggattgtgttctgtatcgatatggttccttttccgtcaccctggacattgtccagggtattgaaagtgccgagatcctgcaggctgtgccgtccggtgagggggatgcatttgagctgactgtgtcctgccaaggcgggctgcccaaggaagcctgcatggagatctcatcgccagggtgccagccccctgcccagcggctgtgccagcctgtgctacccagcccagcctgccagctggttctgcaccagatactgaagggtggctcggggacatactgcctcaatgtgtctctggctgataccaacagcctggcagtggtcagcacccagcttatcatgcctggtcaagaagcaggccttgggcaggttccgctgatcgtgggcatcttgctggtgttgatggctgtggtccttgcatctctgatatataggcgcagacttatgaagcaagacttctccgtaccccagttgccacatagcagcagtcactggctgcgtctaccccgcatcttctgctcttgtcccattggtgagaatagccccctcctcagtgggcagcaggtctgagtactctcatatgatgctgtgattttcctggagttgacagaaacacctatatttcccccagtcttccctgggagactactattaactgaaataaatactcagagcctga

SEQ ID NO: 59683 - DNA, 1974 bp, Homo sapiens
cggacgcgtgggtcgacccacgcgtccgagggaagaacacaatggatctggtgctaaaaagatgccttcttcatttggctgtgataggtgctttgctggctgtgggggctacaaaagtacccagaaaccaggactggcttggtgtctcaaggcaactcagaaccaaagcctggaacaggcagctgtatccagagtggacagaagcccagagacttgactgctggagaggtggtcaagtgtccctcaaggtcagtaatgatgggcctacactgattggtgcaaatgcctccttctctattgccttgaacttccctggaagccaaaaggtattgccagatgggcaggttatctgggtcaacaataccatcatcaatgggagccaggtgtggggaggacagccagtgtatccccaggaaactgacgatgcctgcatcttccctgatggtggaccttgcccatctggctcttggtctcagaagagaagctttgtttatgtctggaagacctgggaccaggtgcctttctccgtgagcgtgtcccagttgcgggccttggatggagggaacaagcacttcctgagaaatcagcctctgacctttgccctccagctccatgaccctagtggctatctggctgaagctgacctctcctacacctgggactttggagacagtagtggaaccctgatctctcgggcacttgtggtcactcatacttacctggagcctggcccagtcactgcccaggtggtcctgcaggctgccattcctctcacctcctgtggctcctccccagttccaggcaccacagatgggcacaggccaactgcagaggcccctaacaccacagctggccaagtgcctactacagaagttgtgggtactacacctggtcaggcgccaactgcagagccctctggaaccacatctgtgcaggtgccaaccactgaagtcataagcactgcacctgtgcagatgccaactgcagagagcacaggtatgacacctgagaaggtgccagtttcagaggtcatgggtaccacactggcagagatgtcaactccagaggctacaggtatgacacctgcagaggtatcaattgtggtgctttctggaaccacagctgcacaggtaacaactacagagtgggtggagaccacagctagagagctacctatccctgagcctgaaggtccagatgccagctcaatcatgtctacggaaagtattacaggttccctgggccccctgctggatggtacagccaccttaaggctggtgaagagacaagtccccctggattgtgttctgtatcgatatggttccttttccgtcaccctggacattgtccagggtattgaaagtgccgagatcctgcaggctgtgccgtccggtgagggggatgcatttgagctgactgtgtcctgccaaggcgggctgcccaaggaagcctgcatggagatctcatcgccagggtgccagccccctgcccagcggctgtgccagcctgtgctacccagcccagcctgccagctggttctgcaccagatactgaagggtggctcggggacatactgcctcaatgtgtctctggctgataccaacagcctggcagtggtcagcacccagcttatcatgcctggtcaagaagcaggccttgggcaggttccgctgatcgtgggcatcttgctggtgttgatggctgtggtccttgcatctctgatatataggcgcagacttatgaagcaagacttctccgtaccccagttgccacatagcagcagtcactggctgcgtctaccccgcatcttctgctcttgtcccattggtgagaatagccccctcctcagtgggcagcaggtctgagtactctcatatgatgctgtgattttcctggagttgacagaaacacctatatttcccccagtcttccctgggagactactattaactgaaataaatactcagagcctga

SEQ ID NO: 59684 - DNA, 1204 bp, Homo sapiens
  misc_feature (10)..(10): n is a, c, g, or t
tatcgggctntagaacgagctgcgtggtgaagaagcttgtttatgtctggaagacctggggccaatactggcaagttctagggggcccagtgtctgggctgagcattgggacaggcagggcaatgctgggcacacacaccatggaagtgactgtctaccatcgccggggatcccggagctatgtgcctcttgctcattccagctcagccttcaccattactgaccaggtgcctttctccgtgagcgtgtcccagttgcgggccttggatggagggaacaagcacttcctgagaaatcagcctctgacctttgccctccagctccatgaccctagtggctatctggctgaagctgacctctcctacacctgggactttggagacagtagtggaaccctgatctctcgggcacttgtggtcactcatacttacctggagcctggcccagtcactgcccaggtggtcctgcaggctgccattcctctcacctcctgtggctcctccccagttccaggcaccacagatgggcacaggccaactgcagaggcccctaacaccacagctggccaagtgcctactacagaagttgtgggtactacacctggtcaggcgccaactgcagagccctctggaaccacatctgtgcaggtgccaaccactgaagtcataagcactgcacctgtgcagatgccaactgcagagagcacaggtatgacacctgagaaggtgccagtttcagaggtcatgggtaccacactggcagagatgtcaactccagatactgaagggtggctcggggacatactgcctcaatgtgtctctggctgataccaacagcctggcagtggtcagcacccagcttatcatgcctggtcaagaagcaggccttgggcaggttccgctgatcgtgggcatcttgctggtgttgatggctgtggtccttgcatctctgatatataggcgcagacttatgaagcaagacttctccgtaccccagttgccacatagcagcagtcactggctgcgtctaccccgcatcttctgctcttgtcccattggtgagaatagccccctcctcagtgggcagcaggtctgagtactctcatatgatgctgtgattttcctggagttgacagaaacacctatatttcccccagtcttccctgggagactactattaactgaaataaatactcagagcctga

SEQ ID NO: 59685 - DNA, 476 bp, Homo sapiens
ttgtgcgcgtggagtgagacagaaaacctggagcccgatctcccggccagcgactccctccttctgggtgtgcggctgaagactggaagcaggttgccttgcctgctgcaagcccgccgtacctaccccttctccgcgtgcgcccctccctgtgcctgcgcattaccggctagccggcggcgggcgctgcagcccctacgtgattctgcggctcactcccctcggatggtctttccacccgagtttttcccgggaagaggctctcaagactagccagtgcaggaggaggagtcgaactctggatagcctgtttataaagccctaactgtgccgatgttgaccgttttctgaaactcctcctccaaaacccacgccaaaccacaagatgaaggaaattcacacatcaggtattgggaagggcgttggctgcggtctgtgacgttttaaacgtcttcagtaaacggtactgaccgcta

SEQ ID NO: 59686 - DNA, 919 bp, Homo sapiens
ttgtgcgcgtggagtgagacagaaaacctggagcccgatctcccggccagcgactccctccttctgggtgtgcggctgaagactggaagcaggttgccttgcctgctgcaagcccgccgtacctaccccttctccgcgtgcgcccctccctgtgcctgcgcattaccggctagccggcggcgggcgctgcagcccctacgtgattctgcggctcactcccctcggatggtctttccacccgagtttttcccgggaagaggctctcaagactagccagtgcaggaggaggagtcgaactctggatagcctgtttataaagccctaactgtgccgatgttgaccgttttctgaaactcctcctccaaaacccacgccaaaccacaagatgaaggaaattcacacatcaggatgccaaaaaccatggaagacttctgatgttctgggagggttgacaaagatggaccttaaattctagaatttaggtattcatggttgagatcctgaagaaaacattttctgctgagcagaagcaatttaataattgcctcccttcatttcagaatccagaagtgtctgcagccaaccaaagagggaatgtttgatggacagaagttggaatggaaggagaaaatggcttattttagttaaaatgttttacttttggaaatttttttaaaaacttattttcacatatcacataaatacattgttaggacccctcccagggccatagaagtggcctgcacagacatctggttttaaagtggcagtacagaagcaagctggtttcactgtccccacagaaaaccaaaaatatacagagctgtgattttccccagcaacagtccagaactcatatatgaggatgagacagatcctagggccataaagaaaaaaacttctttggaaaaaaactcca

SEQ ID NO: 59687 - DNA, 667 bp, Homo sapiens
ttgtgcgcgtggagtgagacagaaaacctggagcccgatctcccggccagcgactccctccttctgggtgtgcggctgaagactggaagcaggttgccttgcctgctgcaagcccgccgtacctaccccttctccgcgtgcgcccctccctgtgcctgcgcattaccggctagccggcggcgggcgctgcagcccctacgtgattctgcggctcactcccctcggatggtctttccacccgagtttttcccgggaagaggctctcaagactagccagtgcaggaggaggagtcgaactctggatagcctgtttataaagccctaactgtgccgatgttgaccgttttctgaaactcctcctccaaaacccacgccaaaccacaagatgaaggaaattcacacatcaggatgccaaaaaccatggaagacttctgatgttctgggagggttgacaaagatggaccttaaattctagaatttaggtattcatggttgagatcctgaagaaaacattttctgctgagcagaagcaatttaataattgcctcccttcattgtaagttttttatttcttccttatgtctgattaatcccccaatataaacttcaattaattgagcagctctgcaaaatatatgaataaaacaccacatattaagatattata

SEQ ID NO: 59688 - DNA, 338 bp, Homo sapiens
ctttcattttctctctcctggccattgtagtattttatgtcatatattttacttctaaatgtgttatatattccacaatacgttgttattaattgtggttaaattatggagatttctagcaagtcttatattacccatttatttaccatttctggtgtcctttattcttttgtctagattggtttctatctgttattttcctttagcctcaaggacatcatttaccatttctttagtgcaggacggcgagaggcgaattatttcttttatatgtctgacaaaatctttattttacttttgtgtttgaaaggtactccatataagtataaaattccaga

SEQ ID NO: 59689 - DNA, 416 bp, Homo sapiens
cacaggctggacacaggaaccacaactttgggttaagttacccacacttctatttctgggatactgcagcatatatgtgtcctaaaatgcttttggaaaacaggagtagccaagctcaacacatttttaccaacacctactagtttccacttttaattcaagtaaccaatacttgattatttagtagctacatgaggactgcagccctggattctgccaccaacatgctgatacctgacacctattgactcacccaattaaattcttctctctcaggatcacattcctgtttttatgtgggtgaacagggactgagacaatcagtgctgtagttatttttcagctcagaaggaaattgttgtcatttgacacctagatgcataacccaaattgaaaataaactatatattatcatt

SEQ ID NO: 59690 - DNA, 317 bp, Homo sapiens
aaggcagagaaaataacgtgagcaaagacagtgatgagaaaacctacagctaatgttaagggaggatgaagggagttagaggaacccatggggtaagaccatggatggcctagagtagcaatctaagatatctagatatcatttgatagttattctgcattgcacatctctccttgtatacagttttctgcctattaaaatgtctatcttaaaatgtactgaccatgtggtactaataatagaactttccagatgagaccctcaactatttactgctgaaagctaatggggcaagaatcgacacgaggataacagga

SEQ ID NO: 59691 - DNA, 415 bp, Homo sapiens
agattttcctttgtgtattagctacctattgctgcatagcaaattgccccaaaacttagtgatcttaaaacaacaaacagtttttatttcataatttctgtggatcaggaatccaggcatggcttagctgagtcctctggctcagggtctctcacagactgcaattaaggttggtcagggcactgtcatttcaaggctcaactaggaaaattgtctcaaaagaaaaataaaataaaataaaacaaaacaaaacaaaattagccaggtgtggtggtgctcacttgtaatcccagctactcaggagtctgaggcaggagaatagcttgaacctaggaggcagagtttgcagtgagtcgagatcgcgccactgcattccagccttggcagcagagcaagactccgtgtcaaaaaaaaa

SEQ ID NO: 59692 - DNA, 324 bp, Homo sapiens
ccattcatctattgaaggatatcttagttgcttttacacattttcatctatgtgtcctgtgttacagccacttcaaactatcttcaggtctctgaatgtgccgtgtactttaattcttctgttccactgaccatgttgttttctctgtctggaacttcctgtatgcatcctttcactctactgcacacctcacgcacagccagattctactggatgcccttctcatattcttttatactattgcttatcaagcttcaatgtgcaattagttatccacagatcttttaaaaatgtagagcctgattcaataggtgtgcggtggaa

SEQ ID NO: 59693 - DNA, 1127 bp, Homo sapiens
ccaaggcaggaacaaaggaaacagaatgacatcatacctggaaaaaataatctgtcaaatgtggaaaatggacatctctcaagaaaaagatcctcttctgattcatgggaacctacttcagcaggctctaagcagaataaattccctgaaaaaagaaaaaggaactctgtggactcagatctgaaaagcacaagagaatctatgataccaaaagcaagagagtccttccttgagaagcgtcctgatggaccacatcagaaagaaaaatttataaaacatattgcactgaagacacctggtgatgtgttgcgcttagaagatatatccaaggaaccgagtgatgaaactgatggctcttctgcaggcttggcaccttcaaattctggcaattctggccaccattctaccaggaatagtgaccaaatccaagtggcaggtaccaaggagactaagatgcagaaaccccacttacctttatctcaggaaaagtctgcaattaaaaaagctagcaaccttcagaaaaataaaaccgctagctccacgacaaaggagaaggagacaaaactacctttactttcccgtgttccaagtgctggttcctctctagtaccattaaatgctaaaaattgtgctcttccagtttctaaaaaagataaagagcgttcctcatctaaagaatgttctgggcattctacagaatccaccaaacacaaggaacacaaagcaaagactaataaggccgattctaatgtatcttcagggaaaatttctgggggacctttgcgctcagaatatggcactcctacaaagtctccccctgctgctttggaagttgtgccatgtatcccaagccctgcagcaccttcagataaagccccttcagaaggagagagttcaggaaattccaatgcaggtagcagtgcactgaaaagaaaactaaggggtgattttgatagtgatgaagaaagtttaggttacaacctagacagtgatgaggaagaggaaacattaaagtcactggaagaaataatggctttgaacttcaatcagactcctgcagctacaggaaagcctcctgctctttccaaggggcttagatctctgtcatcagactatacagtaagtag

SEQ ID NO: 59694 - DNA, 271 bp, Homo sapiens
tctgttgtgaaatgatagtgatattcacttctatagtttaaaaatatgttctgtgcagcataaataattgataagcagtgttatcttgtactttcagattggagttgcctttgagagtcaaagatttgtagctcacagaaaataaagaagtactgtgtgggtgtgcctgggagggagttttgctaagaattcttactaaataaagttcaatcagtcaaatgttattgtactcttcaaattctccagggaaataaattgccagcttccattt

SEQ ID NO: 59695 - DNA, 386 bp, Homo sapiens
gccaaagcctgccagaagctagagaacaatgaagcttattgagaaagtccttacaggtcaggctcctggggcagaacgaaggcagagaaagactccaagaggatcctgggggctcctagagaagctaactgcacacagtacctataaagtttattatgaggattaatttagcacaatgcaggtcttggccactgaaaagcttattaaatatttttttctgtcttctttcttaactatcttgattgttatccactattagatgcttggccttgcaaaaagaagctttcagtcaccaagttatttcactgagaaatcttgagattttggccgaaaagtaactccagagtgctttccttagcctgtcatctaatcagttcatctactcc

SEQ ID NO: 59696 - DNA, 362 bp, Homo sapiens
gctttatggcctaagagacagttaatatcataaatcatctatgaattcttggaaaagaatgtttcctgcaaattgtctgcaagtttctataaatgtacttagatcaaattttctgtgctcttagtaatgttttgcctctttagcaatcacagagagatttgcttaaaaatcttgaacactgagagtaccatggccacaggaagatttttattctagatgacatggggcatttccggtagttgtacagcagaataaatttacatattctttttttttttagttcattttcctcttcactttactctttatatttctagttagttataacataatgtctcgacatcatgacacagtgcataggg

SEQ ID NO: 59697 - DNA, 277 bp, Homo sapiens
tatcactgttacctgacaatgtgacgttacatacaaaaagccacaaagactccagaaaaaaactattagacctggtaaatgaatacagtaaagttgcaggatacaaaatcaacctacaaaaaatcagtagtgtttctaagtactaacaacaaactatctgaaaaagaaatcaagaaaacaataccatttataatagctaccaagtaaaataaaatacgtaggaatacatttaaccaacaaggtgaaagagccatacattgaaaactgtaaaacattg

SEQ ID NO: 59698 - DNA, 536 bp, Homo sapiens
aaaaaaacggataaattagtattaaaaatgggttgtttattttttaggcttttaattacaaataaaacaggaggtattttggcttatattggcacagtgccattataagtggtattataattatgtgttgacacttcaatcctatgaactttgctaaaaataaagattgtctatacttttctaaactgtcgatttcttcctttggcaaccttctttactcaatttcagcttgaacttcttgtactcatagtctttatcgccccagatttctggaaggcttgatagtgttggactcaaatatatacttgtaacagactcctaagcaaataaggctaatggttataaaaggcttctaaaatctggatgtaaatactgagttgtgttgataatttgcatgattaggggaacactggggaggattccagacatcttagagcgcttctgaagtcctaaaaataatttgcatgttttggaatgaaactatgatgaatattctgtgctcacttttgagtctcatgatgttctcaggattaaaa

SEQ ID NO: 59699 - DNA, 303 bp, Homo sapiens
ttttaaacaaccaacaattctcttcaggacaagtatttaccatacaagatcatttcttatatagaatctctttcctttataaccttctttgcatagccagagtgtgacatattaccaaacccaatagtaacagactcagggattgtaaaactttcatgttccctttttatttgtaactattaaccctgctataaggataataattaagcaaaatactagagcaatggaaaccaatatttcagttagaaggtgctactgtgtatagctcccagcaaatagtaaagtgagtagcagttcctcaaa

SEQ ID NO: 59700 - DNA, 398 bp, Homo sapiens
ctgagcgagcatctgatataaaatgagataggctttatttaagttgcatcaatgagtcagcagtttccataagaagcctatggggtcttagggtagaaaatccaggataaagtcctggtgtgtggctcatgcgtgtagttctagcacctttagaggccagggtgggaggaccacttgaggccaggagtttgagaccaggagtttgaggcaacatagcaagaccctttctctacaaaaaatttaaaaattacccaggcatggtggcgaatgccatatagtcccaggtactgcagagactgaggcaggaggattgcttgagcccaggagttcaaggctacaatgagctatgatcacactactacactccagcctgggcaacagagcaagaccctgtgtgt

SEQ ID NO: 59701 - DNA, 866 bp, Homo sapiens
taaagacacctttccccagccacatctggcacagtagtgtggcggaattgacatcgttactccagtcacctagagcagggtctcagcacccaaccttcccctcattgtctccccttcggcgtcttgagaaagggaaccagtccctaatcttttaggcacgtggctcccacccctctatcttggggaatgggcgtgcgccctgaaagctcagtagtgtcctccctctccacctcctgtagttctcatggtgccagcgcctggcccacccacattgtgcaatgaacggcctggcttcgtcattctatgtagaatgttttagagttcccccgtcggagacagcttcaaatttttgccatgctattttatcaatacgaaatcttagtgccaaggttcttttgctttaaggttttcccttagaaacacccagatggcggccgtcttgcttaactcacaggtgaagcagagaacgctccctgaaacaggcttgaatctgcaaagaatatctgaacgttgttgggcaagttaattttcgtgttttgcaccttaaatgagtaaaagaatatggcgctctttaaacagttgggagacagggcggagagggagaatgctcaaaggcactgtggtagttaaatctttttgagaggcttaaattttcatcaggctggtatgaactggcagttctcagccactgctactaacctacttttttagaatgtaggtttcaaattatagcccacagatataagctactctatactaaaatgctgagtaattttcattttgagtaactaaaggcaaacattcttgatattgcattgaggagcactataatacataccttggttttcttttggtactaaccaata

SEQ ID NO: 59702 - DNA, 1147 bp, Homo sapiens
taaagacacctttccccagccacatctggcacagtagtgtggcggaattgacatcgttactccagtcacctagagcagggtctcagcacccaaccttcccctcattgtctccccttcggcgtcttgagaaagggaaccagtccctaatcttttaggcacgtggctcccacccctctatcttggggaatgggcgtgcgccctgaaagctcagtagtgtcctccctctccacctcctgtagttctcatggtgccagcgcctggcccacccacattgtgcaatgaacggcctggcttcgtcattctatgtagaatgttttagagttcccccgtcggagacagcttcaaatttttgccatgctattttatcaatacgaaatcttagtgccaaggttcttttgctttaaggttttcccttagaaacacccagatggcggccgtcttgcttaactcacaggtgaagcagagaacgctccctgaaacaggcttgaatctgcaaagaatatctgaacgttgttggccctgggactaaaataaaagagaaggtaatagtttggttttgcagctgttctggatgtttaccatcgagatgattatttatagcagctgagttgaaaactaaagtatttgaggcacagaagataggttttctttttttgtaagtactgacttaagtgtgacctttagcgagtgtgggtgaaaatctggtaaagtcctagcaaatcaaaattgaaagcgtgaaagctgacgtgcagtctggctttaccctctacccttattttcccttctccccacctgaagacacatcgtgtagggccatcgatttttgttttaaacaaacaaaatgctaaaatatcaaattatgctggagcattcataacatgaaatttagtgttccagtgtttttcattgtacagttcagtggcactaagtctattgaaactgttgtgagagccatactttcgacaaggtagttaaaacatggaaattttggaacgatgttcttttggacagatttttgaggagttgaatttcaggactgtattgcaaaatgagataaaaatcttgatcttgttaagtaaacacaaagaattgatgtgccttcttcttagctttgtccttgcagaaaacagaagaggaagcactttga

SEQ ID NO: 59703 - DNA, 473 bp, Homo sapiens
aattttttttttgttcaacccctcttcccctctcccactcctcccaccccattttcaccttccttccacccccacctgggtgtacttttgggggtactggccactgtgatgtgagaaacttcacatcctgttaaccagccactccttccatcccctccctccctgttcccttttcctttcctccttttccctaccccattgccctgaagacccagctccctttttgggaggttatgttgtgggggggaggagggcatagtgggagctgcaaatgcctatggaggggaggtgggagaagacaggaattagaacccagtggtttttgtttacctgtgatcagctccctactgttagggactcagctagcatccagtgttcttaaggtctttaggcagatagagaaataagttggagaaagggaagtgttttaaaacataccatgtaggtttgtgcagttagagatcttccacatc

SEQ ID NO: 59704 - DNA, 327 bp, Homo sapiens
gactacaggtgtgccccacgatgcctggctaatttttaaggtttttgtagagatggggtcttcctatcttgcacagactggtgtggaattcctagctcaagcaattttcctgtctcagcctcacaaagtgctggtattacccgtgtgagccaccgtgctcagcccagtcatgtatttctaattattgtatttgtgaactaatctatgaacaacaaaaacaaacaaacaaacaaaaagggtggcatttctgggccaccaggaaggtggattggggttgcagctattttcaaattatattaaaagcaggatcccagttagagcgctatc

SEQ ID NO: 59705 - DNA, 380 bp, Homo sapiens
tctcagtaagtagtctttctaggcaggatttttcttccctgcttaagggggttagacctccaaaatatttgtcagggtctcttttccttttaagggtttaacccacaatcttttctgtatccgttttgtaccagctccattcctattctcaagctttggtgcataaaaccttagtttaggtgtctatatataccactactttggcctgaaaattagaatcgtggctcacacttgattctaagttccctagtagtggcgtgtttcctttctacgtgcttactttcccacctgacctgcttttccccaccgtgcagtctgataattggtattatttgttttgattggatctcagaaattacctctttagaccgagctgtgct

SEQ ID NO: 59706 - DNA, 283 bp, Homo sapiens
ctctatgatgacctgcgctgtgacccggagcgcgatcacttccgcaagatctgtgaggaatatatcacgggcaagtttgacccccaggacatgaaactaaaaacttggacctcatcctcaattattttctcctttcaactctgttgaccctctgtctggtcttcctctagaaggttttaccgcagaaattgatgtgtgctccctgccctcgtcactgcccaagcccgggcctgcacatactcactggactgttccagttttgacagctgccagtcttctgccc

SEQ ID NO: 59707 - DNA, 391 bp, Homo sapiens
caaaggctaactcttaataagaagatgaggaaataaaatcagttcaaaagggaggaatatgcattcccagaattaaaggaccccgggtccagtttgaggaggactcttggccagatacaagccccttgtataatgctcaagagggaggagaccttatttgctccttggaggtgtctagtatgaaaactgcttattttgaaatgtgattctagccattatcaggagcaactgcagataattcccatttacagaggaatgctgctaacaggtgtgggagggagcagcgacaacgaaaaattctgctgtcataggtcacgtttatgttggttttcttgaaaatcaagggtagaaaatttcatgcctctagagagagagagaaaaacacatgagg

SEQ ID NO: 59708 - DNA, 458 bp, Homo sapiens
  misc_feature (173)..(173): n is a, c, g, or t
ttttgtaaaaatgtgtgagagggcagctctcatgttgctgcagggctctggagagagacaggcctgacctctcctctccactgtcttgttttgatcttaggcaagttattttagtctgttcctcccaggggacctggtgtccacatgaagattagagagagggtgtcaagaancctggcaggtgctaagcagtagatgctgctgaaatagatggcagtgcttctcaaagcatgttccccagtccaagagcctcagggtcacctgggaacttgttagaaatgaatattctcaggcctagactccaacaggaactccgcaggtgggcctagtcatctgtgtattaacaagcacaagaccatcctcgtgtacgctggagtttgagaaccactgataacctcactaaccattataaggtcaacttaaaggtacctcacttatttttttttttcttaattaaa

SEQ ID NO: 59709 - DNA, 2252 bp, Homo sapiens
ttttttttttttctattacttttccccccccctaactaacggactattattgttgttgttttaaatttagctcttagggcttagctatttgggttttcttgcggtgtccggctcccgtctccctggctcccccgcccgccctgcggccccagcgcccctcgctctcatccagcccgcgaggagtgcgggcgccgcgccgcctttaaagcgaggccagggagcgaggcggtgaccggccgagatccggccctcgcctcctccctcggtggcgctagggctcccggcctctcttcctcagtgcgggcggagaagcgaaagcggatcgtcctcggctgccgccgccttctccgggactcgcgcgcccctccccgcgcgcccacccacccagtccggctggactgcggcagccgcgcggctcaccccggcaggatgttcgcagccgggctggctcccttctacgcctccaacttcagcctctggtcggccgcttactgctcctcggccggcccaggcggctgctccttccccttggaccccgccgccgtcaaaaagccctccttctgcatcgcagacattctgcacgccggcgtgggggatctgggggcggccccggagggcctggcaggggcctcggccgccgccctcaccgcgcacttgggctcggttcacccgcacgcctctttccaagcggcggccagatccccgcttcgacccaccccagtggtggcgccctccgaagtcccggctggcttcccgcagcggctgtctccgctctcagccgcctaccaccaccatcacccgcaacaacaacagcagcagcaacagccgcagcagcaacagcctccgcctccgccccgggctggcgccctgcagcccccggcctcggggacgcgagtggttccgaacccccaccacagtggctctgccccggccccctccagcaaagacctcaaatttggaattgaccgcattttatctgcagaatttgacccaaaagtcaaagaaggcaacacgctgagagatctcacttccctgctaaccggtgggcggcccgccggggtgcacctctcaggcctgcagccctcggccggccagttcttcgcatctctagatcccattaacgaggcttctgcaatcctgagtcccttaaactcgaacccaagaaattcagttcagcatcagttccaagacacgtttccaggtccctatgctgtgctcacgaaggacaccatgccgcagacgtacaaaaggaagcgttcatggtcgcgcgctgtgttctccaacctgcagaggaaaggcctggagaaaaggtttgagattcagaagtacgtgaccaagccggaccgaaagcagctggcggcgatgctgggcctcacggacgcacaggtgaaggtgtggttccagaaccggcggatgaagtggcggcactccaaggaggcccaggcccaaaaggacaaggacaaggaggctggcgagaagccatcaggtggagccccggctgcggatggcgagcaggacgagaggagccccagccgttctgaaggcgaggctgagagcgagagcagcgactccgagtccctggacatggcccccagcgacacggagcggactgaggggagtgagcgttctctgcaccaaacaacagttattaaggccccggtcactggcgccctcattaccgccagcagtgctgggagtggtgggagcagcggcggcggcggcaatagtttcagcttcagcagcgccagcagtcttagtagcagcagcaccagtgcgggttgcgccagcagccttggcggcggcggcgcctcggagcttctccctgcaacacagcccacagccagcagcgctcccaaaagccccgagccagcccaaggcgcgcttggctgcttatagactgtactagggcggaggggatccgggccttgcgtgcagcctcccaaccatgggctgggttttgtgcttactgtatgttggcgacttggtagggcaggagacgcagcgtggagcctacctcccgacattcacgcttcgccccacgctgctccgactggctgcagcggacactgcccaaagcagaggggagtctcagtgtcctgctagccagccgaacacttctctccggaagcaggctggttcgactgtgaggtgtttgactaaactgtttctctgactcgccccagaggtcgtggctcaaaggcacttaggacgccttaaatttgtaaataaaatgtttactacggttaaaaaaa

SEQ ID NO: 59710 - DNA, 1262 bp, Homo sapiens
acgggttctctcttgacttcgctcaataaaaatctcacttccctgctaaccggtgggcggcccgccggggtgcacctctcaggcctgcagccctcggccggccagttcttcgcatctctagatcccattaacgaggcttctgcaatcctgagtcccttaaactcgaacccaagaaattcagttcagcatcagttccaagacacgtttccaggtccctatgctgtgctcacgaaggacaccatgccgcagacgtacaaaaggaagcgttcatggtcgcgcgctgtgttctccaacctgcagaggaaaggcctggagaaaaggtttgagattcagaagtacgtgaccaagccggaccgaaagcagctggcggcgatgctgggcctcacggacgcacaggtgaaggtgtggttccagaaccggcggatgaagtggcggcactccaaggaggcccaggcccaaaaggacaaggacaaggaggctggcgagaagccatcaggtggagccccggctgcggatggcgagcaggacgagaggagccccagccgttctgaaggcgaggctgagagcgagagcagcgactccgagtccctggacatggcccccagcgacacggagcggactgaggggagtgagcgttctctgcaccaaacaacagttattaaggccccggtcactggcgccctcattaccgccagcagtgctgggagtggtgggagcagcggcggcggcggcaatagtttcagcttcagcagcgccagcagtcttagtagcagcagcaccagtgcgggttgcgccagcagccttggcggcggcggcgcctcggagcttctccctgcaacacagcccacagccagcagcgctcccaaaagccccgagccagcccaaggcgcgcttggctgcttatagactgtactagggcggaggggatccgggccttgcgtgcagcctcccaaccatgggctgggttttgtgcttactgtatgttggcgacttggtagggcaggagacgcagcgtggagcctacctcccgacattcacgcttcgccccacgctgctccgactggctgcagcggacactgcccaaagcagaggggagtctcagtgtcctgctagccagccgaacacttctctccggaagcaggctggttcgactgtgaggtgtttgactaaactgtttctctgactcgccccagaggtcgtggctcaaaggcacttaggacgccttaaatttgtaaataaaatgtttactacggttaaaaaaa

SEQ ID NO: 59711 - DNA, 1328 bp, Homo sapiens
tcttaacactggcacaccaaacccttgacattgtaagcaatatcttgggcatatgtgtatttttctgggctaggagtccataactttaatcagattctcatgggggtcctggcataaaaaaattacatggatttagagtagagagagagtatgttgggggtcgggtgcaggaatctgcctttccaacagtcactcaggtcattttagtcctggggcctgagggttgcattttgaaaacggtcttagtgggttccctaggccaggattcctggcttcttgtgttcccctgggctgccccttggctcctgcgcctaccacagtgtctggtccttggtagagtcgccaagtaagcgttgctttttcactcagggaggtggcttgagggtgcacgcgagtcggataggagcaaacctgggtctcatctcggtgtctcttcttgtctcccggtgtggcgcggcgcaggtgaaggtgtggttccagaaccggcggatgaagtggcggcactccaaggaggcccaggcccaaaaggacaaggacaaggaggctggcgagaagccatcaggtggagccccggctgcggatggcgagcaggacgagaggagccccagccgttctgaaggcgaggctgagagcgagagcagcgactccgagtccctggacatggcccccagcgacacggagcggactgaggggagtgagcgttctctgcaccaaacaacagttattaaggccccggtcactggcgccctcattaccgccagcagtgctgggagtggtgggagcagcggcggcggcggcaatagtttcagcttcagcagcgccagcagtcttagtagcagcagcaccagtgcgggttgcgccagcagccttggcggcggcggcgcctcggagcttctccctgcaacacagcccacagccagcagcgctcccaaaagccccgagccagcccaaggcgcgcttggctgcttatagactgtactagggcggaggggatccgggccttgcgtgcagcctcccaaccatgggctgggttttgtgcttactgtatgttggcgacttggtagggcaggagacgcagcgtggagcctacctcccgacattcacgcttcgccccacgctgctccgactggctgcagcggacactgcccaaagcagaggggagtctcagtgtcctgctagccagccgaacacttctctccggaagcaggctggttcgactgtgaggtgtttgactaaactgtttctctgactcgccccagaggtcgtggctcaaaggcacttaggacgccttaaatttgtaaataaaatgtttactacggttaaaaaaa

SEQ ID NO: 59712 - DNA, 1726 bp, Homo sapiens
ttttttttttttctattacttttccccccccctaactaacggactattattgttgttgttttaaatttagctcttagggcttagctatttgggttttcttgcggtgtccggctcccgtctccctggctcccccgcccgccctgcggccccagcgcccctcgctctcatccagcccgcgaggagtgcgggcgccgcgccgcctttaaagcgaggccagggagcgaggcggtgaccggccgagatccggccctcgcctcctccctcggtggcgctagggctcccggcctctcttcctcagtgcgggcggagaagcgaaagcggatcgtcctcggctgccgccgccttctccgggactcgcgcgcccctccccgcgcgcccacccacccagtccggctggactgcggcagccgcgcggctcaccccggcaggatgttcgcagccgggctggctcccttctacgcctccaacttcagcctctggtcggccgcttactgctcctcggccggcccaggcggctgctccttccccttggaccccgccgccgtcaaaaagccctccttctgcatcgcagacattctgcacgccggcgtgggggatctgggggcggccccggagggcctggcaggggcctcggccgccgccctcaccgcgcacttgggctcggttcacccgcacgcctctttccaagcggcggccagatccccgcttcgacccaccccagtggtggcgccctccgaagtcccggctggcttcccgcagcggctgtctccgctctcagccgcctaccaccaccatcacccgcaacaacaacagcagcagcaacagccgcagcagcaacagcctccgcctccgccccgggctggcgccctgcagcccccggcctcggggacgcgagtggttccgaacccccaccacagtggctctgccccggccccctccagcaaagacctcaaatttggaattgaccgcattttatctgcagaatttgacccaaaagtcaaagaaggcaacacgctgagagatctcacttccctgctaaccggtgggcggcccgccggggtgcacctctcaggcctgcagccctcggccggccagttcttcgcatctctagatcccattaacgaggcttctgcaatcctgagtcccttaaactcgaacccaagaaattcagttcagcatcagttccaagacacgtttccaggtccctatgctgtgctcacgaaggacaccatgccgcagacgtacaaaaggaagcgttcatggtcgcgcgctgtgttctccaacctgcagaggaaaggcctggagaaaaggtttgagattcagaagtacgtgaccaagccggaccgaaagcagctggcggcgatgctgggcctcacggacgcacaggtaaggcagttctggctccagcgcacagcgccctcgggcgggcagcagcgcacggcctagtctggtaggtcccctccatcccggccgactggcctcctgcggtgcaaacgcaagatcttgactttcaagaggctttgtggactacgcaacttgaggcaggagaagaggagggtggagatggggtgagggagaaggaccgagagaagagctcatccccaagatgtgtgtcaacaagcactgcatgtttattttggccaacaggctaaagaaccacggagaaagcaaaagggccgctggaaataacactgatacactcaactgtagtgcaattcgctgtagg

SEQ ID NO: 59713 - DNA, 400 bp, Homo sapiens
gagaaaactgagacttcatcaggtgaagcaacttgtccaaggacatgccactagaaagaagtgacctatgattcaagcccaggcaatctattacagaaagccccactcttcactgccccactgtgctgtcttccaaagagcatgaataactagactggatatttacagactgtttttctttaacaggcaagatggacaaaactgttcagaagtggttgtttgtgcctatctaaaggacttcctgccctagcaacatttggtccacatccctaagctcttctttgctttgactcaatttatcttccaaagccgaagtcacaacaggatgatcttccttcagagaacccccagaaagttgtgttttcatcagccagaaattccagagaacttggggggaaaa

SEQ ID NO: 59714 - DNA, 635 bp, Homo sapiens
gtttctgatatcacattctttcctgaatattcgccttgggtcttttcctctgggtgagcttgaactggtcaacatgcttgttgaaatggtgcccagaatagcatggattatttcagagatgatatgaaaagggaatatgcttggggattattagttcctgggaaagaagcattactaatgtagctaacatggaagtttgtgtttaaagatatatcacgttactcattttcaacttatgaacaactaaaggtacagagatttttcacttcatttattaacaagacagagttttcctatcccatgcttgtaaaattgattttaaaaaattttttaggataaaaagtgacatatgttcactaaatgaaagttgaaaatgtgaaaaaatgaaaaaaaaaccatcatccataagaataggtgtcattttctcagcaatgtttgctcttcatgatttaaaaaaatacaagcatgattataaaattgaacatactaattctaaaattatttttttctgatagaagtaatatacaatattactaatagtagaaaaaaattaaatatgggaaaatataaagaagacagcttttcccacaaatgatattgagtatttctgcctgtgtttatttgccatctgcata

SEQ ID NO: 59715 - DNA, 492 bp, Homo sapiens
ggaaaggggccagcttctgtgacgactgctgcagaggcaggtgcagtttgtgtgccacagatattaactttgataagcacttaatgagtgccttctctgtgcgagaatggggaggaacaaaatgcagctcctaccctcctcgggctttagttgtaccttaataacaggaattttcatctgcctggctcctttcctcaaagaacaaagaagactttgcttcattaaagtgtctgagaaggaagaatcgtgtaacagacactactcaatatcgatctcaactgatccagttctccagtctccctggaaaacaatggattgatgcccagggtgcgctgaacactggaaccatggtcacttctgcacttcacacgattctgctcccaccagttgagctaccaacagttcctggtgcttttgcttcccaaacatgtttatgccatttgttgcttattactgtacttacttaatttgattaaatattaagtaaaatga

SEQ ID NO: 59716 - DNA, 846 bp, Homo sapiens
cggccgccgcgcggcccctcgggcggggagcggccgggggtggagtgggagcgcgtgtgtgcgagtgtgtgcgcgccgtggcgccgcctccacccgctccccgctcggtcccgctcgctcgcccaggccgggctgccctttcgcgtgtccgcgctctcttccctccgccgccgcctcctccattttgcgagctcgtgtctgtgacgggagcccgagtcaccgcctgcccgtcggggacggattctgtgggtggaaggagacgccgcagccggagcggccgaagcagctgggaccgggacggggcacgcgcgcccggaagccccgacccgcggagcccggcgcggggcggagggctggcttgtcagctgggcaatgggagactttcttaaataggggctctccccccacccatggagaaaggggcggctgtttacttcctttttttagaaaaaaaaaatatatttccctcctgctccttctgcgttcacaagctaagttgtttatctcggctgcggcgggaactgcggacggtggcgggcgagcggctcctctgccagagttgatattcactgatggactccaaagaatcattaactcctggtagagaagaaaaccccagcagtgtgcttgctcaggagaggggagatgtgatggacttctataaaaccctaagaggaggagctactgtgaaggtttctgcgtcttcaccctcactggctgtcgcttctcaatcagactccaagcagcgaagacttttggttgattttccaaaaggctcagtaagcaatgcgcagcagccagatctgtccaaagcagtttcactctcaatgggactgtatatgggag

SEQ ID NO: 59717 - DNA, 529 bp, Homo sapiens
ggaaaggggccagcttctgtgacgactgctgcagaggcaggtgcagtttgtgtgccacagatattaactttgataagcacttaatgagtgccttctctgtgcgagaatggggaggaacaaaatgcagctcctaccctcctcgggctttagttgtaccttaataacaggaattttcatctgcctggctcctttcctcaaagaacaaagaagactttgcttcattaaagtgtctgagaaggaagttgatattcactgatggactccaaagaatcattaactcctggtagagaagaaaaccccagcagtgtgcttgctcaggagaggggagatgtgatggacttctataaaaccctaagaggaggagctactgtgaaggtttctgcgtcttcaccctcactggctgtcgcttctcaatcagactccaagcagcgaagacttttggttgattttccaaaaggctcagtaagcaatgcgcagcagccagatctgtccaaagcagtttcactctcaatgggactgtatatgggag

SEQ ID NO: 59718 - DNA, 397 bp, Homo sapiens
tgcaacttctctcccagtgcgagagcgcggcggcggcagctgaagacccggccgcccagatgatgcggtggtgggggacctgccggcacgcgactccccccgggcccaaattgatattcactgatggactccaaagaatcattaactcctggtagagaagaaaaccccagcagtgtgcttgctcaggagaggggagatgtgatggacttctataaaaccctaagaggaggagctactgtgaaggtttctgcgtcttcaccctcactggctgtcgcttctcaatcagactccaagcagcgaagacttttggttgattttccaaaaggctcagtaagcaatgcgcagcagccagatctgtccaaagcagtttcactctcaatgggactgtatatgggag

SEQ ID NO: 59719 - DNA, 215 bp, Homo sapiens
  misc_feature (63)..(63): n is a, c, g, or t
  misc_feature (76)..(76): n is a, c, g, or t
actgtgatagtgtccgttttctttatgtaacaaaatctaatttctttgtgctaaggcaagagnagttctaaagagngaaaaaagaacactttagcagtcaggacaaatgatggtatttcgttattattttcatcatagattaaaatatatccctcatactttgtaaataggagtctatcagagatacactgtgataagggcaagacaattagaaa

SEQ ID NO: 59720 - DNA, 663 bp, Homo sapiens
aagcttgcggccgctcgggagagcgcagacccccgctccagcgccggccagacgtcgtgcagcggcgacttgagaaacttttttcctctttttatttacacgggagcactccacagtgttttgcagctttcctatttcactaaactacagcccattctgctctgataagtagcagcgttgccctcgattggctgcacccgagttctgaccctcctcctccagcgagggcctcggcagccagcaagatgggctcccgctcccggaatggactcggaaactttaactgcggctccacctgctggtgtggattaggacaaaggcggagaacaaagtctgacggtaactgctgtaaaagactcaggagaatggaatttggaggctggggcattagttcttgcagatgcgggcctttgctgtattgatgagttcaatagcctcaaagagcatgataggaccagtatccatgaagcaatggagcaacaaaccataagtgttgctaaggctggcctcgtgtgcaagctgaacacaaggaccaccatcctggcagcaacgaaccccaaaggccagtacgacccccaggagtccgtgtctgtgaacattgccctcggcagcccactcttaagtcgatttgacctgatcctggttttgcttgataccaagaat

SEQ ID NO: 59721 - DNA, 603 bp, Homo sapiens
  misc_feature (595)..(595): n is a, c, g, or t
  misc_feature (598)..(603): n is a, c, g, or t
gaaatttatttccatgtaattattttgctttcaatttatggaaacacagaccatgtagcaaaagtgccttaaaaatagcattgttgttcaagtagcattttcttccattgtctctgctatgtcttagggacacagatgagggaaacattgtctcagcctgaaagagccatgtctgctttctttgtcacaactatctggggatgcgacatgctaccttcagtgacaatggttccttagggcagtgattgtatgtgtgtgtgtaagtgcctttgtgtgtttgtgtgtgtgggagaatggaaacgaccctagggcaaaatatcaaagtgaagggaagagtaattggagaagattaaatttgccaaaagcctctcagaaaatcactgttatctgggttccttataggattattaaagaggagaaaaataggcctttcatagataagtgaaaaaacaaatagcatttgtgaaaagaacccattttcattcataagcaatatagccaaatgtatttaaattaactctatatgaaaagttttatcattattactttcttatgaatttatttgaatctgaaataaatgtcagcccttgattanaannnnnn

SEQ ID NO: 59722 - DNA, 141 bp, Homo sapiens
cattccctacgatgaaggagtcccacttagagtgagtgacccagaagagaagtggacccaggatactccctggcctgggaagatgcctctacagcttgagacacaggcaccagtggctcaggcctgaggacagagacccag

SEQ ID NO: 59723 - DNA, 404 bp, Homo sapiens
ccgaatcactgatggaattgcgcagtgcatggagatggctcagcaggatgagggtaaatgcaggggcaagtccaggccatactgagagacaatgagtggcgctgatgaggacaaagataaaatcaaaagtttgtgcttcatcttcaaaaactcaagctgataacaaacttggcctgatgagaaataataagtatttttctatttacatgagaatttaatctcaaaacagaaatcagaaaaatatgaagtccagggcataaaacctaaaactattgctcatatttattctttctaaatagagcaaagtgtacaatcttctccataagacatacattgtggttataaaaaggcaaaagtcttagtgagaatcattggtattccatagaagagtgaattaaacacag

SEQ ID NO: 59724 - DNA, 3144 bp, Homo sapiens
gcctggctccctctcgctgagacacacatacactcacacatacacaacccggcaggctcgtctgaacttgaagacaccccacattccaagatgcccgaggttcctgggaatgcctggggttcttcgatccggaaaatcctaccggcatcctcctagggagggattattattattatttttctttaatctggaagagaagagaacaagttgtgcttttccccccttcttcttgctaaatgccatggatataactgaataagcggctcagggctttccccgcgtggacgtccgaggccaccatctgcctgcattcgccggagccgccggagggtttagctcgagtctgtctcgggcggggaaggatgcgtggccgagccggggagcccgggcgccccgcggagccggcctcggtgccacccagccgggggtagatgctgcctcgcccaggcgctgagtgaccagaccatggagaccctgcttggtggcctgctagcgtttggcatggcgtttgccgtggtcgacgcctgccccaagtactgtgtctgccagaatctgtctgagtcactggggaccctgtgcccctccaaggggctgctctttgtaccccctgatattgaccggcggacagtggagctgcgcctgggcggcaacttcatcatccacatcagccgccaggactttgccaacatgacggggctggtggacctgaccctgtccaggaacaccatcagccacatccagcccttttcctttctggacctcgagagcctccgctccctgcatcttgacagcaatcggctgccaagccttggggaggacaccctccggggcctggtcaacctgcagcaccttatcgtgaacaacaaccagctgggcggcatcgcagatgaggcttttgaggacttcctgctgacattggaggatctggacctctcctacaacaacctccatggcctgccgtgggactccgtgcgacgcatggtcaacctccaccagctgagcctggaccacaacctgctggatcacatcgccgagggcacctttgcagacctgcagaaactggcccgcctggatctcacctccaatcggctgcagaagctgccccctgatcccatctttgcccgctcccaggcttcggctttgacagccacaccctttgccccacccttgtcctttagttttgggggtaacccacttcactgcaattgtgagcttctctggctgcggaggctcgagcgggacgatgacctggaaacctgtggctccccagggggcctcaagggtcgctacttctggcatgtgcgtgaggaggagtttgtgtgcgagccgcctctcatcacccagcacacacacaagttgctggttctggagggccaggcggccacactcaagtgcaaagccattggggaccccagcccccttatccactgggtagcccccgatgaccgcctggtagggaactcctcaaggaccgctgtctatgacaatggcaccctggacatcttcatcaccacatctcaggacagtggtgccttcacctgcattgctgccaatgctgccggagaggccacggccatggtggaggtctccatcgtccagctgccacacctcagcaacagcaccagccgcactgcaccccccaagtcccgcctctcagacatcactggctccagcaagaccagccggggaggtggaggcagtgggggcggagagcctcccaaaagccccccggaacgggctgtgcttgtgtctgaagtgaccaccacctcggccctggtcaagtggtctgtcagcaagtcagcaccccgggtgaagatgtaccagctgcagtacaactgctctgacgatgaggtactgatttacaggatgatcccagcctccaacaaggccttcgtggtcaacaacctggtgtcagggactggctacgacttgtgtgtgctggccatgtgggatgacacagccacgacactcacggccaccaacatcgtgggctgcgcccagttcttcaccaaggctgactacccgcagtgccagtccatgcacagccagattctgggcggcaccatgatcctggtcatcgggggcatcatcgtggccacgctgctggtcttcatcgtcatcctcatggtgcgctacaaggtctgcaaccacgaggcccccagcaagatggcagcggccgtgagcaatgtgtactcgcagaccaacggcgcccagccaccgcctccaagcagcgcaccagccggggccccgccgcagggcccgccgaaggtggtggtgcgcaacgagctcctggacttcaccgccagcctggcccgcgccagtgactcctcttcctccagctccctgggcagtggggaggctgcggggctgggacgggccccctggaggatcccaccctccgccccgcgccccaagcccagccttgaccgcctgatgggggccttcgcctccctggacctcaagagtcagagaaaggaggagctgctggactccaggactccagccgggagaggggctgggacgtcggcccggggccaccactcggaccgagagccactgctggggccccctgcggcccgggccaggagcctgctccccttgccgttggagggcaaggccaaacgcagccactccttcgacatgggggactttgctgctgcggcggcgggaggggtcgtgccgggcggctacagtcctcctcggaaggtctcgaacatctggacgaagcgcagcctctctgtcaacggcatgctcttgccctttgaggagagtgacctggtgggggcccgggggacttttggcagctccgaatgggtgatggagagcacggtctaggtgggggtgggcatgctccctttcctgtgcgcagggtgggagaaggggaaagaatctcactggcaagtgtttgtggagtttccatggtgatgtttacatccagggacagtttcgtctccctgtcaatggcctcgtgtccccccctaccccgcaacacccacatcacctccccaccacccggccggggtgtgctcagggaatgtggactcgctcaaatgccggactgagccctgagtgtttggaaaggcgagactccgcctttctaatcacaaatgtagcctacaagcaagcggctttggattgcttatg

SEQ ID NO: 59725 - DNA, 543 bp, Homo sapiens
aaataagccccccccggtaagagggtgggcccaaagaagtgtgaaaaagaagcccccccccggggtttgggaaagggggaaaagggggcggggttggggggggtgtttacctccacaggggacactctacactcagtgtaagatctgctgggaacagggccaccaggagtggctggatctcagtctctctgtctctctttctctccttttccttttggtgtatcaaatatttgattgacaaagtaagggccttgattaggaccaaattctcgtgtgttgctatggtctttatttaggacaacaattaacaatgcagtggcccattcttgtcactctacacatatgactatacgggacatatgtaatatataaatatatatataaaacattcccctctgtccccttggcttcggatggaggcctttctgttgagctgaaatgcacctgcagctgggtgctgccagcagcttgcaggccccagccctgttccaatcaacgcagttgacaataaaggaatgagtatcgtcaaaaaaaaaaatgcct

SEQ ID NO: 59726 - DNA, 594 bp, Homo sapiens
agcctatgggaggggatgctcacagcctctgcttcccctaaccacctcatcagccctgctacacccaagactggctgagtccctagaaggcacagtgactgggcactgttcaagcctggcatgatattcccaccacaggctgaaaacataatgtttctggagttggatgtgtcccctccagctgtctttgagatggaattctctcacgaccaagaacaagaccctcgtgcgctacacatggagaggctcatgcgattggacagctttctggaaagaccttccacgtctaaagtccgaaagtccagatcctggtgccacaggatcttctcctcagcatgcttccaactcccatcccccaggcctgcatgcccaagcctccactgatccctctaattacctccctcctctcttctttgatctctcatctccctctctttgcctctctcccccacccccactttctccctctctgtgtcaacccctcactattctctgtgattgattccatttcaattcccaagactaccctgtgtctctctgtgtctctgtctctgcgtgtgcctcagcctggtctcatgggatcctcagagtcac

SEQ ID NO: 59727 - DNA, 5374 bp, Homo sapiens
  misc_feature (1089)..(1089): n is a, c, g, or t
agcgggccacatccccttctgtttttctctctcattctccagtggcggcggcggggaaggcggaggcagaggcagcagcagccgcgctggctgcaatgaatgatcccccagcttggggggaggactccaggtgagcctctgccctcgggaggcccgggacccccggccgcccacgaccggcagcccacgctatggatccctagaggaaggaggagaagacagctcgccgcccacccccatcccattttcctcttcctttatctcattgttgccgaagctgtttacggcagcgctccctctgctccagcatggggcgggctccgggcacggctgctcggcaggcgctgctcccgcggcgactgggggattctgcctaattcacctcccagccggtgcagagaggaccggagagcggtggaggcccggactgcagcagcgttggggccacctcccagcgtccccaccctaggaggctgcatgcggattgaagagctgcgcctgggggctgggccggccccgctgatcccgacctagcgagcaggatagcaggaccgcccaggctgcggaggggctcgggggcaggaaggtcagagcagcaagatggccagtaagaccaaggccagcgaggccctcaaggtggtggcccggtgccgccccctcagcaggaaggaggaggctgctggtcacgagcagatcctgaccatggacgtgaaactgggccaggtgaccctgcggaacccccgcgccgccccgggggagctgcccaagaccttcacctttgacgccgtgtatgatgccagctccaagcaggccgacctgtatgacgaaaccgtgaggcccctgatagactccgtgctccagggtttcaatggcacggtgtttgcctatggccagacgggcactggcaagacctataccatgcagggggacctgggtggagcccgagctgcgcggggtcatcccgaatgcctttgagcacatcttcacccacatctcccgctcccagaaccaacagtacctggtccgggcctcctatttggagatctaccaggaagagattcgagacctgctctccaaggagccgggcangaggctagagctgaaagagaaccccgagactggcgtctacatcaaggacctctcctccttcgtcaccaagaatgtcaaggagattgagcatgtgatgaacctggggaaccagacccgggctgtgggcagcacccacatgaatgaggtcagctcccgctcccatgccatcttcatcatcactgtggagtgcagcgaacgtggctctgatggccaggaccacatccgagtgggcaagctcaacctcgtggacctggctggcagcgagaggcagaacaaggcaggccccaacacagcgggaggggcagccacaccatcctcgggtggcggtggtggcggtggaggcagtggtggtggtgctggtggagagaggcctaaggaagcctccaaaatcaacctctcattatctgccctgggcaacgtgattgctgccctggcgggcaacaggagcacccacattccctaccgggactccaagctgacccggctgctccaggactccctgggggggaatgccaagaccatcatggtagccacactggggccagcttctcacagctacgatgagagcctctccaccttgcgctttgccaaccgagccaagaacatcaagaacaagccccgggtgaacgaggaccccaaggacacactgctgcgggaattccaagaggagattgcccgcctgaaggcccagctggagaagagggggatgctggggaagcggccccggaggaagagcagccgcaggaagaaggccgtgtccgccccgcctgggtaccctgagggcccagtgattgaggcctgggtggcagaagaggaggatgacaacaacaacaaccaccgcccgccccagcccatcctggagtcagccttggagaagaacatggagaattacctgcaggaacagaaggagcggctggaggaggagaaggcagccatccaggatgaccgcagcctggtgagcgaggagaagcagaagctgctggaggagaaggagaagatgctggaggacctgcggcgggaacagcaggccacagagctgcttgcggccaagtacaaggccatggagagcaagctcctcatcgggggcaggaacatcatggatcacaccaacgaacagcagaagatgttggaactgaagaggcaggagattgccgagcagaaacgtcgtgagcgggagatgcagcaggagatgatgctccgggacgaggagactatggagctccggggcacctacacatccctgcagcaggaggtggaggtcaaaaccaagaaactcaagaagctctacgccaagctgcaggcggtgaaggcggagatccaggaccagcatgatgagtatatccgcgtgcggcaggacctggaggaggcgcagaacgagcagacccgcgaactcaagctcaagtacctaatcatcgagaacttcatcccgccggaggagaagaacaagatcatgaaccggcttttcctggactgtgaggaggagcagtggaagttccagccactggtgccagccggcgtcagtagcagccagatgaagaagcggccaacatctgcagtgggctacaagaggcctatcagccagtatgctcgggttgccatggcaatggggtcccaccccaggtacagggctgaaaacataatgtttctggagttggatgtgtcccctccagctgtctttgagatggaattctctcacgaccaagaacaagaccctcgtgcgctacacatggagaggctcatgcgattggacagctttctggaaagaccttccacgtctaaagtccgaaagtccagatcctggtgccagagtcctcagcggcctccaccttccaccacacatgcctccctggcctctgcttctctgcgccctgcaacagtggcggaccatgagtgacaaccatcacgtcaggctgcccatccaatagactcctgggatggggcagccaaccctggctcatctcatctgccgcttggtgcgtgtgcgtgtgcgtgcatgtgcgtgtgcgtgtgtgcaggggtgagaatctggcagatggtgcctctgcctgctcttcttcgcctcctttatttaattcatgttatttattcgcggagctcagttcgtgttggggagatgccctcgcctgagccgtctgggcctaccgtggtcactgcgtagcctctttttcttctgacttgagagctcccccagtcagatctcaggcttgtccccctgtcagctgcctccagaagggaaggtagccagtgcctgagaagacagtcccttttctacccaccgcactccataacctccatcttctcccacactgatggcgagcagcccctgagcactttctgggactgggagactgcttggtgttccctgaggacaagagacatcctgacagtgttgggcatctgctccccgtggacacagccccactctccactttctgagcctcagacaacctcattcagcctcttgggctccttttcaaggacattaataacctcaccaacatagctcatgcccttcagctttgacaagaactcacggcttcccaaactctgctttctgcccaccttggatgggaactgtggaccaagcaattaccatcgccttggaacctgcaggaaatggaacagcaattgagacaacttgaacagtcatcaacggaagtccctccactggattcctttgtttctgtcccctccgaggagtcattttggtcgacaggctctcaaggcaactccccattttcaagaggctgctcctgcctgcttcgatcatttctccctgcagctgcctagaccccgttcacagtgggaggagtcaatgtcattctacccctcgctaaacgaagatattaacatctattgctttttcccttcatctgtcacaggaaacagaagcccaggcacaatcttttccagctttgcctgttacccctgtttctgaattgcatctttaaggtattattttgttgacaatagatcctttattcactagttacgcaaattggttcctagggggatactccttaccttcctttgtgatggcccaaaatgtctctaggtatctcaagtgataagtaaatttctacaaaaaaaaatggttaatgttcattgactggctttttaagtgtatattttggaggacgggtgaagaggtaataacgaaagcaagcgagtgaattaggatttcaaagtgccctaatagtgtgagtctccagttcctagaatatgaagagtgctgtcgttggggtgaaaccatgagactgacagatctgcctgaaatggggggtgtgggaggtggtggcgggggttattctctttccttcaggaaatgaacccttcttacatcattcaagttctgctctgaggatcaagcttgggtctgatttaactcagcgacactgtcatttctgcttcattactggactagagggttgagccacccacttgccatttgctcctgtccttccaggaaatcacaattttcatcagagcccaagagattatttgagactcaggattcagatcagaggttcgactgtggctgggacaggagttgtgtgtagaaattcaccaggtggcctgagcgcagggggacctccagggctgcgttgagcagcctctcccactgacctctttctcgtttgtggacaaagcagcacgtatcacctcattcatcacttggacacatcgcctttgcattgtcttgtcacacctccctcacagtcttatagcacaatatacccaaatcagcccccgcagtccgagggctgggcccaaggtatggtcggaggaggagctcctgcctgcggttttgtgtatgtgtgtatgtgtgtgcgtgtttgtgtgcgtgtttacctccacaggggacactctacactcagtgtaagatctgctgggaacagggccaccaggagtggctggatctcagtctctctgtctctctttctctccttttccttttggtgtatcaaatatttgattgacaaagtaagggccttgattaggaccaaattctcgtgtgttgctatggtctttatttaggacaacaattaacaatgcagtggcccattcttgtcactctacacatatgactatacgggacatatgtaatatataaatatatatataaaacattcccctctgtccccttggcttcggatggaggcctttctgttgagctgaaatgcacctgcagctgggtgctgccagcagcttgcaggccccagccctgttccaatcaacgcagttgacaataaaggaatgagtatcgtcaaaaaaaaaaatgcct

SEQ ID NO: 59728 - DNA, 3867 bp, Homo sapiens
agcgggccacatccccttctgtttttctctctcattctccagtggcggcggcggggaaggcggaggcagaggcagcagcagccgcgctggctgcaatgaatgatcccccagcttggggggaggactccaggtgagcctctgccctcgggaggcccgggacccccggccgcccacgaccggcagcccacgctatggatccctagaggaaggaggagaagacagctcgccgcccacccccatcccattttcctcttcctttatctcattgttgccgaagctgtttacggcagcgctccctctgctccagcatggggcgggctccgcaggaagaaggccgtgtccgccccgcctgggtaccctgagggcccagtgattgaggcctgggtggcagaagaggaggatgacaacaacaacaaccaccgcccgccccagcccatcctggagtcagccttggagaagaacatggagaattacctgcaggaacagaaggagcggctggaggaggagaaggcagccatccaggatgaccgcagcctggtgagcgaggagaagcagaagctgctggaggagaaggagaagatgctggaggacctgcggcgggaacagcaggccacagagctgcttgcggccaagtacaaggccatggagagcaagctcctcatcgggggcaggaacatcatggatcacaccaacgaacagcagaagatgttggaactgaagaggcaggagattgccgagcagaaacgtcgtgagcgggagatgcagcaggagatgatgctccgggacgaggagactatggagctccggggcacctacacatccctgcagcaggaggtggaggtcaaaaccaagaaactcaagaagctctacgccaagctgcaggcggtgaaggcggagatccaggaccagcatgatgagtatatccgcgtgcggcaggacctggaggaggcgcagaacgagcagacccgcgaactcaagctcaagtacctaatcatcgagaacttcatcccgccggaggagaagaacaagatcatgaaccggcttttcctggactgtgaggaggagcagtggaagttccagccactggtgccagccggcgtcagtagcagccagatgaagaagcggccaacatctgcagtgggctacaagaggcctatcagccagtatgctcgggttgccatggcaatggggtcccaccccaggtacagggctgaaaacataatgtttctggagttggatgtgtcccctccagctgtctttgagatggaattctctcacgaccaagaacaagaccctcgtgcgctacacatggagaggctcatgcgattggacagctttctggaaagaccttccacgtctaaagtccgaaagtccagatcctggtgccagagtcctcagcggcctccaccttccaccacacatgcctccctggcctctgcttctctgcgccctgcaacagtggcggaccatgagtgacaaccatcacgtcaggctgcccatccaatagactcctgggatggggcagccaaccctggctcatctcatctgccgcttggtgcgtgtgcgtgtgcgtgcatgtgcgtgtgcgtgtgtgcaggggtgagaatctggcagatggtgcctctgcctgctcttcttcgcctcctttatttaattcatgttatttattcgcggagctcagttcgtgttggggagatgccctcgcctgagccgtctgggcctaccgtggtcactgcgtagcctctttttcttctgacttgagagctcccccagtcagatctcaggcttgtccccctgtcagctgcctccagaagggaaggtagccagtgcctgagaagacagtcccttttctacccaccgcactccataacctccatcttctcccacactgatggcgagcagcccctgagcactttctgggactgggagactgcttggtgttccctgaggacaagagacatcctgacagtgttgggcatctgctccccgtggacacagccccactctccactttctgagcctcagacaacctcattcagcctcttgggctccttttcaaggacattaataacctcaccaacatagctcatgcccttcagctttgacaagaactcacggcttcccaaactctgctttctgcccaccttggatgggaactgtggaccaagcaattaccatcgccttggaacctgcaggaaatggaacagcaattgagacaacttgaacagtcatcaacggaagtccctccactggattcctttgtttctgtcccctccgaggagtcattttggtcgacaggctctcaaggcaactccccattttcaagaggctgctcctgcctgcttcgatcatttctccctgcagctgcctagaccccgttcacagtgggaggagtcaatgtcattctacccctcgctaaacgaagatattaacatctattgctttttcccttcatctgtcacaggaaacagaagcccaggcacaatcttttccagctttgcctgttacccctgtttctgaattgcatctttaaggtattattttgttgacaatagatcctttattcactagttacgcaaattggttcctagggggatactccttaccttcctttgtgatggcccaaaatgtctctaggtatctcaagtgataagtaaatttctacaaaaaaaaatggttaatgttcattgactggctttttaagtgtatattttggaggacgggtgaagaggtaataacgaaagcaagcgagtgaattaggatttcaaagtgccctaatagtgtgagtctccagttcctagaatatgaagagtgctgtcgttggggtgaaaccatgagactgacagatctgcctgaaatggggggtgtgggaggtggtggcgggggttattctctttccttcaggaaatgaacccttcttacatcattcaagttctgctctgaggatcaagcttgggtctgatttaactcagcgacactgtcatttctgcttcattactggactagagggttgagccacccacttgccatttgctcctgtccttccaggaaatcacaattttcatcagagcccaagagattatttgagactcaggattcagatcagaggttcgactgtggctgggacaggagttgtgtgtagaaattcaccaggtggcctgagcgcagggggacctccagggctgcgttgagcagcctctcccactgacctctttctcgtttgtggacaaagcagcacgtatcacctcattcatcacttggacacatcgcctttgcattgtcttgtcacacctccctcacagtcttatagcacaatatacccaaatcagcccccgcagtccgagggctgggcccaaggtatggtcggaggaggagctcctgcctgcggttttgtgtatgtgtgtatgtgtgtgcgtgtttgtgtgcgtgtttacctccacaggggacactctacactcagtgtaagatctgctgggaacagggccaccaggagtggctggatctcagtctctctgtctctctttctctccttttccttttggtgtatcaaatatttgattgacaaagtaagggccttgattaggaccaaattctcgtgtgttgctatggtctttatttaggacaacaattaacaatgcagtggcccattcttgtcactctacacatatgactatacgggacatatgtaatatataaatatatatataaaacattcccctctgtccccttggcttcggatggaggcctttctgttgagctgaaatgcacctgcagctgggtgctgccagcagcttgcaggccccagccctgttccaatcaacgcagttgacaataaaggaatgagtatcgtcaaaaaaaaaaatgcct

SEQ ID NO: 59729 - DNA, 5331 bp, Homo sapiens
  misc_feature (1089)..(1089): n is a, c, g, or t
agcgggccacatccccttctgtttttctctctcattctccagtggcggcggcggggaaggcggaggcagaggcagcagcagccgcgctggctgcaatgaatgatcccccagcttggggggaggactccaggtgagcctctgccctcgggaggcccgggacccccggccgcccacgaccggcagcccacgctatggatccctagaggaaggaggagaagacagctcgccgcccacccccatcccattttcctcttcctttatctcattgttgccgaagctgtttacggcagcgctccctctgctccagcatggggcgggctccgggcacggctgctcggcaggcgctgctcccgcggcgactgggggattctgcctaattcacctcccagccggtgcagagaggaccggagagcggtggaggcccggactgcagcagcgttggggccacctcccagcgtccccaccctaggaggctgcatgcggattgaagagctgcgcctgggggctgggccggccccgctgatcccgacctagcgagcaggatagcaggaccgcccaggctgcggaggggctcgggggcaggaaggtcagagcagcaagatggccagtaagaccaaggccagcgaggccctcaaggtggtggcccggtgccgccccctcagcaggaaggaggaggctgctggtcacgagcagatcctgaccatggacgtgaaactgggccaggtgaccctgcggaacccccgcgccgccccgggggagctgcccaagaccttcacctttgacgccgtgtatgatgccagctccaagcaggccgacctgtatgacgaaaccgtgaggcccctgatagactccgtgctccagggtttcaatggcacggtgtttgcctatggccagacgggcactggcaagacctataccatgcagggggacctgggtggagcccgagctgcgcggggtcatcccgaatgcctttgagcacatcttcacccacatctcccgctcccagaaccaacagtacctggtccgggcctcctatttggagatctaccaggaagagattcgagacctgctctccaaggagccgggcangaggctagagctgaaagagaaccccgagactggcgtctacatcaaggacctctcctccttcgtcaccaagaatgtcaaggagattgagcatgtgatgaacctggggaaccagacccgggctgtgggcagcacccacatgaatgaggtcagctcccgctcccatgccatcttcatcatcactgtggagtgcagcgaacgtggctctgatggccaggaccacatccgagtgggcaagctcaacctcgtggacctggctggcagcgagaggcagaacaaggcaggccccaacacagcgggaggggcagccacaccatcctcgggtggcggtggtggcggtggaggcagtggtggtggtgctggtggagagaggcctaaggaagcctccaaaatcaacctctcattatctgccctgggcaacgtgattgctgccctggcgggcaacaggagcacccacattccctaccgggactccaagctgacccggctgctccaggactccctgggggggaatgccaagaccatcatggtagccacactggggccagcttctcacagctacgatgagagcctctccaccttgcgctttgccaaccgagccaagaacatcaagaacaagccccgggtgaacgaggaccccaaggacacactgctgcgggaattccaagaggagattgcccgcctgaaggcccagctggagaagagggggatgctggggaagcggccccggaggaagagcagccgcaggaagaaggccgtgtccgccccgcctgggtaccctgagggcccagtgattgaggcctgggtggcagaagaggaggatgacaacaacaacaaccaccgcccgccccagcccatcctggagtcagccttggagaagaacatggagaattacctgcaggaacagaaggagcggctggaggaggagaaggcagccatccaggatgaccgcagcctggtgagcgaggagaagcagaagctgctggaggagaaggagaagatgctggaggacctgcggcgggaacagcaggccacagagctgcttgcggccaagtacaaggccatggagagcaagctcctcatcgggggcaggaacatcatggatcacaccaacgaacagcagaagatgttggaactgaagaggcaggagattgccgagcagaaacgtcgtgagcgggagatgcagcaggagatgatgctccgggacgaggagactatggagctccggggcacctacacatccctgcagcaggaggtggaggtcaaaaccaagaaactcaagaagctctacgccaagctgcaggcggtgaaggcggagatccaggaccagcatgatgagtatatccgcgtgcggcaggacctggaggaggcgcagaacgagcagacccgcgaactcaagctcaagtacctaatcatcgagaacttcatcccgccggaggagaagaacaagatcatgaaccggcttttcctggactgtgaggaggagcagtggaagttccagccactggtgccagccggcgtcagtagcagccagatgaagaagcggccaacatctgcagtgggctacaagaggcctatcagccagtatgctcgggttgccatggcaatggggtcccaccccaggtacaggctgtctttgagatggaattctctcacgaccaagaacaagaccctcgtgcgctacacatggagaggctcatgcgattggacagctttctggaaagaccttccacgtctaaagtccgaaagtccagatcctggtgccagagtcctcagcggcctccaccttccaccacacatgcctccctggcctctgcttctctgcgccctgcaacagtggcggaccatgagtgacaaccatcacgtcaggctgcccatccaatagactcctgggatggggcagccaaccctggctcatctcatctgccgcttggtgcgtgtgcgtgtgcgtgcatgtgcgtgtgcgtgtgtgcaggggtgagaatctggcagatggtgcctctgcctgctcttcttcgcctcctttatttaattcatgttatttattcgcggagctcagttcgtgttggggagatgccctcgcctgagccgtctgggcctaccgtggtcactgcgtagcctctttttcttctgacttgagagctcccccagtcagatctcaggcttgtccccctgtcagctgcctccagaagggaaggtagccagtgcctgagaagacagtcccttttctacccaccgcactccataacctccatcttctcccacactgatggcgagcagcccctgagcactttctgggactgggagactgcttggtgttccctgaggacaagagacatcctgacagtgttgggcatctgctccccgtggacacagccccactctccactttctgagcctcagacaacctcattcagcctcttgggctccttttcaaggacattaataacctcaccaacatagctcatgcccttcagctttgacaagaactcacggcttcccaaactctgctttctgcccaccttggatgggaactgtggaccaagcaattaccatcgccttggaacctgcaggaaatggaacagcaattgagacaacttgaacagtcatcaacggaagtccctccactggattcctttgtttctgtcccctccgaggagtcattttggtcgacaggctctcaaggcaactccccattttcaagaggctgctcctgcctgcttcgatcatttctccctgcagctgcctagaccccgttcacagtgggaggagtcaatgtcattctacccctcgctaaacgaagatattaacatctattgctttttcccttcatctgtcacaggaaacagaagcccaggcacaatcttttccagctttgcctgttacccctgtttctgaattgcatctttaaggtattattttgttgacaatagatcctttattcactagttacgcaaattggttcctagggggatactccttaccttcctttgtgatggcccaaaatgtctctaggtatctcaagtgataagtaaatttctacaaaaaaaaatggttaatgttcattgactggctttttaagtgtatattttggaggacgggtgaagaggtaataacgaaagcaagcgagtgaattaggatttcaaagtgccctaatagtgtgagtctccagttcctagaatatgaagagtgctgtcgttggggtgaaaccatgagactgacagatctgcctgaaatggggggtgtgggaggtggtggcgggggttattctctttccttcaggaaatgaacccttcttacatcattcaagttctgctctgaggatcaagcttgggtctgatttaactcagcgacactgtcatttctgcttcattactggactagagggttgagccacccacttgccatttgctcctgtccttccaggaaatcacaattttcatcagagcccaagagattatttgagactcaggattcagatcagaggttcgactgtggctgggacaggagttgtgtgtagaaattcaccaggtggcctgagcgcagggggacctccagggctgcgttgagcagcctctcccactgacctctttctcgtttgtggacaaagcagcacgtatcacctcattcatcacttggacacatcgcctttgcattgtcttgtcacacctccctcacagtcttatagcacaatatacccaaatcagcccccgcagtccgagggctgggcccaaggtatggtcggaggaggagctcctgcctgcggttttgtgtatgtgtgtatgtgtgtgcgtgtttgtgtgcgtgtttacctccacaggggacactctacactcagtgtaagatctgctgggaacagggccaccaggagtggctggatctcagtctctctgtctctctttctctccttttccttttggtgtatcaaatatttgattgacaaagtaagggccttgattaggaccaaattctcgtgtgttgctatggtctttatttaggacaacaattaacaatgcagtggcccattcttgtcactctacacatatgactatacgggacatatgtaatatataaatatatatataaaacattcccctctgtccccttggcttcggatggaggcctttctgttgagctgaaatgcacctgcagctgggtgctgccagcagcttgcaggccccagccctgttccaatcaacgcagttgacaataaaggaatgagtatcgtcaaaaaaaaaaatgcct

SEQ ID NO: 59730 - DNA, 2545 bp, Homo sapiens
aaggttcaggtagaggcgggtgtgaatcggcaccgaggcttaagtcgaaagtcagatctggtgccagagtcctcagcggcctccaccttccaccacacatgcctccctggcctctgcttctctgcgccctgcaacagtggcggaccatgagtgacaaccatcacgtcaggctgcccatccaatagactcctgggatggggcagccaaccctggctcatctcatctgccgcttggtgcgtgtgcgtgtgcgtgcatgtgcgtgtgcgtgtgtgcaggggtgagaatctggcagatggtgcctctgcctgctcttcttcgcctcctttatttaattcatgttatttattcgcggagctcagttcgtgttggggagatgccctcgcctgagccgtctgggcctaccgtggtcactgcgtagcctctttttcttctgacttgagagctcccccagtcagatctcaggcttgtccccctgtcagctgcctccagaagggaaggtagccagtgcctgagaagacagtcccttttctacccaccgcactccataacctccatcttctcccacactgatggcgagcagcccctgagcactttctgggactgggagactgcttggtgttccctgaggacaagagacatcctgacagtgttgggcatctgctccccgtggacacagccccactctccactttctgagcctcagacaacctcattcagcctcttgggctccttttcaaggacattaataacctcaccaacatagctcatgcccttcagctttgacaagaactcacggcttcccaaactctgctttctgcccaccttggatgggaactgtggaccaagcaattaccatcgccttggaacctgcaggaaatggaacagcaattgagacaacttgaacagtcatcaacggaagtccctccactggattcctttgtttctgtcccctccgaggagtcattttggtcgacaggctctcaaggcaactccccattttcaagaggctgctcctgcctgcttcgatcatttctccctgcagctgcctagaccccgttcacagtgggaggagtcaatgtcattctacccctcgctaaacgaagatattaacatctattgctttttcccttcatctgtcacaggaaacagaagcccaggcacaatcttttccagctttgcctgttacccctgtttctgaattgcatctttaaggtattattttgttgacaatagatcctttattcactagttacgcaaattggttcctagggggatactccttaccttcctttgtgatggcccaaaatgtctctaggtatctcaagtgataagtaaatttctacaaaaaaaaatggttaatgttcattgactggctttttaagtgtatattttggaggacgggtgaagaggtaataacgaaagcaagcgagtgaattaggatttcaaagtgccctaatagtgtgagtctccagttcctagaatatgaagagtgctgtcgttggggtgaaaccatgagactgacagatctgcctgaaatggggggtgtgggaggtggtggcgggggttattctctttccttcaggaaatgaacccttcttacatcattcaagttctgctctgaggatcaagcttgggtctgatttaactcagcgacactgtcatttctgcttcattactggactagagggttgagccacccacttgccatttgctcctgtccttccaggaaatcacaattttcatcagagcccaagagattatttgagactcaggattcagatcagaggttcgactgtggctgggacaggagttgtgtgtagaaattcaccaggtggcctgagcgcagggggacctccagggctgcgttgagcagcctctcccactgacctctttctcgtttgtggacaaagcagcacgtatcacctcattcatcacttggacacatcgcctttgcattgtcttgtcacacctccctcacagtcttatagcacaatatacccaaatcagcccccgcagtccgagggctgggcccaaggtatggtcggaggaggagctcctgcctgcggttttgtgtatgtgtgtatgtgtgtgcgtgtttgtgtgcgtgtttacctccacaggggacactctacactcagtgtaagatctgctgggaacagggccaccaggagtggctggatctcagtctctctgtctctctttctctccttttccttttggtgtatcaaatatttgattgacaaagtaagggccttgattaggaccaaattctcgtgtgttgctatggtctttatttaggacaacaattaacaatgcagtggcccattcttgtcactctacacatatgactatacgggacatatgtaatatataaatatatatataaaacattcccctctgtccccttggcttcggatggaggcctttctgttgagctgaaatgcacctgcagctgggtgctgccagcagcttgcaggccccagccctgttccaatcaacgcagttgacaataaaggaatgagtatcgtcaaaaaaaaaaatgcct

SEQ ID NO: 59731 - DNA, 1731 bp, Homo sapiens
agagtagatcgagctcggtaccagcggaacagcaattaccatcgccttggaacctgcaggaaatggaacagcaattgagacaacttgaacagtcatcaacggaagtccctccactggattcctttgtttctgtcccctccgaggagtcattttggtcgacaggctctcaaggcaactccccattttcaagaggctgctcctgcctgcttcgatcatttctccctgcagctgcctagaccccgttcacagtgggaggagtcaatgtcattctacccctcgctaaacgaagatattaacatctattgctttttcccttcatctgtcacaggaaacagaagcccaggcacaatcttttccagctttgcctgttacccctgtttctgaattgcatctttaaggtattattttgttgacaatagatcctttattcactagttacgcaaattggttcctagggggatactccttaccttcctttgtgatggcccaaaatgtctctaggtatctcaagtgataagtaaatttctacaaaaaaaaatggttaatgttcattgactggctttttaagtgtatattttggaggacgggtgaagaggtaataacgaaagcaagcgagtgaattaggatttcaaagtgccctaatagtgtgagtctccagttcctagaatatgaagagtgctgtcgttggggtgaaaccatgagactgacagatctgcctgaaatggggggtgtgggaggtggtggcgggggttattctctttccttcaggaaatgaacccttcttacatcattcaagttctgctctgaggatcaagcttgggtctgatttaactcagcgacactgtcatttctgcttcattactggactagagggttgagccacccacttgccatttgctcctgtccttccaggaaatcacaattttcatcagagcccaagagattatttgagactcaggattcagatcagaggttcgactgtggctgggacaggagttgtgtgtagaaattcaccaggtggcctgagcgcagggggacctccagggctgcgttgagcagcctctcccactgacctctttctcgtttgtggacaaagcagcacgtatcacctcattcatcacttggacacatcgcctttgcattgtcttgtcacacctccctcacagtcttatagcacaatatacccaaatcagcccccgcagtccgagggctgggcccaaggtatggtcggaggaggagctcctgcctgcggttttgtgtatgtgtgtatgtgtgtgcgtgtttgtgtgcgtgtttacctccacaggggacactctacactcagtgtaagatctgctgggaacagggccaccaggagtggctggatctcagtctctctgtctctctttctctccttttccttttggtgtatcaaatatttgattgacaaagtaagggccttgattaggaccaaattctcgtgtgttgctatggtctttatttaggacaacaattaacaatgcagtggcccattcttgtcactctacacatatgactatacgggacatatgtaatatataaatatatatataaaacattcccctctgtccccttggcttcggatggaggcctttctgttgagctgaaatgcacctgcagctgggtgctgccagcagcttgcaggccccagccctgttccaatcaacgcagttgacaataaaggaatgagtatcgtcaaaaaaaaaaatgcct

SEQ ID NO: 59732 - DNA, 1565 bp, Homo sapiens
ggagtctaggcagctgcaggaagaaatgatcgaagcaggcaggagcagcctcctcccactgtgaacggggtctaggcagctgctgggaggagtcaatgtcattctacccctcgctaaacgaagatattaacatctattgctttttcccttcatctgtcacaggaaacagaagcccaggcacaatcttttccagctttgcctgttacccctgtttctgaattgcatctttaaggtattattttgttgacaatagatcctttattcactagttacgcaaattggttcctagggggatactccttaccttcctttgtgatggcccaaaatgtctctaggtatctcaagtgataagtaaatttctacaaaaaaaaatggttaatgttcattgactggctttttaagtgtatattttggaggacgggtgaagaggtaataacgaaagcaagcgagtgaattaggatttcaaagtgccctaatagtgtgagtctccagttcctagaatatgaagagtgctgtcgttggggtgaaaccatgagactgacagatctgcctgaaatggggggtgtgggaggtggtggcgggggttattctctttccttcaggaaatgaacccttcttacatcattcaagttctgctctgaggatcaagcttgggtctgatttaactcagcgacactgtcatttctgcttcattactggactagagggttgagccacccacttgccatttgctcctgtccttccaggaaatcacaattttcatcagagcccaagagattatttgagactcaggattcagatcagaggttcgactgtggctgggacaggagttgtgtgtagaaattcaccaggtggcctgagcgcagggggacctccagggctgcgttgagcagcctctcccactgacctctttctcgtttgtggacaaagcagcacgtatcacctcattcatcacttggacacatcgcctttgcattgtcttgtcacacctccctcacagtcttatagcacaatatacccaaatcagcccccgcagtccgagggctgggcccaaggtatggtcggaggaggagctcctgcctgcggttttgtgtatgtgtgtatgtgtgtgcgtgtttgtgtgcgtgtttacctccacaggggacactctacactcagtgtaagatctgctgggaacagggccaccaggagtggctggatctcagtctctctgtctctctttctctccttttccttttggtgtatcaaatatttgattgacaaagtaagggccttgattaggaccaaattctcgtgtgttgctatggtctttatttaggacaacaattaacaatgcagtggcccattcttgtcactctacacatatgactatacgggacatatgtaatatataaatatatatataaaacattcccctctgtccccttggcttcggatggaggcctttctgttgagctgaaatgcacctgcagctgggtgctgccagcagcttgcaggccccagccctgttccaatcaacgcagttgacaataaaggaatgagtatcgtcaaaaaaaaaaatgcct

SEQ ID NO: 59733 - DNA, 4069 bp, Homo sapiens
  misc_feature (1089)..(1089): n is a, c, g, or t
agcgggccacatccccttctgtttttctctctcattctccagtggcggcggcggggaaggcggaggcagaggcagcagcagccgcgctggctgcaatgaatgatcccccagcttggggggaggactccaggtgagcctctgccctcgggaggcccgggacccccggccgcccacgaccggcagcccacgctatggatccctagaggaaggaggagaagacagctcgccgcccacccccatcccattttcctcttcctttatctcattgttgccgaagctgtttacggcagcgctccctctgctccagcatggggcgggctccgggcacggctgctcggcaggcgctgctcccgcggcgactgggggattctgcctaattcacctcccagccggtgcagagaggaccggagagcggtggaggcccggactgcagcagcgttggggccacctcccagcgtccccaccctaggaggctgcatgcggattgaagagctgcgcctgggggctgggccggccccgctgatcccgacctagcgagcaggatagcaggaccgcccaggctgcggaggggctcgggggcaggaaggtcagagcagcaagatggccagtaagaccaaggccagcgaggccctcaaggtggtggcccggtgccgccccctcagcaggaaggaggaggctgctggtcacgagcagatcctgaccatggacgtgaaactgggccaggtgaccctgcggaacccccgcgccgccccgggggagctgcccaagaccttcacctttgacgccgtgtatgatgccagctccaagcaggccgacctgtatgacgaaaccgtgaggcccctgatagactccgtgctccagggtttcaatggcacggtgtttgcctatggccagacgggcactggcaagacctataccatgcagggggacctgggtggagcccgagctgcgcggggtcatcccgaatgcctttgagcacatcttcacccacatctcccgctcccagaaccaacagtacctggtccgggcctcctatttggagatctaccaggaagagattcgagacctgctctccaaggagccgggcangaggctagagctgaaagagaaccccgagactggcgtctacatcaaggacctctcctccttcgtcaccaagaatgtcaaggagattgagcatgtgatgaacctggggaaccagacccgggctgtgggcagcacccacatgaatgaggtcagctcccgctcccatgccatcttcatcatcactgtggagtgcagcgaacgtggctctgatggccaggaccacatccgagtgggcaagctcaacctcgtggacctggctggcagcgagaggcagaacaaggcaggccccaacacagcgggaggggcagccacaccatcctcgggtggcggtggtggcggtggaggcagtggtggtggtgctggtggagagaggcctaaggaagcctccaaaatcaacctctcattatctgccctgggcaacgtgattgctgccctggcgggcaacaggagcacccacattccctaccgggactccaagctgacccggctgctccaggactccctgggggggaatgccaagaccatcatggtagccacactggggccagcttctcacagctacgatgagagcctctccaccttgcgctttgccaaccgagccaagaacatcaagaacaagccccgggtgaacgaggaccccaaggacacactgctgcgggaattccaagaggagattgcccgcctgaaggcccagctggagaagagggggatgctggggaagcggccccggaggaagagcagccgcaggaagaaggccgtgtccgccccgcctgggtaccctgagggcccagtgattgaggcctgggtggcagaagaggaggatgacaacaacaacaaccaccgcccgccccagcccatcctggagtcagccttggagaagaacatggagaattacctgcaggaacagaaggagcggctggaggaggagaaggcagccatccaggatgaccgcagcctggtgagcgaggagaagcagaagctgctggaggagaaggagaagatgctggaggacctgcggcgggaacagcaggccacagagctgcttgcggccaagtacaaggccatggagagcaagctcctcatcgggggcaggaacatcatggatcacaccaacgaacagcagaagatgttggaactgaagaggcaggagattgccgagcagaaacgtcgtgagcgggagatgcagcaggagatgatgctccgggacgaggagactatggagctccggggcacctacacatccctgcagcaggaggtggaggtcaaaaccaagaaactcaagaagctctacgccaagctgcaggcggtgaaggcggagatccaggaccagcatgatgagtatatccgcgtgcggcaggacctggaggaggcgcagaacgagcagacccgcgaactcaagctcaagtacctaatcatcgagaacttcatcccgccggaggagaagaacaagatcatgaaccggcttttcctggactgtgaggaggagcagtggaagttccagccactggtgccagccggcgtcagtagcagccagatgaagaagcggccaacatctgcagtgggctacaagaggcctatcagccagtatgctcgggttgccatggcaatggggtcccaccccaggtacagggctgaaaacataatgtttctggagttggatgtgtcccctccagctgtctttgagatggaattctctcacgaccaagaacaagaccctcgtgcgctacacatggagaggctcatgcgattggacagctttctggaaagaccttccacgtctaaagtccgaaagtccagatcctggtgccagagtcctcagcggcctccaccttccaccacacatgcctccctggcctctgcttctctgcgccctgcaacagtggcggaccatgagtgacaaccatcacgtcaggctgcccatccaatagactcctgggatggggcagccaaccctggctcatctcatctgccgcttggtgcgtgtgcgtgtgcgtgcatgtgcgtgtgcgtgtgtgcaggggtgagaatctggcagatggtgcctctgcctgctcttcttcgcctcctttatttaattcatgttatttattcgcggagctcagttcgtgttggggagatgccctcgcctgagccgtctgggcctaccgtggtcactgcgtagcctctttttcttctgacttgagagctcccccagtcagatctcaggcttgtccccctgtcagctgcctccagaagggaaggtagccagtgcctgagaagacagtcccttttctacccaccgcactccataacctccatcttctcccacactgatggcgagcagcccctgagcactttctgggactgggagactgcttggtgttccctgaggacaagagacatcctgacagtgttgggcatctgctccccgtggacacagccccactctccactttctgagcctcagacaacctcattcagcctcttgggctccttttcaaggacattaataacctcaccaacatagctcatgcccttcagctttgacaagaactcacggcttcccaaactctgctttctgcccaccttggatgggaactgtggaccaagcaattaccatcgccttggaacctgcaggaaatggaacagcaattgagacaacttgaacagtcatcaacggaagtccctccactggattcctttgtttctgtcccctccgaggagtcattttggtcgacaggctctcaaggcaactccccattttcaagaggctgctcctgcctgcttcgatcatttctccctgcagctgcctagaccccgttcacagtgggaggagtcaatgtcattctacccctcgctaaacgaagatattaacatctattgctttttcccttcatctgtcacaggaaacagcaatagatgttaatatcttcgtttagcgaggggtatgtgccatcacaagcagatgtgggcagtatttgaaggccgtgtccagcccaccgcc

SEQ ID NO: 59734 - DNA, 3169 bp, Homo sapiens
  misc_feature (1089)..(1089): n is a, c, g, or t
  misc_feature (2742)..(2742): n is a, c, g, or t
agcgggccacatccccttctgtttttctctctcattctccagtggcggcggcggggaaggcggaggcagaggcagcagcagccgcgctggctgcaatgaatgatcccccagcttggggggaggactccaggtgagcctctgccctcgggaggcccgggacccccggccgcccacgaccggcagcccacgctatggatccctagaggaaggaggagaagacagctcgccgcccacccccatcccattttcctcttcctttatctcattgttgccgaagctgtttacggcagcgctccctctgctccagcatggggcgggctccgggcacggctgctcggcaggcgctgctcccgcggcgactgggggattctgcctaattcacctcccagccggtgcagagaggaccggagagcggtggaggcccggactgcagcagcgttggggccacctcccagcgtccccaccctaggaggctgcatgcggattgaagagctgcgcctgggggctgggccggccccgctgatcccgacctagcgagcaggatagcaggaccgcccaggctgcggaggggctcgggggcaggaaggtcagagcagcaagatggccagtaagaccaaggccagcgaggccctcaaggtggtggcccggtgccgccccctcagcaggaaggaggaggctgctggtcacgagcagatcctgaccatggacgtgaaactgggccaggtgaccctgcggaacccccgcgccgccccgggggagctgcccaagaccttcacctttgacgccgtgtatgatgccagctccaagcaggccgacctgtatgacgaaaccgtgaggcccctgatagactccgtgctccagggtttcaatggcacggtgtttgcctatggccagacgggcactggcaagacctataccatgcagggggacctgggtggagcccgagctgcgcggggtcatcccgaatgcctttgagcacatcttcacccacatctcccgctcccagaaccaacagtacctggtccgggcctcctatttggagatctaccaggaagagattcgagacctgctctccaaggagccgggcangaggctagagctgaaagagaaccccgagactggcgtctacatcaaggacctctcctccttcgtcaccaagaatgtcaaggagattgagcatgtgatgaacctggggaaccagacccgggctgtgggcagcacccacatgaatgaggtcagctcccgctcccatgccatcttcatcatcactgtggagtgcagcgaacgtggctctgatggccaggaccacatccgagtgggcaagctcaacctcgtggacctggctggcagcgagaggcagaacaaggcaggccccaacacagcgggaggggcagccacaccatcctcgggtggcggtggtggcggtggaggcagtggtggtggtgctggtggagagaggcctaaggaagcctccaaaatcaacctctcattatctgccctgggcaacgtgattgctgccctggcgggcaacaggagcacccacattccctaccgggactccaagctgacccggctgctccaggactccctgggggggaatgccaagaccatcatggtagccacactggggccagcttctcacagctacgatgagagcctctccaccttgcgctttgccaaccgagccaagaacatcaagaacaagccccgggtgaacgaggaccccaaggacacactgctgcgggaattccaagaggagattgcccgcctgaaggcccagctggagaagagggggatgctggggaagcggccccggaggaagagcagccgcaggaagaaggccgtgtccgccccgcctgggtaccctgagggcccagtgattgaggcctgggtggcagaagaggaggatgacaacaacaacaaccaccgcccgccccagcccatcctggagtcagccttggagaagaacatggagaattacctgcaggaacagaaggagcggctggaggaggagaaggcagccatccaggatgaccgcagcctggtgagcgaggagaagcagaagctgctggaggagaaggagaagatgctggaggacctgcggcgggaacagcaggccacagagctgcttgcggccaagtacaaggccatggagagcaagctcctcatcgggggcaggaacatcatggatcacaccaacgaacagcagaagatgttggaactgaagaggcaggagattgccgagcagaaacgtcgtgagcgggagatgcagcaggagatgatgctccgggacgaggagactatggagctccggggcacctacacatccctgcagcaggaggtggaggtcaaaaccaagaaactcaagaagctctacgccaagctgcaggcggtgaaggcggagatccaggaccagcatgatgagtatatccgcgtgcggcaggacctggaggaggcgcagaacgagcagacccgcgaactcaagctcaagtacctaatcatcgagaacttcatcccgccggaggagaagaacaagatcatgaaccggcttttcctggactgtgaggaggagcagtggaagttccagccactggtgccagccggcgtatattttatgtaaatggaatcacacaatatgtagtccgttgcgactgagttcttccacttagcaaaatgttttcaaggttcgtccatgttggaacactcatcagtacttcattcctttgtattggcagtagcagncaggattgaaaaaagggcaaaatctggcaggggggttaaagagggctataagcagaatggtccgggttgcccgtggacagggggtcccccctcgcgtcaggggtgaaaacataccgtgccgagtggaggatgtggccccacaaagggtctggaagaagaatccctcagaggcaagaagagactcggggccaagaggggagaggcagcaagggacctttgggaaaagcaccattaaacagaagaaacaaagggggacaacaccagggcaacatcaaaaagtacgcagggtatagccgcaaaggggagagacacactggcagcaaacagggagagaccatcaacgtgagtcgcatcatacgatcaatgatgatcgacttactatacgcgaccttcccagctcgcactcgcattccagcagggagggagt

SEQ ID NO: 59735 - DNA, 3172 bp, Homo sapiens
  misc_feature (1089)..(1089): n is a, c, g, or t
agcgggccacatccccttctgtttttctctctcattctccagtggcggcggcggggaaggcggaggcagaggcagcagcagccgcgctggctgcaatgaatgatcccccagcttggggggaggactccaggtgagcctctgccctcgggaggcccgggacccccggccgcccacgaccggcagcccacgctatggatccctagaggaaggaggagaagacagctcgccgcccacccccatcccattttcctcttcctttatctcattgttgccgaagctgtttacggcagcgctccctctgctccagcatggggcgggctccgggcacggctgctcggcaggcgctgctcccgcggcgactgggggattctgcctaattcacctcccagccggtgcagagaggaccggagagcggtggaggcccggactgcagcagcgttggggccacctcccagcgtccccaccctaggaggctgcatgcggattgaagagctgcgcctgggggctgggccggccccgctgatcccgacctagcgagcaggatagcaggaccgcccaggctgcggaggggctcgggggcaggaaggtcagagcagcaagatggccagtaagaccaaggccagcgaggccctcaaggtggtggcccggtgccgccccctcagcaggaaggaggaggctgctggtcacgagcagatcctgaccatggacgtgaaactgggccaggtgaccctgcggaacccccgcgccgccccgggggagctgcccaagaccttcacctttgacgccgtgtatgatgccagctccaagcaggccgacctgtatgacgaaaccgtgaggcccctgatagactccgtgctccagggtttcaatggcacggtgtttgcctatggccagacgggcactggcaagacctataccatgcagggggacctgggtggagcccgagctgcgcggggtcatcccgaatgcctttgagcacatcttcacccacatctcccgctcccagaaccaacagtacctggtccgggcctcctatttggagatctaccaggaagagattcgagacctgctctccaaggagccgggcangaggctagagctgaaagagaaccccgagactggcgtctacatcaaggacctctcctccttcgtcaccaagaatgtcaaggagattgagcatgtgatgaacctggggaaccagacccgggctgtgggcagcacccacatgaatgaggtcagctcccgctcccatgccatcttcatcatcactgtggagtgcagcgaacgtggctctgatggccaggaccacatccgagtgggcaagctcaacctcgtggacctggctggcagcgagaggcagaacaaggcaggccccaacacagcgggaggggcagccacaccatcctcgggtggcggtggtggcggtggaggcagtggtggtggtgctggtggagagaggcctaaggaagcctccaaaatcaacctctcattatctgccctgggcaacgtgattgctgccctggcgggcaacaggagcacccacattccctaccgggactccaagctgacccggctgctccaggactccctgggggggaatgccaagaccatcatggtagccacactggggccagcttctcacagctacgatgagagcctctccaccttgcgctttgccaaccgagccaagaacatcaagaacaagccccgggtgaacgaggaccccaaggacacactgctgcgggaattccaagaggagattgcccgcctgaaggcccagctggagaagagggggatgctggggaagcggccccggaggaagagcagccgcaggaagaaggccgtgtccgccccgcctgggtaccctgagggcccagtgattgaggcctgggtggcagaagaggaggatgacaacaacaacaaccaccgcccgccccagcccatcctggagtcagccttggagaagaacatggagaattacctgcaggaacagaaggagcggctggaggaggagaaggcagccatccaggatgaccgcagcctggtgagcgaggagaagcagaagctgctggaggagaaggagaagatgctggaggacctgcggcgggaacagcaggccacagagctgcttgcggccaagtacaaggccatggagagcaagctcctcatcgggggcaggaacatcatggatcacaccaacgaacagcagaagatgttggaactgaagaggcaggagattgccgagcagaaacgtcgtgagcgggagatgcagcaggagatgatgctccgggacgaggagactatggagctccggggcacctacacatccctgcagcaggaggtggaggtcaaaaccaagaaactcaagaagctctacgccaagctgcaggcggtgaaggcggagatccaggaccagcatgatgagtatatccgcgtgcggcaggacctggaggaggcgcagaacgagcagacccgcgaactcaagctcaagtacctaatcatcgagaacttcatcccgccggaggagaagaacaagatcatgaaccggcttttcctggactgtgaggaggagcagtggaagttccagccactggtgccagccggcgtcagtagcagccagatgaagaagcggccaacatctgcagtgggctacaagaggcctatcagccagtatgctcgggttgccatggcaatggggtcccaccccaggtacagggctgaaaacataatgtttctggagttggatgtgtcccctccagctgtctttgagatggaattctctcacgaccaagaacaagaccctcgtgcgctacacatggagaggctcatgcgattggacagctttctggaaagaccttccacgtctaaagtccgaaagtccagatcctggtgccacaggatcttctcctcagcatgcttccaactcccatcccccaggcctgcatgcccaagcctccactgatccctctaattacctccctcctctcttctttgatctctcatctccctctctttgcctctctcccccacccccactttctccctctctgtgtcaacccctcactattctctgtgattgattccatttcaattcccaagactaccctgtgtctctctgtgtctctgtctctgcgtgtgcctcagcctggtctcatgggatcctcagagtcac

SEQ ID NO: 59736 - DNA, 2450 bp, Homo sapiens
  misc_feature (1089)..(1089): n is a, c, g, or t
agcgggccacatccccttctgtttttctctctcattctccagtggcggcggcggggaaggcggaggcagaggcagcagcagccgcgctggctgcaatgaatgatcccccagcttggggggaggactccaggtgagcctctgccctcgggaggcccgggacccccggccgcccacgaccggcagcccacgctatggatccctagaggaaggaggagaagacagctcgccgcccacccccatcccattttcctcttcctttatctcattgttgccgaagctgtttacggcagcgctccctctgctccagcatggggcgggctccgggcacggctgctcggcaggcgctgctcccgcggcgactgggggattctgcctaattcacctcccagccggtgcagagaggaccggagagcggtggaggcccggactgcagcagcgttggggccacctcccagcgtccccaccctaggaggctgcatgcggattgaagagctgcgcctgggggctgggccggccccgctgatcccgacctagcgagcaggatagcaggaccgcccaggctgcggaggggctcgggggcaggaaggtcagagcagcaagatggccagtaagaccaaggccagcgaggccctcaaggtggtggcccggtgccgccccctcagcaggaaggaggaggctgctggtcacgagcagatcctgaccatggacgtgaaactgggccaggtgaccctgcggaacccccgcgccgccccgggggagctgcccaagaccttcacctttgacgccgtgtatgatgccagctccaagcaggccgacctgtatgacgaaaccgtgaggcccctgatagactccgtgctccagggtttcaatggcacggtgtttgcctatggccagacgggcactggcaagacctataccatgcagggggacctgggtggagcccgagctgcgcggggtcatcccgaatgcctttgagcacatcttcacccacatctcccgctcccagaaccaacagtacctggtccgggcctcctatttggagatctaccaggaagagattcgagacctgctctccaaggagccgggcangaggctagagctgaaagagaaccccgagactggcgtctacatcaaggacctctcctccttcgtcaccaagaatgtcaaggagattgagcatgtgatgaacctggggaaccagacccgggctgtgggcagcacccacatgaatgaggtcagctcccgctcccatgccatcttcatcatcactgtggagtgcagcgaacgtggctctgatggccaggaccacatccgagtgggcaagctcaacctcgtggacctggctggcagcgagaggcagaacaaggcaggccccaacacagcgggaggggcagccacaccatcctcgggtggcggtggtggcggtggaggcagtggtggtggtgctggtggagagaggcctaaggaagcctccaaaatcaacctctcattatctgccctgggcaacgtgattgctgccctggcgggcaacaggagcacccacattccctaccgggactccaagctgacccggctgctccaggactccctgggggggaatgccaagaccatcatggtagccacactggggccagcttctcacagctacgatgagagcctctccaccttgcgctttgccaaccgagccaagaacatcaagaacaagccccgggtgaacgaggaccccaaggacacactgctgcgggaattccaagaggagattgcccgcctgaaggcccagctggagaagagggggatgctggggaagcggccccggaggaagagcagccgcaggaagaaggccgtgtccgccccgcctgggtaccctgagggcccagtgattgaggcctgggtggcagaagaggaggatgacaacaacaacaaccaccgcccgccccagcccatcctggagtcagccttggagaagaacatggagaattacctgcaggaacagaaggagcggctggaggaggagaaggcagccatccaggatgaccgcagcctggtgagcgaggagaagcagaagctgctggaggagaaggagaagatgctggaggacctgcggcgggaacagcaggccacagagctgcttgcggccaagtacaaggccatggagagcaagctcctcatcgggggcaggaacatcatggatcacaccaacgaacagcagaagatgttggaactgaagaggcaggagattgccgagcagaaacgtcgtgagcgggagatgcagcaggagatgatgctccgggacgaggagactatggagctccggggcacctacacatccctgcgcggctgtgcggtcaaccaagaatccagagctctggccagtgcggcgggagcgggatcggccgctgtgggttttcggtgggcactggggggcaagggaccggatcagcagacatccg

SEQ ID NO: 59737 - DNA, 4824 bp, Homo sapiens
  misc_feature (1089)..(1089): n is a, c, g, or t
  misc_feature (4797)..(4797): n is a, c, g, or t
agcgggccacatccccttctgtttttctctctcattctccagtggcggcggcggggaaggcggaggcagaggcagcagcagccgcgctggctgcaatgaatgatcccccagcttggggggaggactccaggtgagcctctgccctcgggaggcccgggacccccggccgcccacgaccggcagcccacgctatggatccctagaggaaggaggagaagacagctcgccgcccacccccatcccattttcctcttcctttatctcattgttgccgaagctgtttacggcagcgctccctctgctccagcatggggcgggctccgggcacggctgctcggcaggcgctgctcccgcggcgactgggggattctgcctaattcacctcccagccggtgcagagaggaccggagagcggtggaggcccggactgcagcagcgttggggccacctcccagcgtccccaccctaggaggctgcatgcggattgaagagctgcgcctgggggctgggccggccccgctgatcccgacctagcgagcaggatagcaggaccgcccaggctgcggaggggctcgggggcaggaaggtcagagcagcaagatggccagtaagaccaaggccagcgaggccctcaaggtggtggcccggtgccgccccctcagcaggaaggaggaggctgctggtcacgagcagatcctgaccatggacgtgaaactgggccaggtgaccctgcggaacccccgcgccgccccgggggagctgcccaagaccttcacctttgacgccgtgtatgatgccagctccaagcaggccgacctgtatgacgaaaccgtgaggcccctgatagactccgtgctccagggtttcaatggcacggtgtttgcctatggccagacgggcactggcaagacctataccatgcagggggacctgggtggagcccgagctgcgcggggtcatcccgaatgcctttgagcacatcttcacccacatctcccgctcccagaaccaacagtacctggtccgggcctcctatttggagatctaccaggaagagattcgagacctgctctccaaggagccgggcangaggctagagctgaaagagaaccccgagactggcgtctacatcaaggacctctcctccttcgtcaccaagaatgtcaaggagattgagcatgtgatgaacctggggaaccagacccgggctgtgggcagcacccacatgaatgaggtcagctcccgctcccatgccatcttcatcatcactgtggagtgcagcgaacgtggctctgatggccaggaccacatccgagtgggcaagctcaacctcgtggacctggctggcagcgagaggcagaacaaggcaggccccaacacagcgggaggggcagccacaccatcctcgggtggcggtggtggcggtggaggcagtggtggtggtgctggtggagagaggcctaaggaagcctccaaaatcaacctctcattatctgccctgggcaacgtgattgctgccctggcgggcaacaggagcacccacattccctaccgggactccaagctgacccggctgctccaggactccctgggggggaatgccaagaccatcatggtagccacactggggccagcttctcacagctacgatgagagcctctccaccttgcgctttgccaaccgagccaagaacatcaagaacaagccccgggtgaacgaggaccccaaggacacactgctgcgggaattccaagaggagattgcccgcctgaaggcccagctggagaagagggggatgctggggaagcggccccggaggaagagcagccgcaggaagaaggccgtgtccgccccgcctgggtaccctgagggcccagtgattgaggcctgggtggcagaagaggaggatgacaacaacaacaaccaccgcccgccccagcccatcctggagtcagccttggagaagaacatggagaattacctgcaggaacagaaggagcggctggaggaggagaaggcagccatccaggatgaccgcagcctggtgagcgaggagaagcagaagctgctggaggagaaggagaagatgctggaggacctgcggcgggaacagcaggccacagagctgcttgcggccaagtacaaggccatggagagcaagctcctcatcgggggcaggaacatcatggatcacaccaacgaacagcagaagatgttggaactgaagaggcaggagattgccgagcagaaacgtcgtgagcgggagatgcagcaggagatgatgctccgggacgaggagactatggagctccggggcacctacacatccctgcagcaggaggtggaggtcaaaaccaagaaactcaagaagctctacgccaagctgcaggcggtgaaggcggagatccaggaccagcatgatgagtatatccgcgtgcggcaggacctggaggaggcgcagaacgagcagacccgcgaactcaagctcaagtacctaatcatcgagaacttcatcccgccggaggagaagaacaagatcatgaaccggcttttcctggactgtgaggaggagcagtggaagttccagccactggtgccagccggcgtcagtagcagccagatgaagaagcggccaacatctgcagtgggctacaagaggcctatcagccagtatgctcgggttgccatggcaatggggtcccaccccaggtacagggctgaaaacataatgtttctggagttggatgtgtcccctccagctgtctttgagatggaattctctcacgaccaagaacaagaccctcgtgcgctacacatggagaggctcatgcgattggacagctttctggaaagaccttccacgtctaaagtccgaaagtccagatcctggtgccagagtcctcagcggcctccaccttccaccacacatgcctccctggcctctgcttctctgcgccctgcaacagtggcggaccatgagtgacaaccatcacgtcaggctgcccatccaatagactcctgggatggggcagccaaccctggctcatctcatctgccgcttggtgcgtgtgcgtgtgcgtgcatgtgcgtgtgcgtgtgtgcaggggtgagaatctggcagatggtgcctctgcctgctcttcttcgcctcctttatttaattcatgttatttattcgcggagctcagttcgtgttggggagatgccctcgcctgagccgtctgggcctaccgtggtcactgcgtagcctctttttcttctgacttgagagctcccccagtcagatctcaggcttgtccccctgtcagctgcctccagaagggaaggtagccagtgcctgagaagacagtcccttttctacccaccgcactccataacctccatcttctcccacactgatggcgagcagcccctgagcactttctgggactgggagactgcttggtgttccctgaggacaagagacatcctgacagtgttgggcatctgctccccgtggacacagccccactctccactttctgagcctcagacaacctcattcagcctcttgggctccttttcaaggacattaataacctcaccaacatagctcatgcccttcagctttgacaagaactcacggcttcccaaactctgctttctgcccaccttggatgggaactgtggaccaagcaattaccatcgccttggaacctgcaggaaatggaacagcaattgagacaacttgaacagtcatcaacggaagtccctccactggattcctttgtttctgtcccctccgaggagtcattttggtcgacaggctctcaaggcaactccccattttcaagaggctgctcctgcctgcttcgatcatttctccctgcagctgcctagaccccgttcacagtgggaggagtcaatgtcattctacccctcgctaaacgaagatattaacatctattgctttttcccttcatctgtcacaggaaacagaagcccaggcacaatcttttccagctttgcctgttacccctgtttctgaattgcatctttaaggtattattttgttgacaatagatcctttattcactagttacgcaaattggttcctagggggatactccttaccttcctttgtgatggcccaaaatgtctctaggtatctcaagtgataagtaaatttctacaaaaaaaaatggttaatgttcattgactggctttttaagtgtatattttggaggacgggtgaagaggtaataacgaaagcaagcgagtgaattaggatttcaaagtgccctaatagtgtgagtctccagttcctagaatatgaagagtgctgtcgttggggtgaaaccatgagactgacagatctgcctgaaatggggggtgtgggaggtggtggcgggggttattctctttccttcaggaaatgaacccttcttacatcattcaagttctgctctgaggatcaagcttgggtctgatttaactcagcgacactgtcatttctgcttcattactggactagagggttgagccacccacttgccatttgctcctgtccttccaggaaatcacaattttcatcagagcccaagagattatttgagactcaggattcagatcagaggttcgactgtggctgggacaggagttgtgtgtagaaattcaccaggtggcctgagcgcagggggacctccagggctgcgttgagcagcctctcccactgacctctttctccgttctctttccaaagtgtaattcccattttaaaaaatggattaaatgttcagaaagggtaaccacaatggnggtctcaaaaagtgggcaggagccaag

SEQ ID NO: 59738 - DNA, 4098 bp, Homo sapiens
agcgggccacatccccttctgtttttctctctcattctccagtggcggcggcggggaaggcggaggcagaggcagcagcagccgcgctggctgcaatgaatgatcccccagcttggggggaggactccaggtgagcctctgccctcgggaggcccgggacccccggccgcccacgaccggcagcccacgctatggatccctagaggaaggaggagaagacagctcgccgcccacccccatcccattttcctcttcctttatctcattgttgccgaagctgtttacggcagcgctcccttgctccaggactccctgggggggaatgccaagaccatcatggtagccacactggggccagcttctcacagctacgatgagagcctctccaccttgcgctttgccaaccgagccaagaacatcaagaacaagccccgggtgaacgaggaccccaaggacacactgctgcgggaattccaagaggagattgcccgcctgaaggcccagctggagaagagggggatgctggggaagcggccccggaggaagagcagccgcaggaagaaggccgtgtccgccccgcctgggtaccctgagggcccagtgattgaggcctgggtggcagaagaggaggatgacaacaacaacaaccaccgcccgccccagcccatcctggagtcagccttggagaagaacatggagaattacctgcaggaacagaaggagcggctggaggaggagaaggcagccatccaggatgaccgcagcctggtgagcgaggagaagcagaagctgctggaggagaaggagaagatgctggaggacctgcggcgggaacagcaggccacagagctgcttgcggccaagtacaaggccatggagagcaagctcctcatcgggggcaggaacatcatggatcacaccaacgaacagcagaagatgttggaactgaagaggcaggagattgccgagcagaaacgtcgtgagcgggagatgcagcaggagatgatgctccgggacgaggagactatggagctccggggcacctacacatccctgcagcaggaggtggaggtcaaaaccaagaaactcaagaagctctacgccaagctgcaggcggtgaaggcggagatccaggaccagcatgatgagtatatccgcgtgcggcaggacctggaggaggcgcagaacgagcagacccgcgaactcaagctcaagtacctaatcatcgagaacttcatcccgccggaggagaagaacaagatcatgaaccggcttttcctggactgtgaggaggagcagtggaagttccagccactggtgccagccggcgtcagtagcagccagatgaagaagcggccaacatctgcagtgggctacaagaggcctatcagccagtatgctcgggttgccatggcaatggggtcccaccccaggtacagggctgaaaacataatgtttctggagttggatgtgtcccctccagctgtctttgagatggaattctctcacgaccaagaacaagaccctcgtgcgctacacatggagaggctcatgcgattggacagctttctggaaagaccttccacgtctaaagtccgaaagtccagatcctggtgccagagtcctcagcggcctccaccttccaccacacatgcctccctggcctctgcttctctgcgccctgcaacagtggcggaccatgagtgacaaccatcacgtcaggctgcccatccaatagactcctgggatggggcagccaaccctggctcatctcatctgccgcttggtgcgtgtgcgtgtgcgtgcatgtgcgtgtgcgtgtgtgcaggggtgagaatctggcagatggtgcctctgcctgctcttcttcgcctcctttatttaattcatgttatttattcgcggagctcagttcgtgttggggagatgccctcgcctgagccgtctgggcctaccgtggtcactgcgtagcctctttttcttctgacttgagagctcccccagtcagatctcaggcttgtccccctgtcagctgcctccagaagggaaggtagccagtgcctgagaagacagtcccttttctacccaccgcactccataacctccatcttctcccacactgatggcgagcagcccctgagcactttctgggactgggagactgcttggtgttccctgaggacaagagacatcctgacagtgttgggcatctgctccccgtggacacagccccactctccactttctgagcctcagacaacctcattcagcctcttgggctccttttcaaggacattaataacctcaccaacatagctcatgcccttcagctttgacaagaactcacggcttcccaaactctgctttctgcccaccttggatgggaactgtggaccaagcaattaccatcgccttggaacctgcaggaaatggaacagcaattgagacaacttgaacagtcatcaacggaagtccctccactggattcctttgtttctgtcccctccgaggagtcattttggtcgacaggctctcaaggcaactccccattttcaagaggctgctcctgcctgcttcgatcatttctccctgcagctgcctagaccccgttcacagtgggaggagtcaatgtcattctacccctcgctaaacgaagatattaacatctattgctttttcccttcatctgtcacaggaaacagaagcccaggcacaatcttttccagctttgcctgttacccctgtttctgaattgcatctttaaggtattattttgttgacaatagatcctttattcactagttacgcaaattggttcctagggggatactccttaccttcctttgtgatggcccaaaatgtctctaggtatctcaagtgataagtaaatttctacaaaaaaaaatggttaatgttcattgactggctttttaagtgtatattttggaggacgggtgaagaggtaataacgaaagcaagcgagtgaattaggatttcaaagtgccctaatagtgtgagtctccagttcctagaatatgaagagtgctgtcgttggggtgaaaccatgagactgacagatctgcctgaaatggggggtgtgggaggtggtggcgggggttattctctttccttcaggaaatgaacccttcttacatcattcaagttctgctctgaggatcaagcttgggtctgatttaactcagcgacactgtcatttctgcttcattactggactagagggttgagccacccacttgccatttgctcctgtccttccaggaaatcacaattttcatcagagcccaagagattatttgagactcaggattcagatcagaggttcgactgtggctgggacaggagttgtgtgtagaaattcaccaggtggcctgagcgcagggggacctccagggctgcgttgagcagcctctcccactgacctctttctcgtttgtggacaaagcagcacgtatcacctcattcatcacttggacacatcgcctttgcattgtcttgtcacacctccctcacagtcttatagcacaatatacccaaatcagcccccgcagtccgagggctgggcccaaggtatggtcggaggaggagctcctgcctgcggttttgtgtatgtgtgtatgtgtgtgcgtgtttgtgtgcgtgtttacctccacaggggacactctacactcagtgtaagatctgctgggaacagggccaccaggagtggctggatctcagtctctctgtctctctttctctccttttccttttggtgtatcaaatatttgattgacaaagtaagggccttgattaggaccaaattctcgtgtgttgctatggtctttatttaggacaacaattaacaatgcagtggcccattcttgtcactctacacatatgactatacgggacatatgtaatatataaatatatatataaaacattcccctctgtccccttggcttcggatggaggcctttctgttgagctgaaatgcacctgcagctgggtgctgccagcagcttgcaggccccagccctgttccaatcaacgcagttgacaataaaggaatgagtatcgtcaaaaaaaaaaatgcct

SEQ ID NO: 59739 - DNA, 2951 bp, Homo sapiens
  misc_feature (1089)..(1089): n is a, c, g, or t
agcgggccacatccccttctgtttttctctctcattctccagtggcggcggcggggaaggcggaggcagaggcagcagcagccgcgctggctgcaatgaatgatcccccagcttggggggaggactccaggtgagcctctgccctcgggaggcccgggacccccggccgcccacgaccggcagcccacgctatggatccctagaggaaggaggagaagacagctcgccgcccacccccatcccattttcctcttcctttatctcattgttgccgaagctgtttacggcagcgctccctctgctccagcatggggcgggctccgggcacggctgctcggcaggcgctgctcccgcggcgactgggggattctgcctaattcacctcccagccggtgcagagaggaccggagagcggtggaggcccggactgcagcagcgttggggccacctcccagcgtccccaccctaggaggctgcatgcggattgaagagctgcgcctgggggctgggccggccccgctgatcccgacctagcgagcaggatagcaggaccgcccaggctgcggaggggctcgggggcaggaaggtcagagcagcaagatggccagtaagaccaaggccagcgaggccctcaaggtggtggcccggtgccgccccctcagcaggaaggaggaggctgctggtcacgagcagatcctgaccatggacgtgaaactgggccaggtgaccctgcggaacccccgcgccgccccgggggagctgcccaagaccttcacctttgacgccgtgtatgatgccagctccaagcaggccgacctgtatgacgaaaccgtgaggcccctgatagactccgtgctccagggtttcaatggcacggtgtttgcctatggccagacgggcactggcaagacctataccatgcagggggacctgggtggagcccgagctgcgcggggtcatcccgaatgcctttgagcacatcttcacccacatctcccgctcccagaaccaacagtacctggtccgggcctcctatttggagatctaccaggaagagattcgagacctgctctccaaggagccgggcangaggctagagctgaaagagaaccccgagactggcgtctacatcaaggacctctcctccttcgtcaccaagaatgtcaaggagattgagcatgtgatgaacctggggaaccagacccgggctgtgggcagcacccacatgaatgaggtcagctcccgctcccatgccatcttcatcatcactgtggagtgcagcgaacgtggctctgatggccaggaccacatccgagtgggcaagctcaacctcgtggacctggctggcagcgagaggcagaacaaggcaggccccaacacagcgggaggggcagccacaccatcctcgggtggcggtggtggcggtggaggcagtggtggtggtgctggtggagagaggcctaaggaagcctccaaaatcaacctctcattatctgccctgggcaacgtgattgctgccctggcgggcaacaggagcacccacattccctaccgggactccaagctgacccggctgctccaggactccctgggggggaatgccaagaccatcatggtagccacactggggccagcttctcacagctacgatgagagcctctccaccttgcgctttgccaaccgagccaagaacatcaagaacaagccccgggtgaacgaggaccccaaggacacactgctgcgggaattccaagaggagattgcccgcctgaaggcccagctggagaagagggggatgctggggaagcggccccggaggaagagcagccgcaggaagaaggccgtgtccgccccgcctgggtaccctgagggcccagtgattgaggcctgggtggcagaagaggaggatgacaacaacaacaaccaccgcccgccccagcccatcctggagtcagccttggagaagaacatggagaattacctgcaggaacagaaggagcggctggaggaggagaaggcagccatccaggatgaccgcagcctggtgagcgaggagaagcagaagctgctggaggagaaggagaagatgctggaggacctgcggcgggaacagcaggccacagagctgcttgcggccaagtacaaggccatggagagcaagctcctcatcgggggcaggaacatcatggatcacaccaacgaacagcagaagatgttggaactgaagaggcaggagattgccgagcagaaacgtcgtgagcgggagatgcagcaggagatgatgctccgggacgaggagactatggagctccggggcacctacacatccctgcagcaggaggtggaggtcaaaaccaagaaactcaagaagctctacgccaagctgcaggcggtgaaggcggagatccaggaccagcatgatgagtatatccgcgtgcggcaggacctggaggaggcgcagaacgagcagacccgcgaactcaagctcaagtacctaatcatcgagaacttcatcccgccggaggagaagaacaagatcatgaaccggcttttcctggactgtgaggaggagcagtggaagttccagccactggtgccagccggcgtgtgagtctctaacccagctgtctgggctgggggacttgtgggtccactccaggtcggggctggtgaggggcctgaggccttgcctgcagggagacagatgttttgtggattggggaaaagatggggaggatgccgatgggggatgaatttctcaggatctaattgtaggggtctctatgatggaagggtgttctgggaaaaaaagtgtctcattggcctgggatgcagaaaataccttgtgagggatctcgggagggaggaagagcatctcagcctcttgacaatcctagcgaatgctaacatctggccaggtctggtgaatattcatttgtcagatgcccgaa

SEQ ID NO: 59740 - DNA, 1001 bp, Homo sapiens
acaccggggagaaaccatacaagtgccttgagtgtgggaaggccttcaaacgcaggtcgtacctcatgcagcaccatccaatccacactggagagaaaccctatgagtgtagtcaatgtcgaaaggccttcacccaccggtctacttttattcgccataataggacccacactggagaaaagccctttgagtgcaaagaatgtgagaaagcctttagcaatagagcccacctaattcaacattacatcatccacactggagagaagccctatgattgcatggcatgtggaaaggccttcagatgcagctcagaactcatacagcaccagcggattcacactggggagaagccctatgaatgcacccagtgtgggaaagcctttcaccggagcacgtacctcattcagcactctgtcatccacactggggagatgccctacaagtgtatcgagtgtgggaaggccttcaaacgcaggtcacaccttctgcagcaccaaagggtccatacatgagagaaccctattgctgcaatgaatacagcaaggcctttacccactgttattttatcattcataatgggacccacactgtaggaagaagtccttcgagtgcaaagaatgtcaggaaacttttcattttttttgtcagctctttcttaactaacacatgagcagtcactttggagagaagccctgtgaatacagtgaatgtaaggatcccttcagtcaccactcagttctcactcattgcagaaggattcataccagggggaaatgtggaaggcattccatcaacatcagagaactcatgctggagaaagacattccaaatataactattaaggacagtctttggccagagcagaaatcttactatctgagaatcataatgaaaagttactacataattgttattgatgtgagaaaactttgtgaccaggttgtcacttgcttgtcctataaagagccatgctggaatttgacccaccttgggattttctc

SEQ ID NO: 59741 - DNA, 501 bp, Homo sapiens
ttaaagcaaagaattccccggtcccagccatgtccaacgtcccccacaagtcctcgctgcccgagggcatccgccctggcacggtgctgagaattcgcggcttggttcctcccaatgccagcaggttccatgtaaacctgctgtgcggggaggagcagggctccgatgccgcgctgcatttcaacccccggctggacacgtcggaggtggtcttcaacagcaaggagcaaggctcctggggccgcgaggagcgcgggccgggcgttcctttccagcgcgggcagcccttcgaggtgctcatcatcgcgtcagacgacggcttcaaggccgtggttggggacgcccagtaccaccacttccgccaccgcctgccgctggcgcgcgtgcgcctggtggaggtgggcggggacgtgcagctggactccgtgaggatcttctgagcagaagcccaggcgggcccggggccttggctggcaaataaagcgttagcccgcagcgcga

SEQ ID NO: 59742 - DNA, 995 bp, Homo sapiens
  misc_feature (526)..(526): n is a, c, g, or t
  misc_feature (528)..(528): n is a, c, g, or t
  misc_feature (535)..(535): n is a, c, g, or t
  misc_feature (540)..(540): n is a, c, g, or t
  misc_feature (543)..(543): n is a, c, g, or t
  misc_feature (547)..(547): n is a, c, g, or t
  misc_feature (554)..(554): n is a, c, g, or t
  misc_feature (559)..(560): n is a, c, g, or t
  misc_feature (566)..(566): n is a, c, g, or t
  misc_feature (577)..(577): n is a, c, g, or t
  misc_feature (579)..(579): n is a, c, g, or t
  misc_feature (583)..(584): n is a, c, g, or t
  misc_feature (589)..(589): n is a, c, g, or t
  misc_feature (598)..(598): n is a, c, g, or t
ttaaagcaaagaattccccggtcccagccatgtccaacgtcccccacaagtcctcgctgcccgagggcatccgccctggcacggtgctgagaattcgcggcttggttcctcccaatgccagcaggttccatgtaaacctgctgtgcggggaggagcagggctccgatgccgcgctgcatttcaacccccggctggacacgtcggaggtggtcttcaacagcaaggagcaaggctcctggggccgcgaggagcgcgggccgggcgttcctttccagcgcgggcagcccttcgaggtgctcatcatcgcgtcagacgacggcttcaaggccgtggttggggacgcccagtaccaccacttccgccaccgcctgccgctggcgcgcgtgcgcctggtggaggtgggcggggacgtgcagctggactccgtgaggatcttctgagcagaagcccaggcgggcccggggccttggctggcaaataaagcgttagcccgcagcgcgaaaaaaaaacaaaacaacaaaaaaananaaacaanaaaanaanaaanaaaaaanacaannaacaanaaaaacaaaananaaannaaaanaacaaacanaagacagaggacaagagagcacaaaggcacagaacaacacaagaataagaggaagggcggacgacacgatcaacagcaacagcagaccgaagaacacgaaggacgagaaagagaaatgaggagggggaggtgtgggactaggaggaggagagggagagcacaaaggcgcagggacgccggtgaaaccaccacacgcgcaccggaggagcagagagagagacgacctacgtgggcggagagaccgcgaacggaaacggagggcaagagaaataacacggtgggcgggggcggcggaccgcacgacgaggcgagccgaacggagaagcacacagcaatgcgccagtacgaaaagcaagcagagaaagacagggaaacatgcggggagaccccaccaggt

SEQ ID NO: 59743 - DNA, 735 bp, Homo sapiens
ggctcactgcaacctccgcctcccgggttcaagcgactctcctgtctcagcctcccaagtagctgggattacaagcgcgtgccaccacgccctgctaatttttgtatttttagtagacacaaggtttcaccgtgttggccaggatggtctcgatctcctgacctcgtgattcgcccagtaggcatgagccaccgcgcccggtcgagggttttctcatagtatgtttagttgttctgaggagctttgtatctttgagaaatgcatgtttacaacatccacagtttcttctaaagctttcaggtgaactgcacacagttccactatgtcttctggggaaactcttgaatatcctggtacatcttcctttataaggactcatactgggcccactatgtaaaacgtggtttttcgggatattggaggttttgcaccacagagaattcaattcacttgggagtgttcatctatttaggaagtatagttttttttacttttgtcttcaggaatatgcactgctaccttttagaaataatttctattgcctttattatttttgttgttatttaatgggaaaaggttagacatggccaggtaaatgttatcaaataaagttagttattcgtattcaacaagtggaatttttactttgctgttctcagaaacccatgaatctgtgtgttctcagaaacccatgaatcattatgtatacaaattaaaaattgtaatgtactgctg

SEQ ID NO: 59744 - DNA, 753 bp, Homo sapiens
agccactccaccccagaagaaggtaatatgagtcctactacctttctgaaaggaaggtgagtacagaaaagcaagacagtaactttcccaagccagggaacccctgtctccccaacttctgcatcatgtagaccatttgtgtctacaacttacaggaggcagtgtagactagcagttgagaatgtgagtctagaatcagaatgcctgggttcaaacctcaactctgtcactttccagctatttggccttggacatattacttaaacatttgtgtgttttaaaacgtgtacacaatcctttgactctctttccatcaagaagtggagcctatgtcccctccctttgaacctgggtggaaatgtgggagtgcctagacaaatagaatgtggcaaaagtgacactgtgtgatttccaaggctaggttagaaaagaccctgcagcttctgatgattcctttagggacactcatgtcgggaggcttcagctgctgtgaaagaaactcagctaccctgaggctgccttgtagagggactgcatttaaagtgagagattcctgaggagttccagccatccagccccaagcagtgtgaacctcctagtctagaccccagcatttgagctgacctcagccccagccaccaattgactgcaaactcatgagacaccctgagtgagaactgcctagcttagtctctgtcaaccctcaaatttcaggaacaaaataaatgattgttgttgtcttaagaccactgt

SEQ ID NO: 59745 - DNA, 216 bp, Homo sapiens
  misc_feature (129)..(129): n is a, c, g, or t
gcacaaagcacttcttgttacagagagaaatgttttgattcattatttcaggaaaggatgccaaggaaaaaaagcagctgacttacaacagcagttcgtacatttcctggactgttgggatgtatcatntattccatttacattgcacctgcctcaggcacaggatatcactacgtaagagcaaacatattggcaagtaacaatatggtgtatgtg

SEQ ID NO: 59746 - DNA, 467 bp, Homo sapiens
tttgcatgtcaacatacagttttcccagtaccatttgttggaaagactattcctccattaaatcatcttggcactattgtaaataattgattgatggtaaatatgagggtttatttctggactttcaattctattccattgatctcagtgcctgtttttatattagtaccatactatcttgattactgttgatttgtagtaagtcttgaaattggagattatgagtcttccaatgttcttctttttcaagatggttttggctattctgggttccttgaaattttgtgtgaattttaggatcagttttttagtttctgcaaagaagccagctaggataagggattgcactgaatcagtagatcaacttaaggagtctcttcttatgttttctgttgctatgacagaatatcacagactgggtaaattataaaacaatacaagtttattcagctcagtgttctgggtga

SEQ ID NO: 59747 - DNA, 411 bp, Homo sapiens
cccgatttgtaatgtagtttaacagttaaggaaaattaactcttcctttattcagtgttcgtcctaattcttttgggtccccaattcactttactgtctggttaagatcaacattttctaacttagttcactttaataccttagattcatcagtttcttttacattaataattgctttggataaaattatttctaaatcatgttaattgctaaaagatcacttcaggaataattattctaattggccttattgcagaagaagcaaaataggagagaccagggcattacttttacaaatattctgagtaataaggggaatggacaatattgtaaaccagtattgttgtgtgctatcttgagtcctggtcctcagtgtgagctctttatacagttcaaacccagaaatgagcg

SEQ ID NO: 59748 - DNA, 270 bp, Homo sapiens
ggttttgggaggtttggccagcttctttactgcatcctgttttatctgcggagtctgctgaactcctatctcacagcatttgcctctgagtacagcagatgtcaacaaggttttgaactgtttgctctcagttccatattcttcctgtccccccaggattcattatattctcacctgggcttcagtaaacgaattttgcatggagagtttcagatgatgttcagtgacaaatttgtacctcagacaacttgggattcagaagaatatttt

SEQ ID NO: 59749 - DNA, 729 bp, Homo sapiens
aaaaggttccggcctcagccggcgcacctggcggaggaggaacctcgcgacgcgctctcgggcatcggtttctcccagcaaagcttggagggtttagctgcgcggagagctcagcgagctcttctgtgtctgtttggggcgtgtgggctccgggagcgtgaggaccgggaagctaggaggctccttcccttctggcggctccctcactgagaccgggcggtttggttgcgggggaagtggagacgagccacccttgacctttgactgcaagaactcaccttgagcaggatagaggcacgtggacggtgaccctcgggatgcaataaatgctgagacagatcagcaaacattgagtgggccagacactgttctgaaaaatacgcagtcgacttttgaacagcacaggcttgaactgcatgcggccactaatactcggacttccttctgcctctgccatccctaagacagcaagacccacccctcctgctcctcagcctactcgatgtgatgatgaaggggacacagatacacatacagagaagacaatggcatgaaggcagaggccgagtggagtgatgcagccacagccagggaatgccaggaacctctgggagctggaagaggccaggaaggatcctcccccggagcctctggagggagtgtggcccaccgacaccctgacctcagcttctggctcctgaactgtgagaaaataaatgtctgttgttt

SEQ ID NO: 59750 - DNA, 781 bp, Homo sapiens
aaaaggttccggcctcagccggcgcacctggcggaggaggaacctcgcgacgcgctctcgggcatcggtttctcccagcaaagcttggagggtttagctgcgcggagagctcagcgagctcttctgtgtctgtttggggcgtgtgggctccgggagcgtgaggaccgggaagctaggaggctccttcccttctggcggctccctcactgagaccgggcggtttggttgcgggggaagtggagacgagccacccttgacctttgactgcaagaactcaccttgagcaggatagaggcacgtggacggtgaccctcgggatgcaataaatgctgagacagatcagcaaacattgagtgggccagacactgttctgaaaaatacgcagtcgacttttgaacagcacaggcttgaactgcatgcggccactaatactcggacttccttctgcctctgccatccctaagacagcaagacccacccctcctgctcctcagcctactcgatgtgatgatgatgcagagattcagagagtctaagcaacttttctaaatcatctagctggaattcgtaactgagccaggatctaccccaggtctgtctgactccaaagcctgtgtcttccagcacacactgctgctgcctggggaatgtggatatgatgtctggagctctagcaaccatatcagaccacaaggatgaatgtacaccccaggaatggaagagaggaaagccagaaaaagactcggtccctgatggctgaagagctaccatacctgcccct

SEQ ID NO: 59751 - DNA, 1443 bp, Homo sapiens
aaaaggttccggcctcagccggcgcacctggcggaggaggaacctcgcgacgcgctctcgggcatcggtttctcccagcaaagcttggagggtttagctgcgcggagagctcagcgagctcttctgtgtctgtttggggcgtgtgggctccgggagcgtgaggaccgggaagctaggaggctccttcccttctggcggctccctcactgagaccgggcggtttggttgcgggggaagtggagacgagccacccttgacctttgactgcaagaactcaccttgagcaggatagaggcacgtggacggtgaccctcgggatgcaataaatgctgagacagatcaggtgtgcaaggcacagagctagaggccagaggcctttcttctccaaccttcagtcacctctttttaaagtgaagccagcatcctcctcggggtttactgtgaaaattaagtgagctgacgcgtgctgtgttttgatgttgcttggctcctacaaacattgagtgggccagacactgttctgaaaaatacgcagtcgacttttgaacagcacaggcttgaactgcatgcggccactaatactcggacttccttctgcctctgccatccctaagacagcaagacccacccctcctgctcctcagcctactcgatgtgatgatggcctgccggagatcagaggcccagattattgaaggagacgcctatgagatgcccaagcggttgctgtgacaactctgctggagggcgggaggcggcgagggcgggcagctgactgttggctgtggacaggctccaggcgtgccaggccagagtggggataattccaccccaggttgcttagctgagggttctctgcgcattaagcaccttaactcgctgtcctgctgcaccccagccacagaggccttggtgaaggtgaaatcttagagaatagctgggaagccaaaaggccaagcagtttgatgactatttccttaaagctgatgaaaaagcaacgtggataatatttcctaacaataatggccagcagttagtgttcactgccaggcccctgcccagtaccaagagctcaggttttacatcagcatgacgtgacctatgtggaatccctggctagctctgtgaccttgagcaaagtcactcaacctctctgaatctcaggcactagtgttgaccatggacacaataacaccttccacctcgtaggtttgctatgcagccctggggcactcctgtgcaaagccccatgcagagctcaagcatggggtctctgggaccacactatcagggttcaaactccagctctgtcactctctggctatatgaccttgggccagtcacctaatctcttgagcctggttttctcatctgcaaaatagagataccagcacctgatacgatttggctctgtgtccctaccccaatctcatgtggaattgt

SEQ ID NO: 59752 - DNA, 818 bp, Homo sapiens
aaaaggttccggcctcagccggcgcacctggcggaggaggaacctcgcgacgcgctctcgggcatcggtttctcccagcaaagcttggagggtttagctgcgcggagagctcagcgagctcttctgtgtctgtttggggcgtgtgggctccgggagcgtgaggaccgggaagctaggaggctccttcccttctggcggctccctcactgagaccgggcggtttggttgcgggggaagtggagacgagccacccttgacctttgactgcaagaactcaccttgagcaggatagaggcacgtggacggtgaccctcgggatgcaataaatgctgagacagatcaggtgtgcaaggcacagagctagaggccagaggcctttcttctccaaccttcagtcacctctttttaaagtgaagccagcatcctcctcggggtttactgtgaaaattaagtgagctgacgcgtgctgtgttttgatgttgcttggctcctacaaacattgagtgggccagacactgttctgaaaaatacgcagtcgacttttgaacagcacaggcttgaactgcatgcggccactaatactcggacttccttctgcctctgccatccctaagacagcaagacccacccctcctgctcctcagcctactcgatgtgatgatggtgagtatgaagacctttactttatgatgatccacttccatttaatggatagtaaatatattttctcttcctatgattttcttaataccattttcttttctctagcttactttattgaaagaatacagtatctaatacatatgacatgcaaaata

SEQ ID NO: 59753 - DNA, 777 bp, Homo sapiens
aacgaattttgaagtaatctctggaatgaggaacaagcctacattattgtgtacttatgtatggtctgcaattttaaaaattttaatgattctaaaatcaacaaggctgtgtatatctcttggaaaataagacaacagtatttctcctttccagtagcagttataacagttcagccttccgatgctccactccgtcacagtgctaggaagaaattcccttctcttgggcacccagccagctgcctttctccagctgtattctaccagattggagaacacagtcattcagggcttgaaataaagttttataaaaatccaatgccccagccagagttgcagtggtgctccactttcccagcaccaaggacctactgaatagagaagacaccagggacccagagatgggtggagccacaagacagaagaaacctgggtcactgcacgactctgatgggtagaacccattccctgtccaatgcttctctctgctccccagaactgtgacatgagcaagaagtaaaccctcattatgtaaagccgctgaagtttgaaggttacttattatagctgcagcctactcagactaatacaactctccattatgagaagctaatatctacaaagaagtaatattcaacgcactccaaaagagcatacattgtaaagagattttaataagttattgcatattgctgattctgagaatacttgtttggggaaaagtaatcacaatgctatactttcaaataaatacataatcgtgattttaatgatcaa

SEQ ID NO: 59754 - DNA, 491 bp, Homo sapiens
atcgcgcgtccgcactccaatatctcaaatagcgaaaaagaacaaggcgacgcttggcagcacctactgaatagagaagacaccagggacccagagatgggtggagccacaagacagaagaaacctgggtcactgcacgactctgatgggtagaacccattccctgtccaatgcttctctctgctccccactcccaccagtgtgcatttgaactgtgacatgagcaagaagtaaaccctcattatgtaaagccgctgaagtttgaaggttacttattatagctgcagcctactcagactaatacaactctccattatgagaagctaatatctacaaagaagtaatattcaacgcactccaaaagagcatacattgtaaagagattttaataagttattgcatattgctgattctgagaatacttgtttggggaaaagtaatcacaatgctatactttcaaataaatacataatcgtgattttaatgatcaa

SEQ ID NO: 59755 - DNA, 148 bp, Homo sapiens
  misc_feature (130)..(130): n is a, c, g, or t
  misc_feature (146)..(146): n is a, c, g, or t
  misc_feature (148)..(148): n is a, c, g, or t
tttttatccttttcttaaagaattaccttttattagataccattacttttatggaccaaagtgttaatttttcatttccaccatggatatcatgatcatggttcatcctacccgtaggataattattggntattttttctttgtgntn

SEQ ID NO: 59756 - DNA, 1393 bp, Homo sapiens
attttatttaaaagcagttacccccatgggtagacactgcccagtctgacgacgttagagggagacggaggggttgacaatacagcctgtgtgtgtgtgacaaggacaggccacggtgttgtgtccggagagtttcatggggaggaaaactttaagctggaggatctgttagcctctcatgcttggccctcctcgtttcttgtagaggtgttgaacaggcaggtgtccttgtgcagaaggtgacattttttcttcggagacggtgagtttttaatgtcgagtgtgatgttggtgagtaaagggttcttgagtgaattgcagtcccagcaccctctgtggatgccaagaggaatctctgtggcgatgatttgtgagggctggtgcttacatttcagtgattaagaaatcaagtgtctgcttaaaacattactgccgtgaagcgtagattatatgatacagttgagggatggatctcaagggttaaatttgtttgaggtttgtctcctcttctggaattggttggaggctagtctcaaaaaaaaaaaaaagcaaacaaaacaacaacaataacaacgaaagttggccagaggggcctcctatgatgttgtaggaagggggtcggatttcttcatgttgagaataatgtgaaaagaaagtatttgcttaggtctcttggatcttcaactagaaatagttttgggttaaaggtagcagtggggtttgattcagcttaacaaataggcattccttgaactatttgccataaattagataaaatggaagtgtttctgttttatctcctgtactttgtggaaaggtctaatttggttttgtgaacgaatgtccgaaatgttttatatttcttcttcagactctatgctttgggaacagtgggtcacagagagggtctgagttgggaatatatggtttagagagaaaatagaggactgctgcttataagaacaggtgtttagtttgatttttgtagatattttctactggttatttaacaacattgaagtttgctttataaggtgcaaaacgtgaattttacgtagcttacacttgatctcttccttatttctctcagaaaacctgtaggattgtgcctattaaattgctttttgtgtggtttaaaccaagagagtattttagatctgcagtggttttattggaaaaaaaaaaaagtgcttgatggagctaatggtgattgtttcacttaaactaggattatatagacaatgcttcttcctgcctctttctgcgaacatttgtttttgtttctccctcaattccagggtttcatttctagaaatctgggctgcaaacagaagcagcagtttgtataatcccaagaacttgcttatgccaggaagctgtaagggtagcatga

SEQ ID NO: 59757 - DNA, 352 bp, Homo sapiens
tgaaaaccagagaaagaatcctcagaaaagagtaggtgggacaatccctaaagctcacacagggccaggaatagtttgtttgctttctcatcaatcagagtggaagaatacacagggcataatcataagaagagtattgcttctgtaatgggaccaaattagctgtacataaaaggctgccctcacaaggcttaaaagcaagcctaattagtgggggtggtggtgtatgcctgtaatcccagctaccctggagcctgaggcaggcaaatcacttgagccctggagatggaggttgcactgagacaagatcgcgccactgcactccagcctggacgacagagtgagactccat

SEQ ID NO: 59758 - DNA, 1235 bp, Homo sapiens
  misc_feature (1016)..(1016): n is a, c, g, or t
  misc_feature (1123)..(1123): n is a, c, g, or t
  misc_feature (1133)..(1133): n is a, c, g, or t
agcgggtgtctcgagtcgcacggagggcaaccgtcgacgggcttagcgcctcaactgtcgttggtgtatttttctggtgtcacttctgtgccttccttcaaaggttctccaaatgtcaactgtcaaggagcagctaattgagaagctaattgaggatgatgaaaactcccagtgtaaaattactattgttggaactggtgccgtaggcatggcttgtgctattagtatcttactgaaggatttggctgatgaacttgcccttgttgatgttgcattggacaaactgaagggagaaatgatggatcttcagcatggcagtcttttctttagtacttcaaagattacttctggaaaagattacagtgtatctgcaaactccagaatagttattgtcacagcaggtgcaaggcagcaggagggagaaactcgccttgccctggtccaacgtaatgtggctataatgaaatcaatcattcctgccatagtccattatagtcctgattgtaaaattcttgttgtttcaaatccagtggatattttgacatatatagtctggaagataagtggcttacctgtaactcgtgtaattggaagtggttgtaatctagactctgcccgtttccgttacctaattggagaaaagttgggtgtccaccccacaagctgccatggttggattattggagaacatggtgattctagtgtgcccttatggagtggggtgaatgttgctggtgttgctctgaagactctggaccctaaattaggaacggattcagataaggaacactggaaaaatatccataaacaagttattcaaagtgcctatgaaattatcaagctgaaggggtatacctcttgggctattggactgtctgtgatggatctggtaggatccattttgaaaaatcttaggagagtgcacccagtttccaccatggttaagggattatatggaataaaagaagaactctttctcagtatcccttgtgtcttggggcggaatggtgtctcanatgttgtgaaaattaacttgaattctgaggaggaggcccttttcaagaagagtgcagaaacactttggaatattcaaaaggatgtaatattttaaattaaagccttntaatgttccnctgtttggagaacagaagatagcaggctgtgtattttaaattttgaaagtattttcatttgatctttaaaaaataaaaacaaattggagacctgtgaaaaaa

SEQ ID NO: 59759 - DNA, 1289 bp, Homo sapiens
  misc_feature (1070)..(1070): n is a, c, g, or t
  misc_feature (1177)..(1177): n is a, c, g, or t
  misc_feature (1187)..(1187): n is a, c, g, or t
agcgggtgtctcgagtcgcacggagggcaaccgtcgacgggcttagcgcctcaactgtcgttggtgtatttttctggtgtcacttctgtgccttccttcaaaggtggtgctttgtccctgtgggtcatctgtactgattgcgccaagcaaagcatttgttctccaaatgtcaactgtcaaggagcagctaattgagaagctaattgaggatgatgaaaactcccagtgtaaaattactattgttggaactggtgccgtaggcatggcttgtgctattagtatcttactgaaggatttggctgatgaacttgcccttgttgatgttgcattggacaaactgaagggagaaatgatggatcttcagcatggcagtcttttctttagtacttcaaagattacttctggaaaagattacagtgtatctgcaaactccagaatagttattgtcacagcaggtgcaaggcagcaggagggagaaactcgccttgccctggtccaacgtaatgtggctataatgaaatcaatcattcctgccatagtccattatagtcctgattgtaaaattcttgttgtttcaaatccagtggatattttgacatatatagtctggaagataagtggcttacctgtaactcgtgtaattggaagtggttgtaatctagactctgcccgtttccgttacctaattggagaaaagttgggtgtccaccccacaagctgccatggttggattattggagaacatggtgattctagtgtgcccttatggagtggggtgaatgttgctggtgttgctctgaagactctggaccctaaattaggaacggattcagataaggaacactggaaaaatatccataaacaagttattcaaagtgcctatgaaattatcaagctgaaggggtatacctcttgggctattggactgtctgtgatggatctggtaggatccattttgaaaaatcttaggagagtgcacccagtttccaccatggttaagggattatatggaataaaagaagaactctttctcagtatcccttgtgtcttggggcggaatggtgtctcanatgttgtgaaaattaacttgaattctgaggaggaggcccttttcaagaagagtgcagaaacactttggaatattcaaaaggatgtaatattttaaattaaagccttntaatgttccnctgtttggagaacagaagatagcaggctgtgtattttaaattttgaaagtattttcatttgatctttaaaaaataaaaacaaattggagacctgtgaaaaaa

SEQ ID NO: 59760 - DNA, 1117 bp, Homo sapiens
  misc_feature (898)..(898): n is a, c, g, or t
  misc_feature (1005)..(1005): n is a, c, g, or t
  misc_feature (1015)..(1015): n is a, c, g, or t
agcgggtgtctcgagtcgcacggagggcaaccgtcgacgggcttagcgcctcaactgtcgttggtgtatttttctggtgtcacttctgtgccttccttcaaaggttctccaaatgtcaactgtcaaggagcagctaattgagaagctaattgaggatgatgaaaactcccagtgtaaaattactattgttggaactggtgccgtaggcatggcttgtgctattagtatcttactgaagattacagtgtatctgcaaactccagaatagttattgtcacagcaggtgcaaggcagcaggagggagaaactcgccttgccctggtccaacgtaatgtggctataatgaaatcaatcattcctgccatagtccattatagtcctgattgtaaaattcttgttgtttcaaatccagtggatattttgacatatatagtctggaagataagtggcttacctgtaactcgtgtaattggaagtggttgtaatctagactctgcccgtttccgttacctaattggagaaaagttgggtgtccaccccacaagctgccatggttggattattggagaacatggtgattctagtgtgcccttatggagtggggtgaatgttgctggtgttgctctgaagactctggaccctaaattaggaacggattcagataaggaacactggaaaaatatccataaacaagttattcaaagtgcctatgaaattatcaagctgaaggggtatacctcttgggctattggactgtctgtgatggatctggtaggatccattttgaaaaatcttaggagagtgcacccagtttccaccatggttaagggattatatggaataaaagaagaactctttctcagtatcccttgtgtcttggggcggaatggtgtctcanatgttgtgaaaattaacttgaattctgaggaggaggcccttttcaagaagagtgcagaaacactttggaatattcaaaaggatgtaatattttaaattaaagccttntaatgttccnctgtttggagaacagaagatagcaggctgtgtattttaaattttgaaagtattttcatttgatctttaaaaaataaaaacaaattggagacctgtgaaaaaa

SEQ ID NO: 59761 - DNA, 373 bp, Homo sapiens
ttcaaatgaaacaaaattaaacatgcccctatctagtggatgtataccttctaaatggcacatagtggcttttatacatgccttctataaacagtatgaccaggaaagcattgactttatcaggcattccctcacaattgttagggccatcagaccttcctcattccaggggatgagtttttgtcatccctggaaatcatccaatatctgactatttgtttttgacttaaaaaggggtaatgaaatggaaagaaactgaaatgggagtcagaagctaacaagttctgtgatcctgggcaggaaccttcatgcaaattgtatctttacgggcctaactttgttgacccatgcctcaatttcatcacctgcaaaa

SEQ ID NO: 59762 - DNA, 532 bp, Homo sapiens
ctcctttgtaatttgtacagaaggacttgtataacattagaaaagatagggttgaataagttacatagaaaaaatatgtcactctccatgtaactacaaagacatccataaacaggcctgagcatgccacatgcacatgtcagcacagttcacagcattcactgagcacctgctgtggccagagaccacagtagatgctgggggtgaaaagctcaaggagctctccctgtagtgagggaggcagcagaaacccacagtttcatcatagggtagttgagtttaggaataggaatgggtacgggatagtaggggattgtgagcctgagtattcagggaggacttcttggaggaggtgatgcacaagttctgtcttcagggaaagtcagtagtaaccaggtcgaaggtagtgtaaattccttttctcctttttcctctttgggatttgtatttttcccatggaattttacctgtacaggtcattttacactggactaacaatgcttaagtgctttttaaaagcaaactgtgccag

SEQ ID NO: 59763 - DNA, 629 bp, Homo sapiens
ggtaggaggtgcaggctgccaccatcacaggtgagagggcagaggctcacctgatggggacgaggcttgaggtgggctcaggctggcccccacatcacatccagccctggcgagtgtccttcaggaggtggctgtgccctcctggactcgaacatgtgtgagctgatgtaccacctaggagagcccagcctggctggccagcacctcatccaggacgacatgctctgtgctggctctgtccagggcaagaaagactcctgccagggtgactccggggggccgctggtctgccccatcaatgatacgtggatccaggccggcattgtgagctggggattcggctgtgccggcctttccggcctggtgtctacacccaggtgctaagctacacagactggattcagagaaccctggctgaatctcactcaggcatgtctggggcccgcccaggtgccccaggatcccactcaggcacctccagatcccacccagtgctgctgcttgagctgttgaccgtatgcttgcttgggtccctgtgaaccatgagccatggagtccgggatcccctttctggtaggattgatggaatctaataataaaaactgtaggttttttatgtgtattttatg

SEQ ID NO: 59764 - DNA, 5194 bp, Homo sapiens
cgcgctctcttcctccctcagacaactcgccccccgccctccgcccccctccacgtaattccgaaagagcagaagaaagagaaggagaacaggaaaagaagagctagtaagcgagagcgagagcacagaaaagaaaaaaaaaagccttaagaggaccgaaggggaggaaaggaaaaggatggacaaccacaaaacgcagcgattgcggaaattttccagcgccattggctgggcagcgtgagtccttcggtcgggcgtgatttcagcaccgggggaactggacagcacctcggggggacttctgggcaacccgcaaccacagcaagaactccaccagcagcctcaacaacagaagccgcggaaaaccctgctttgtatcagagaggcaaggtcagtccgacgcacagccatgcacaggcagtgcgcctgtactacgctgcaaaccctctgcttgtttctctaacatgcacttgcttctaattactagcattgtttcatttctgatcagtgaagatcagtagatgagattctgtaagggtgtacttttaatttatatgtatatatttaacttctttttctgttatttttaaagtgttgtgggggagtggggtttttttcctactttttttttttttttttttctttgcttgccttgcactacgtgcctggatagtttgtggatataattattgactggcgtctgggctattgcagtgcgggggggttagggaggaaggaatccacccccacccccccaaacccttttcttctcctttcctggcttcggacattggagcactaaatgaacttgaattgtgtctgtggcgagcaggatggtcgctgttactttgtgatgagatcggggatgaattgctcgctttaaaaatgctgctttggattctgttgctggagacgtctctttgttttgccgctggaaacgttacaggggacgtttgcaaagagaagatctgttcctgcaatgagatagaaggggacctacacgtagactgtgaaaaaaagggcttcacaagtctgcagcgtttcactgccccgacttcccagttttaccatttatttctgcatggcaattccctcactcgacttttccctaatgagttcgctaacttttataatgcggttagtttgcacatggaaaacaatggcttgcatgaaatcgttccgggggcttttctggggctgcagctggtgaaaaggctgcacatcaacaacaacaagatcaagtcttttcgaaagcagacttttctggggctggacgatctggaatatctccaggctgattttaatttattacgagatatagacccgggggccttccaggacttgaacaagctggaggtgctcattttaaatgacaatctcatcagcaccctacctgccaacgtgttccagtatgtgcccatcacccacctcgacctccggggtaacaggctgaaaacgctgccctatgaggaggtcttggagcaaatccctggtattgcggagatcctgctagaggataacccttgggactgcacctgtgatctgctctccctgaaagaatggctggaaaacattcccaagaatgccctgatcggccgagtggtctgcgaagcccccaccagactgcagggtaaagacctcaatgaaaccaccgaacaggacttgtgtcctttgaaaaaccgagtggattctagtctcccggcgccccctgcccaagaagagacctttgctcctggacccctgccaactcctttcaagacaaatgggcaagaggatcatgccacaccagggtctgctccaaacggaggtacaaagatcccaggcaactggcagatcaaaatcagacccacagcagcgatagcgacgggtagctccaggaacaaacccttagctaacagtttaccctgccctgggggctgcagctgcgaccacatcccagggtcgggtttaaagatgaactgcaacaacaggaacgtgagcagcttggctgatttgaagcccaagctctctaacgtgcaggagcttttcctacgagataacaagatccacagcatccgaaaatcgcactttgtggattacaagaacctcattctgttggatctgggcaacaataacatcgctactgtagagaacaacactttcaagaaccttttggacctcaggtggctatacatggatagcaattacctggacacgctgtcccgggagaaattcgcggggctgcaaaacctagagtacctgaacgtggagtacaacgctatccagctcatcctcccgggcactttcaatgccatgcccaaactgaggatcctcattctcaacaacaacctgctgaggtccctgcctgtggacgtgttcgctggggtctcgctctctaaactcagcctgcacaacaattacttcatgtacctcccggtggcaggggtgctggaccagttaacctccatcatccagatagacctccacggaaacccctgggagtgctcctgcacaattgtgcctttcaagcagtgggcagaacgcttgggttccgaagtgctgatgagcgacctcaagtgtgagacgccggtgaacttctttagaaaggatttcatgctcctctccaatgacgagatctgccctcagctgtacgctaggatctcgcccacgttaacttcgcacagtaaaaacagcactgggttggcggagaccgggacgcactccaactcctacctagacaccagcagggtgtccatctcggtgttggtcccgggactgctgctggtgtttgtcacctccgccttcaccgtggtgggcatgctcgtgtttatcctgaggaaccgaaagcggtccaagagacgagatgccaactcctccgcgtccgagattaattccctacagacagtctgtgactcttcctactggcacaatgggccttacaacgcagatggggcccacagagtgtatgactgtggctctcactcgctctcagactaagaccccaaccccaataggggagggcagagggaaggcgatacatccttccccaccgcaggcaccccgggggctggaggggcgtgtacccaaatccccgcgccatcagcctggatgggcataagtagataaataactgtgagctcgcacaaccgaaagggcctgaccccttacttagctccctccttgaaacaaagagcagactgtggagagctgggagagcgcagccagctcgctctttgctgagagccccttttgacagaaagcccagcacgaccctgctggaagaactgacagtgccctcgccctcggccccggggcctgtggggttggatgccgcggttctatacatatatacatatatccacatctatatagagagatagatatctatttttcccctgtggattagccccgtgatggctccctgttggctacgcagggatgggcagttgcacgaaggcatgaatgtattgtaaataagtaactttgacttctgacaaaaaacaaaaagtgctgcatggctcgcatggaatccacgcgctccagggactctgcccgcccccgcgactggagacggcatctcgttcacagcacccaccctcttacctgataagttccatcgtatcaaactttctataaacaaaatacagtataatcagaaagtgccatttcgccattatttgtgatcggtaggcagttcagagcataagttaactgtgaaaaaaatgtaaaggttttatttaggacatttgcatggctagtcatcagtccattttatgagttaacaatgtattttgttgagggaagtttttaggggttgttttgggttcttttattttgatggtgatgttttattttattttatttttttcagggggtcttttttttaatacatatccaataatgccttccatctgaatgtaaaataagtacccatgatttctattatagtatcagtgtaattatttaaaaaatgattttgaggcagttaagcatgaccaattaatgtcactctagtgcttaggctgcgatcctatggtagcaattctgtgctggtataaatcttacttataaagtaggaaaagagaaccgaggaagcacgtgaaacttactaattctattcgaggattttataatggcatattttttcagtattaaagcgaaaatgttttcaactctgggtccttacctttttccagcttcatatttgcaagtggtaaattggatttgcggtggaagagacaggggagggaaacggttggggttagatcccttcctgagctacattaaggctctttctctaatcgccttacttagctttttaccctttaagtagctcctcttccctcgcccccaccctctaccccacccccaccttcgctcagactttaccggctttccccagtccataaaggtcttgccccaacactcaccccttctttttttcccctctccaaatgcagcagtgaatccctttattaatactggaaatccctctctgctgcttttgttggtgctgcccacactgcagatatattaaggatgttaggagagatttgatttaattgactctgcctagataggtctcattaaacagagtggagatttcattggtcagcactcctcaatgaaagacagacctaatgactggcatttgagatgctgctggcattttgaattcaacatctgctgaaaacggtaaaactaattagtgcccacccaccctccccgccccagcaactgcatattgaaatttgttaaagcactcatctttatggaaattaatcattatcctaaagaagtgtttctctcccatcatccggatttctggttgtggcccagcaattaacaaaaacagcttcaactgttcgaattttatgaaccaatgtaactctggcctcaatcatattcctctgggatttctaaacagcagttaagctacaaaaagcaaacaaaaccacacatattgatggagtctgcattccaccacatatccacccttgagaagtatgtcaaaagactgcagactatagatttttttttaatataggattataaatcagctagtgaaagacctcagagcagttgtaagtagatctgccatctagaactcatattctaaagggaagtgatttctcagaacagtgatgttctggaatatgtattatttattttaacacttttttaataaaatctttattataaaccaaaaaaaaaa

SEQ ID NO: 59765 - DNA, 400 bp, Homo sapiens
cggtactgagagcagccatcttggagcttggaaacggagacgcatgtgaagccgtttgcacagtatttttcccttaaaatatgggtggggaacaaggggctgtcatttgtctttttctttgggatggtgagcagtgagcagggcacgccgcgaggagcaaactgcagcccaagcacacgcggtcagcacgcggagcacaggtggggagaagcggctgacggtggcgtggccccgcgtacctgggtgtggacgccccgccgccccgcaggggaaagctcctggagtctggggtctgctgccccgagctctgggtgtccagcctctgcctcaactgaaatctgaagatcaggccaatttcgtggtctctcagacgtcggtaaacaagaggccttggctcctc

SEQ ID NO: 59766 - DNA, 291 bp, Homo sapiens
accctggttttcgaggctgccttgccttgcatgtcctgtaaggcctgtagacagtagacagagcgagcatcctaaacacactcatggagaaacaagcccaccagggtctctgttgtgaactggggacgtctgaggatccgtgaaatggccttgtctaagaaaacaggccctgggtgtacaaaacccagccaaaccccgcttcaacatttccatcaggttcaaatgctgagacggcaacatccctgaaacctgtaaggagatagctgcatggcccctgactcctgtttccag

SEQ ID NO: 59767 - DNA, 877 bp, Homo sapiens
accattgactaatacatgttctctgatgaactttgctattcaacatacatgcaaaggggttataaaaacaagtcaactctagtgctgatgagggtgatcatcatcactgatcatggtgtcagttgattatagtgtcaatttataacttaatttatgtaaaatagagcaatgcaaaagacatagcaatcttcacttcaaatgaagagtcttgaatgccacttttctaaagagaaggctcatggaggcacctcctcactattgaaaaatccattatacctgtgataaaactgattgtgttcagttgtattagatttgtatgcaaataaaaagttgggtaattagctatacattgtcctaaacgtataaaataagaaaaatacatagatgtatggtttcctaggacatctaccagtttagaatgcgaggctaatgtgggagctgccacagcatcctgattaaggctatggaaagaagttgcagactgatgatgtcttagaagtaatgacattttttaaagataatatttctttggtgagataaacagattatattttacagtaaacacattttatatttcagttaataagacattgtatattaaataatcgcatttaatgctttacttttttcctgtgttaaaattaatcactcatggccttggccatatgactttgccattcctcccactgtttatctgacttgtttatattttattgagcttgctcatatgacttacaatagcctgtgacagaagtgacaggagaccccatcctgaccaagaccttaagaggcatcctagtttcctctcactttcacgagcctctgcggggttcatcatgagaacatatccctagaaaccactggacaaggagaacaa

SEQ ID NO: 59768 - DNA, 489 bp, Homo sapiens
ctggaggacacaaaaaactttattttaaaatttctttacctgtcaggcaaatcacaaagataacaatagccagtcttcagagtatatcaggaaaaagcttctaatgggaattggaggcatggtgaaatacacgtggttgtattatagacacttctggcctgatctagctgaggtcagtgatggccacaaggacttgagatcacggaagtgggtgacgagcagcactttggttgtcctttgagaacagacattgctacttgaaaactcaaatctttgtccttgggaaaaaaaccaaaaaaacaaaaaacaaagaactctcaatggtggagtgaacgtagcccttcatttcagtgttggaagcaaagcccttgccctgtatcttatactttctgatgataatgatcacactgtttactggtcacaaatagtaaattgtaggctttgaatgatgtttttcaaatgtgtattaaaaatgtcctctctaatctt

SEQ ID NO: 59769 - DNA, 375 bp, Homo sapiens
gtcagatcttgtaaaaaggaactctttctagcaattaggtcaaagtagttggttcaggaaagtcaatgtgaaatgaagtagttttagtttaagaatctattctatgaaatatacttgaagagaagaggacaggaagataagctttaagttgtaacaaccttttctggcttacaaaatgcatcagtctagcctgataataaataacctatttttcctcacataaaaagctagaaagttggacctttattttaaaaccaagcaaagaaagcacacaagactatcactaaaatactttataggaaaattaagatttgtggattttaaaaaagcctctcagatactacaaatgtatactttgtgcattttgggaaaaca

SEQ ID NO: 59770 - DNA, 321 bp, Homo sapiens
atttcttaaggaaactcggaggatattgtaaaatcttttcatgcttagtttaaaaatcctgttacaaacattttttcatttgtcccttctaacaaccctataaggtagacaggtggcatcttatcctgcagttgaggaaaccatggctcagagcagctccttgacacctgtagtcacaatgaatgactggctaactccaaaatcaaatctggtcctttagctcctacttcagggttttaactattgttagtgataacagtgatagtactaaaagaatgaatttctattatatgtaagaaggtataagactactttattgat

SEQ ID NO: 59771 - DNA, 7291 bp, Homo sapiens
  misc_feature (171)..(171): n is a, c, g, or t
  misc_feature (177)..(177): n is a, c, g, or t
atccggggctctccagacatcagagcttaaacccaggactctgcaagcggcatctcattccggggtccagggctctcccggctctccatcccctccctaacctcccccgcctcccgcgctcgctccctcgctccctccccgctcgcttcctcccccaccatcgcagcctangagaangggccggggctcaagatggctttagccgggctctgcgccctgctcgcctgctgctgggggccggcggcggtgctggccacggccgccggcgacgtggatccatccaaggagctggagtgcaagctcaaaagcatcacggtgtcggcactgcccttcctgcgcgagaacgacctgagcatcatgcacagcccctcggcctcggagcccaagctcctcttctcggtgcgcaacgacttcccgggagaaatggtcgtggtggacgacctggagaacacggagctgccctacttcgtgctggagatctcagggaacacagaggatatccctttggtgcgctggaggcagcagtggctggagaatggcactttgctttttcacattcatcaccaagatggtgccccaagccttcctggacaagaccccactgaagaaccccaacatgagtcggcagaagaggagctgaggatcctccacatctcagtcatgggtggcatgatcgctctgctgctgtccatcttgtgcctggtgatgatcctgtatactcgccggcgctggtgcaaacgccgccgggtcccgcagccccagaagagtgccagtgctgaggcagccaatgagattcactacattccttctgtgctgatcggcgggcacggacgggagagcctgcgcaatgcccgcgtgcagggccacaactccagtggcaccctgagcatccgggagacacctatcctggacggctatgagtatgacatcactgatctgcgccaccatctgcagagggagtgcatgaacggaggggaggactttgccagccaggtcacgcgcaccctcgactccctgcagggctgcaatgaaaagtcggggatggacctcacaccaggaagtgacaatgccaagctgtcactgatgaacaagtataaagataatattatagccactagccctgtggactccaaccaccagcaagccacccttctctctcacacctccagcagccagagaaagcggatcaacaacaaagcaagagctggttccgccttcttgaaccctgaaggggattctggcacagaggcagaaaacgacccccagctgaccttttacacggatccttcaaggagcaggaggcgtagtagagtgggttctccccgaagtcctgtgaataagaccaccttgaccctgatcagcatcaccagctgtgtgattggcctcgtgtgctcctctcacgtcaactgccctctcgttgtcaagatcaccctgcatgtccctgagcacctgattgctgatgggagccgcttcatcttgctggaggggagccagctggatgccagtgactggctgaaccctgcccaagtggttctcttctctcagcagaactccagcggaccctgggccatggacctctgtgcccggcggctcctggacccctgtgaacaccaatgtgaccccgaaactggggaatgcctctgctatgaaggctacatgaaggatccagtacataagcacctttgcattcggaacgaatgggggacaaaccaggggccatggccttacacaatatttcagcgaggctttgacctggttttgggagagcagccctctgataaaatatttagattcacctacactcttggggagggcatgtggttgcccctcagcaagagctttgtgattccaccagccgaactggccatcaatccatcagcaaagtgcaagacggacatgactgtgatggaggatgctgtggaggtcagagaggagctgatgacttcatcctccttcgacagcctggaggttctcttagattcctttgggccggtgcgcgactgcagcaaagataacgggggctgcagtaagaatttccgctgtatttcagatcgcaagctggactccactggttgcgtgtgcccatctggactcagtcccatgaaggacagctctggctgctatgaccgccacatcggggtggactgttccgacggcttcaacggcggctgtgagcagctgtgcctccagcagatggcgcccttcccggacgaccccaccttgtataacatcctcatgttctgtgggtgcatcgaggactacaagcttggtgtggatggacgctcttgccaactcatcacggagacctgtccagagggaagtgactgtggggaaagcagggagcttcccatgaaccagaccctctttggggagatgttctttggttacaacaaccattccaaggaagtggctgccggacaggtgctgaaaggaacattcaggcaaaacaactttgctcgtggtttagaccagcaactgccagatggtcttgtggtggccactgtgcccctggagaatcaatgcctagaggagatctcggagcccacccctgaccctgacttcctgactgggatggtgaacttcagtgaagtgtctgggtaccctgtgctgcagcactggaaggtccggtctgtgatgtaccacatcaaactcaaccaagtggccatctctcaggccctcagcaatgctctccactcgctggatggggctacatctcgtgcagattttgtggcgctgttggaccagttcggcaaccattacatccaggaagctatctacggctttgaggagtcctgttctatctggtacccaaacaagcaggtccagcggcgactctggctggagtatgaagacatcagtaaaggcaactccccatcagatgagtctgaggagcgggaaagagaccccaaggtgctgacattcccagaatacatcaccagcttgtcagactccggcaccaagcacatggcggctggagtccgcatggagtgccacagcaagggacgatgcccctcgtcctgccccctgtgtcatgtgacatccagccctgacacccctgctgagccggttctgctggaggtgaccaaagcagcccccatctatgaactagtgaccaacaaccagacccagaggctcttgcaggaggctaccatgagctctctctggtgctcagggactggagatgtcatcgaggactggtgtcgatgtgactccactgcttttggagctgatggactccccacctgtgcgcctctcccacagcctgtgctgagactctccacggttcacgagcccagcagcactcttgtggtcctggagtgggaacactcagagccaccaatcggggtgcagattgtagattacctcctccgtcaagagaaagtcactgacaggatggaccactccaaagtggagacagaaacagtgctgagctttgtggacgacatcatctctggagcaaagtctccttgtgcaatgccatctcaggtgccggacaagcagctcaccaccatctctctgatcatacgatgcctggaacctgacaccatttacatgttcacgctgtggggagtggacaacacaggacggcgctccaggccaagcgacgtgatcgtgaagaccccatgccccgtggtggatgatgtcaaggctcaagaaatagcagacaagatctacaatctcttcaatggctacactagtgggaaggagcagcagaccgcctacaacaccctcctggatctgggttcccccaccttacaccgggtcctctaccactataaccagcactatgagagttttggggaattcacctggcgatgtgaggatgagttaggtcccaggaaagctggtctcatcctttcccagcttggggacctcagcagttggtgcaatggactccttcaggaacccaagataagcttgcggcgcagctcactcaagtacctggggtgccgctacagcgagatcaaaccctacggacttgactgggcggagctcagccgggacctcaggaagacgtgtgaggagcagaccctgagtatcccctacaacgactatggggacagcaaagagatctagcaccataaggccagggagctgctgccagaatgaagtaggaaagaggagggatccatctgggttggtctgtggatttttaatattttttaatggaacatgaaaacctccacagcaacatcgaaaccagggagaaagtgatccttgctccctgcagaacttcttcagtatgatgttctccatctgcatgattgggaaatctgccagccagtggcttcatgcagtgccatatttctttagaggattactttggggtttgctttgccattaatttgttccattcatttttttttccctgagaagtttaccaaaatgctcaagagctctgccgtgctccccatgaaaagtctattaagtaggcaccctgtgctcactcagttcctaaatccattgcaactgggagcagaggtgaggccagaaagttgttaggcctgccgcaggccccaccctcaagcattcctcaggaagcgtctcactctgggagccttggccctgctcacagagagagacaatagaaaattgaggaaggtggcccttgtctgtgtctcctggttttcttcctaggccttgctatcactatttccatacccgaaaggtgaaaccagctttcattataggccccagtgggccacttgggttttgagatccttccttattttaagccaggactgggattaaatctccctctgtcagatctctgtcccttcctctgaacaacatgatctttgagagggaacaagatgccatctgtcaactgcaccttcagaaaagtctacctgggagactagttagcagtccacattcaagagaagacttggagtttattgttttttaaaaaaaccatgcttcctttggatagacttctccagcttaccaatatatatccatgtgcctggattatctttaacccccacacctcttaccttggacaggtaaggcttggccgatgtctgattgggaccaggaggggtcaacactttcatatcagtgttacagtgaactaaagctattattgatcacaaaaaacttctgttcatccccaccttgctaaatttgcttgtgttgctagttttgcaaatcgtttctctgatgaccataagcaggaggattccaccatggtcactgcccatccagtcacagggattctgtgtagggaagcaccactgattgcagttaacatctagagtgttgtttccatcccactgcccaagcattggcatggtcatgaatggtggcccagccaacaggaagcccagcctttcagaaagagcctggcaaggccctgttgactagcaatggccttagctgtcccacacaactcagtggcctgaacacacaccttcagccaccatgcctttgaccagggctcctcatctggaaacatatgagaaaggtcagcaaacagatgcaagacctataaggctagtcattgagctatattggttttttttctaaatagtagtagtgacagataacatttattgagtgcttgctgtatgccaggcgctgatgtaagcactttaggtatcattgaattctcacagcaactcctgaggaaagtgctattcttgtctccattttagtgttgaggaaaacgaggcaaagagaggttatacaacttgcctcaaatcccttgtgcactgtaactcacactgagtttcagtgtgatttcaggctgttggtctccagggcacaggatcttagctactctgggatacccagttctgttttcagtatcatctggcacacaactgtccaagctctcagccccacagggaacctgcccagagagctttacctttcccaagcatctgtggcatggacatgtcctctgtgcagtggaaggaggaggggcgaaagtacgcccttagcctttggagctagagcacccttgggacccctagttccactgcacatggccctcctccccaccctcatgactgggaaggaagcctgtgatgaggctgagataaagcacagggtggtttcactctcctctctccttctttccaaacactgaaggatttatttcaaactctctaatgcacctgcctcagagattcccctactttcaaagcaaagatcagcagaaaaattggctgtcccacctgtggcaaatgctggagcctcagttaaagtgcctcaaggggcaaatatttcaccattgccagagaagatgtgacaggccaatcagacagggcccagagcatctctttgctgctactgttttgccatccttctattcatatctgtgcagaacacggtgttttaagcttgagtgaaaggagggtgaggctgccgatgccttcctgcccagaagtggatgatgtgggagttgacaggccagggagagggtgaagcaggtatcagagtcactcctctgtaccctctccttctgtttttattttaggcacactatcttcctctctcctatctttccctcaatctcccaagttcctctaccttctttatctttgtcttttacttcttctttctgtgaccctccttttttggcctcctctttccccaagactttcttcctcctgtttctcgttgagttctccccactgaatgtgtgtatgtatgtacacacacacacacgtgtgcacacacaatgcacacaactcctatgactggctcctacttacattcaagttaaaaaggctgatatgaacagggcaggggaaaatcttaggatggttgtacaattgactggaggattttttccccttggaagacactattgatctcaacctgctgacttttcctaatgcttacctgaaggaacccatcctggctagaaagggtgatggtactggaccggtattcaaccttgagttttcaagctgccaaacaggtcttaagggaggtgcttatatcccaccaacactctcccagctcccatgtccccaagacctctggagtttcctcttgaatgtacatgaaccactgtaatagcattagacttttaattgagtgtgcaatcgttttccatggagtttggtccgttcattattttttagttaactacacttcttgatattcaaatgttctattaaaaaaactgagtatgaagaaaaacactttactactgcagaaggaagaaagaatataatatgaccatcttcaggtataacagtgttgtttaaaagagaattattgtatgattataaaagatgaaataattaactgaataataaaacaaagctattagtaa

SEQ ID NO: 59772 - DNA, 7237 bp, Homo sapiens
  misc_feature (171)..(171): n is a, c, g, or t
  misc_feature (177)..(177): n is a, c, g, or t
atccggggctctccagacatcagagcttaaacccaggactctgcaagcggcatctcattccggggtccagggctctcccggctctccatcccctccctaacctcccccgcctcccgcgctcgctccctcgctccctccccgctcgcttcctcccccaccatcgcagcctangagaangggccggggctcaagatggctttagccgggctctgcgccctgctcgcctgctgctgggggccggcggcggtgctggccacggccgccggcgacgtggatccatccaaggagctggagtgcaagctcaaaagcatcacggtgtcggcactgcccttcctgcgcgagaacgacctgagcatcatgcacagcccctcggcctcggagcccaagctcctcttctcggtgcgcaacgacttcccgggagaaatggtcgtggtggacgacctggagaacacggagctgccctacttcgtgctggagatctcagggaacacagaggatatccctttggtgcgctggaggcagcagtggctggagaatggcactttgctttttcacattcatcaccaagatggtgccccaagccttcctggacaagaccccactgaagaaccccaacatgagtcggcagaagaggagctgaggatcctccacatctcagtcatgggtggcatgatcgctctgctgctgtccatcttgtgcctggtgatgatcctgtatactcgccggcgctggtgcaaacgccgccgggtcccgcagccccagaagagtgccagtgctgaggcagccaatgagattcactacattccttctgtgctgatcggcgggcacggacgggagagcctgcgcaatgcccgcgtgcagggccacaactccagtggcaccctgagcatccgggagacacctatcctggacggctatgagtatgacatcactgatctgcgccaccatctgcagagggagtgcatgaacggaggggaggactttgccagccaggtcacgcgcaccctcgactccctgcagggctgcaatgaaaagtcggggatggacctcacaccaggaagtgacaatgccaagctgtcactgatgaacaagtataaagataatattatagccactagccctgtggactccaaccaccagcaagccacccttctctctcacacctccagcagccagagaaagcggatcaacaacaaagcaagagctggttccgccttcttgaaccctgaaggggattctggcacagaggcagaaaacgacccccagctgaccttttacacggatccttcaaggagcaggaggcgtagtagagtgggttctccccgaagtcctgtgaataagaccaccttgaccctgatcagcatcaccagctgtgtgattggcctcgtgtgctcctctcacgtcaactgccctctcgttgtcaagatcaccctgcatgtccctgagcacctgattgctgatgggagccgcttcatcttgctggaggggagccagctggatgccagtgactggctgaaccctgcccaagtggttctcttctctcagcagaactccagcggaccctgggccatggacctctgtgcccggcggctcctggacccctgtgaacaccaatgtgaccccgaaactggggaatgcctctgctatgaaggctacatgaaggatccagtacataagcacctttgcattcggaacgaatgggggacaaaccaggggccatggccttacacaatatttcagcgaggctttgacctggttttgggagagcagccctctgataaaatatttagattcacctacactcttggggagggcatgtggttgcccctcagcaagagctttgtgattccaccagccgaactggccatcaatccatcagcaaagtgcaagacggacatgactgtgatggaggatgctgtggaggtcagagaggagctgatgacttcatcctccttcgacagcctggaggttctcttagattcctttgggccggtgcgcgactgcagcaaagataacgggggctgcagtaagaatttccgctgtatttcagatcgcaagctggactccactggttgcgtgtgcccatctggactcagtcccatgaaggacagctctggctgctatgaccgccacatcggggtggactgttccgacggcttcaacggcggctgtgagcagctgtgcctccagcagatggcgcccttcccggacgaccccaccttgtataacatcctcatgttctgtgggtgcatcgaggactacaagcttggtgtggatggacgctcttgccaactcatcacggagacctgtccagagggaagtgactgtggggaaagcagggagcttcccatgaaccagaccctctttggggagatgttctttggttacaacaaccattccaaggaagtggctgccggacaggtgctgaaaggaacattcaggcaaaacaactttgctcgtggtttagaccagcaactgccagatggtcttgtggtggccactgtgcccctggagaatcaatgcctagaggagatctcggagcccacccctgaccctgacttcctgactgggatggtgaacttcagtgaagtgtctgggtaccctgtgctgcagcactggaaggtccggtctgtgatgtaccacatcaaactcaaccaagtggccatctctcaggccctcagcaatgctctccactcgctggatggggctacatctcgtgcagattttgtggcgctgttggaccagttcggcaaccattacatccaggaagctatctacggctttgaggagtcctgttctatctggtacccaaacaagcaggtccagcggcgactctggctggagtatgaagacatcagtaaaggcaactccccatcagatgagtctgaggagcgggaaagagaccccaaggtgctgacattcccagaatacatcaccagcttgtcagactccggcaccaagcacatggcggctggagtccgcatggagtgccacagcaagggacgatgcccctcgtcctgccccctgtgtcatgtgacatccagccctgacacccctgctgagccggttctgctggaggtgaccaaagcagcccccatctatgaactagtgaccaacaaccagacccagaggctcttgcaggaggctaccatgagctctctctggtgctcagggactggagatgtcatcgaggactggtgtcgatgtgactccactgcttttggagctgatggactccccacctgtgcgcctctcccacagcctgtgctgagactctccacggttcacgagcccagcagcactcttgtggtcctggagtgggaacactcagagccaccaatcggggtgcagattgtagattacctcctccgtcaagagaaagtcactgacaggatggaccactccaaagtggagacagaaacagtgctgagctttgtggacgacatcatctctggagcaaagtctccttgtgcaatgccatctcaggtgccggacaagcagctcaccaccatctctctgatcatacgatgcctggaacctgacaccatttacatgttcacgctgtggggagtggacaacacaggacggcgctccaggccaagcgacgtgatcgtgaagaccccatgccccgtggtggatgatgtcaaggctcaagaaatagcagacaagatctacaatctcttcaatggctacactagtgggaaggagcagcagaccgcctacaacaccctcctggatctgggttcccccaccttacaccgggtcctctaccactataaccagcactatgagagttttggggaattcacctggcgatgtgaggatgagttaggtcccaggaaagctggtctcatcctttcccagcttggggacctcagcagttggtgcaatggactccttcaggaacccaagataagcttgcggcgcagctcactcaagtacctggggtgccgctacagcgagatcaaaccctacggacttgactgggcggagctcagccgggacctcaggaagacgtgtgaggagcagaccctgagtatcccctacaacgactatggggacagcaaagagatctagcaccataaggccagggagctgctgccagaatgaagtaggaaagaggagggatccatctgggttggtctgtggatttttaatattttttaatggaacatgaaaacctccacagcaacatcgaaaccagggagaaagtgatccttgctccctgcagaacttcttcagtatgatgttctccatctgcatgattgggaaatctgccagccagtggcttcatgcagtgccatatttctttagaggattactttggggtttgctttgccattaatttgttccattcatttttttttccctgagaagtttaccaaaatgctcaagagctctgccgtgctccccatgaaaagtctattaagtaggcaccctgtgctcactcagttcctaaatccattgcaactgggagcagaggtgaggccagaaagttgttaggcctgccgcaggccccaccctcaagcattcctcaggaagcgtctcactctgggagccttggccctgctcacagagagagacaatagaaaattgaggaaggtggcccttgtctgtgtctcctggttttcttcctaggccttgctatcactatttccatacccgaaaggtgaaaccagctttcattataggccccagtgggccacttgggttttgagatccttccttattttaagccaggactgggattaaatctccctctgtcagatctctgtcccttcctctgaacaacatgatctttgagagggaacaagatgccatctgtcaactgcaccttcagaaaagtctacctgggagactagttagcagtccacattcaagagaagacttggagtttattgttttttaaaaaaaccatgcttcctttggatagacttctccagcttaccaatatatatccatgtgcctggattatctttaacccccacacctcttaccttggacaggtaaggcttggccgatgtctgattgggaccaggaggggtcaacactttcatatcagtgttacagtgaactaaagctattattgatcacaaaatcgtttctctgatgaccataagcaggaggattccaccatggtcactgcccatccagtcacagggattctgtgtagggaagcaccactgattgcagttaacatctagagtgttgtttccatcccactgcccaagcattggcatggtcatgaatggtggcccagccaacaggaagcccagcctttcagaaagagcctggcaaggccctgttgactagcaatggccttagctgtcccacacaactcagtggcctgaacacacaccttcagccaccatgcctttgaccagggctcctcatctggaaacatatgagaaaggtcagcaaacagatgcaagacctataaggctagtcattgagctatattggttttttttctaaatagtagtagtgacagataacatttattgagtgcttgctgtatgccaggcgctgatgtaagcactttaggtatcattgaattctcacagcaactcctgaggaaagtgctattcttgtctccattttagtgttgaggaaaacgaggcaaagagaggttatacaacttgcctcaaatcccttgtgcactgtaactcacactgagtttcagtgtgatttcaggctgttggtctccagggcacaggatcttagctactctgggatacccagttctgttttcagtatcatctggcacacaactgtccaagctctcagccccacagggaacctgcccagagagctttacctttcccaagcatctgtggcatggacatgtcctctgtgcagtggaaggaggaggggcgaaagtacgcccttagcctttggagctagagcacccttgggacccctagttccactgcacatggccctcctccccaccctcatgactgggaaggaagcctgtgatgaggctgagataaagcacagggtggtttcactctcctctctccttctttccaaacactgaaggatttatttcaaactctctaatgcacctgcctcagagattcccctactttcaaagcaaagatcagcagaaaaattggctgtcccacctgtggcaaatgctggagcctcagttaaagtgcctcaaggggcaaatatttcaccattgccagagaagatgtgacaggccaatcagacagggcccagagcatctctttgctgctactgttttgccatccttctattcatatctgtgcagaacacggtgttttaagcttgagtgaaaggagggtgaggctgccgatgccttcctgcccagaagtggatgatgtgggagttgacaggccagggagagggtgaagcaggtatcagagtcactcctctgtaccctctccttctgtttttattttaggcacactatcttcctctctcctatctttccctcaatctcccaagttcctctaccttctttatctttgtcttttacttcttctttctgtgaccctccttttttggcctcctctttccccaagactttcttcctcctgtttctcgttgagttctccccactgaatgtgtgtatgtatgtacacacacacacacgtgtgcacacacaatgcacacaactcctatgactggctcctacttacattcaagttaaaaaggctgatatgaacagggcaggggaaaatcttaggatggttgtacaattgactggaggattttttccccttggaagacactattgatctcaacctgctgacttttcctaatgcttacctgaaggaacccatcctggctagaaagggtgatggtactggaccggtattcaaccttgagttttcaagctgccaaacaggtcttaagggaggtgcttatatcccaccaacactctcccagctcccatgtccccaagacctctggagtttcctcttgaatgtacatgaaccactgtaatagcattagacttttaattgagtgtgcaatcgttttccatggagtttggtccgttcattattttttagttaactacacttcttgatattcaaatgttctattaaaaaaactgagtatgaagaaaaacactttactactgcagaaggaagaaagaatataatatgaccatcttcaggtataacagtgttgtttaaaagagaattattgtatgattataaaagatgaaataattaactgaataataaaacaaagctattagtaa

SEQ ID NO: 59773 - DNA, 7428 bp, Homo sapiens
  misc_feature (171)..(171): n is a, c, g, or t
  misc_feature (177)..(177): n is a, c, g, or t
atccggggctctccagacatcagagcttaaacccaggactctgcaagcggcatctcattccggggtccagggctctcccggctctccatcccctccctaacctcccccgcctcccgcgctcgctccctcgctccctccccgctcgcttcctcccccaccatcgcagcctangagaangggccggggctcaagatggctttagccgggctctgcgccctgctcgcctgctgctgggggccggcggcggtgctggccacggccgccggcgacgtggatccatccaaggagctggagtgcaagctcaaaagcatcacggtgtcggcactgcccttcctgcgcgagaacgacctgagcatcatgcacagcccctcggcctcggagcccaagctcctcttctcggtgcgcaacgacttcccgggagaaatggtcgtggtggacgacctggagaacacggagctgccctacttcgtgctggagatctcagggaacacagaggatatccctttggtgcgctggaggcagcagtggctggagaatggcactttgctttttcacattcatcaccaagatggtgccccaagccttcctggacaagaccccactgaagaaccccaacatgagtcggcagaagaggagctgaggatcctccacatctcagtcatgggtggcatgatcgctctgctgctgtccatcttgtgcctggtgatgatcctgtatactcgccggcgctggtgcaaacgccgccgggtcccgcagccccagaagagtgccagtgctgaggcagccaatgagattcactacattccttctgtgctgatcggcgggcacggacgggagagcctgcgcaatgcccgcgtgcagggccacaactccagtggcaccctgagcatccgggagacacctatcctggacggctatgagtatgacatcactgatctgcgccaccatctgcagagggagtgcatgaacggaggggaggactttgccagccaggtcacgcgcaccctcgactccctgcagggctgcaatgaaaagtcggggatggacctcacaccaggaagtgacaatgccaagctgtcactgatgaacaagtataaagataatattatagccactagccctgtggactccaaccaccagcaagccacccttctctctcacacctccagcagccagagaaagcggatcaacaacaaagcaagagctggttccgccttcttgaaccctgaaggggattctggcacagaggcagaaaacgacccccagctgaccttttacacggatccttcaaggagcaggaggcgtagtagagtgggttctccccgaagtcctgtgaataagaccaccttgaccctgatcagcatcaccagctgtgtgattggcctcgtgtgctcctctcacgtcaactgccctctcgttgtcaagatcaccctgcatgtccctgagcacctgattgctgatgggagccgcttcatcttgctggaggggagccagctggatgccagtgactggctgaaccctgcccaagtggttctcttctctcagcagaactccagcggaccctgggccatggacctctgtgcccggcggctcctggacccctgtgaacaccaatgtgaccccgaaactggggaatgcctctgctatgaaggctacatgaaggatccagtacataagcacctttgcattcggaacgaatgggggacaaaccaggggccatggccttacacaatatttcagcgaggctttgacctggttttgggagagcagccctctgataaaatatttagattcacctacactcttggggagggcatgtggttgcccctcagcaagagctttgtgattccaccagccgaactggccatcaatccatcagcaaagtgcaagacggacatgactgtgatggaggatgctgtggaggtcagagaggagctgatgacttcatcctccttcgacagcctggaggttctcttagattcctttgggccggtgcgcgactgcagcaaagataacgggggctgcagtaagaatttccgctgtatttcagatcgcaagctggactccactggttgcgtgtgcccatctggactcagtcccatgaaggacagctctggctgctatgaccgccacatcggggtggactgttccgacggcttcaacggcggctgtgagcagctgtgcctccagcagatggcgcccttcccggacgaccccaccttgtataacatcctcatgttctgtgggtgcatcgaggactacaagcttggtgtggatggacgctcttgccaactcatcacggagacctgtccagagggaagtgactgtggggaaagcagggagcttcccatgaaccagaccctctttggggagatgttctttggttacaacaaccattccaaggaagtggctgccggacaggtgctgaaaggaacattcaggcaaaacaactttgctcgtggtttagaccagcaactgccagatggtcttgtggtggccactgtgcccctggagaatcaatgcctagaggagatctcggagcccacccctgaccctgacttcctgactgggatggtgaacttcagtgaagtgtctgggtaccctgtgctgcagcactggaaggtccggtctgtgatgtaccacatcaaactcaaccaagtggccatctctcaggccctcagcaatgctctccactcgctggatggggctacatctcgtgcagattttgtggcgctgttggaccagttcggcaaccattacatccaggaagctatctacggctttgaggagtcctgttctatctggtacccaaacaagcaggtccagcggcgactctggctggagtatgaagacatcagtaaaggcaactccccatcagatgagtctgaggagcgggaaagagaccccaaggtgctgacattcccagaatacatcaccagcttgtcagactccggcaccaagcacatggcggctggagtccgcatggagtgccacagcaagggacgatgcccctcgtcctgccccctgtgtcatgtgacatccagccctgacacccctgctgagccggttctgctggaggtgaccaaagcagcccccatctatgaactagtgaccaacaaccagacccagaggctcttgcaggaggctaccatgagctctctctggtgctcagggactggagatgtcatcgaggactggtgtcgatgtgactccactgcttttggagctgatggactccccacctgtgcgcctctcccacagcctgtgctgagactctccacggttcacgagcccagcagcactcttgtggtcctggagtgggaacactcagagccaccaatcggggtgcagattgtagattacctcctccgtcaagagaaagtcactgacaggatggaccactccaaagtggagacagaaacagtgctgagctttgtggacgacatcatctctggagcaaagtctccttgtgcaatgccatctcaggtgccggacaagcagctcaccaccatctctctgatcatacgatgcctggaacctgacaccatttacatgttcacgctgtggggagtggacaacacaggacggcgctccaggccaagcgacgtgatcgtgaagaccccatgccccgtggtggatgatgtcaaggctcaagaaatagcagacaagatctacaatctcttcaatggctacactagtgggaaggagcagcagaccgcctacaacaccctcctggatctgggttcccccaccttacaccgggtcctctaccactataaccagcactatgagagttttggggaattcacctggcgatgtgaggatgagttaggtcccaggaaagctggtctcatcctttcccagcttggggacctcagcagttggtgcaatggactccttcaggaacccaagataagcttgcggcgcagctcactcaagtacctggggtgccgctacagcgagatcaaaccctacggacttgactgggcggagctcagccgggacctcaggaagacgtgtgaggagcagaccctgagtatcccctacaacgactatggggacagcaaagagatctagcaccataaggccagggagctgctgccagaatgaagtaggaaagaggagggatccatctgggttggtctgtggatttttaatattttttaatggaacatgaaaacctccacagcaacatcgaaaccagggagaaagtgatccttgctccctgcagaacttcttcagtatgatgttctccatctgcatgattgggaaatctgccagccagtggcttcatgcagtgccatatttctttagaggattactttggggtttgctttgccattaatttgttccattcatttttttttccctgagaagtttaccaaaatgctcaagagctctgccgtgctccccatgaaaagtctattaagtaggcaccctgtgctcactcagttcctaaatccattgcaactgggagcagaggtgaggccagaaagttgttaggcctgccgcaggccccaccctcaagcattcctcaggaagcgtctcactctgggagccttggccctgctcacagagagagacaatagaaaattgaggaaggtggcccttgtctgtgtctcctggttttcttcctaggccttgctatcactatttccatacccgaaaggtgaaaccagctttcattataggccccagtgggccacttgggttttgagatccttccttattttaagccaggactgggattaaatctccctctgtcagatctctgtcccttcctctgaacaacatgatctttgagagggaacaagatgccatctgtcaactgcaccttcagaaaagtctacctgggagactagttagcagtccacattcaagagaagacttggagtttattgttttttaaaaaaaccatgcttcctttggatagacttctccagcttaccaatatatatccatgtgcctggattatctttaacccccacacctcttaccttggacaggtaaggcttggccgatgtctgattgggaccaggaggggtcaacactttcatatcagtgttacagtgaactaaagctattattgatcacaaaaaacttctgttcatccccaccttgctaaatttgcttgtgttgctagttttgcaaatcgtttctctgatgaccataagcaggaggattccaccatggtcactgcccatccagtcacagggattctgtgtagggaagcaccactgattgcagttaacatctagagtgttgtttccatcccactgcccaagcattggcatggtcatgaatggtggcccagccaacaggaagcccagcctttcagaaagagcctggcaaggccctgttgactagcaatggccttagctgtcccacacaactcagtggcctgaacacacaccttcagccaccatgcctttgaccagggctcctcatctggaaacatatgagaaaggtcagcaaacagatgcaagacctataaggctagtcattgagctatattggttttttttctaaatagtagtagtgacagataacatttattgagtgcttgctgtatgccaggcgctgatgtaagcactttaggtatcattgaattctcacagcaactcctgaggaaagtgctattcttgtctccattttagtgttgaggaaaacgaggcaaagagaggttatacaacttgcctcaaatcccttgtgcactgtaactcacactgagtttcagtgtgatttcaggctgttggtctccagggcacaggatcttagctactctgggatacccagttctgttttcagtatcatctggcacacaactgtccaagctctcagccccacagggaacctgcccagagagctttacctttcccaagcatctgtggcatggacatgtcctctgtgcagtggaaggaggaggggcgaaagtacgcccttagcctttggagctagagcacccttgggacccctagttccactgcacatggccctcctccccaccctcatgactgggaaggaagcctgtgatgaggctgagataaagcacagggtggtttcactctcctctctccttctttccaaacactgaaggatttatttcaaactctctaatgcacctgcctcagagattcccctactttcaaagcaaagatcagcagaaaaattggctgtcccacctgtggcaaatgctggagcctcagttaaagtgcctcaaggggcaaatatttcaccattgccagagaagatgtgacaggccaatcagacagggcccagagcatctctttgctgctactgttttgccatccttctattcatatctgtgcagaacacggtgttttaagcttgagtgaaaggagggtgaggctgccgatgccttcctgcccagaagtggatgatgtgggagttgacaggccagggagagggtgaagcaggtatcagagtcactcctctgtaccctctccttctgtttttattttaggcacactatcttcctctctcctatctttccctcaatctcccaagttcctctaccttctttatctttgtcttttacttcttctttctgtgaccctccttttttggcctcctctttccccaagactttcttcctcctgtttctcgttgagttctccccactgaatgtgtgtatgtatgtacacacacacacacgtgtgcacacacaatgcacacaactcctatgactggctcctacttacattcaagttaaaaaggctgatatgaacagggcaggggaaaatcttaggatggttgtacaattgactggaggattttttccccttggaagacactattgatctcaacctgctgacttttcctaatgcttacctgaaggaacccatcctggctagaaagggtgatggtactggaccggtattcaaccttgagttttcaagctgccaaacaggtcttaagggaggtgcttatatcccaccaacactctcccagctcccatgtccccaagacctctggagtttcctcttgaatgtacatgaaccactgtaatagcattagacttttaattgagtgtgcaatcgttttccatggagtttggtccgttcattattttttagttaactacacttcttgatattcaaatgttctattaaaaaaactgagtatgaagaaaaacactttactactgcagaaggaagaaagaatataatatgaccatcttcaggtataacagtgttgtttaaaagagaattattgtatgattataaaagatgaaataattaactgaataataaaacaaagctattagtaagcattgggtatgtggatgttgtgtctttcagtaatctgagtgaactggttagactcatcagggaacttgttaaggttttaaaggttacacttcagattccagacataatgggccttatagtcatcattctaactgga

SEQ ID NO: 59774 - DNA, 3869 bp, Homo sapiens
  misc_feature (171)..(171): n is a, c, g, or t
  misc_feature (177)..(177): n is a, c, g, or t
atccggggctctccagacatcagagcttaaacccaggactctgcaagcggcatctcattccggggtccagggctctcccggctctccatcccctccctaacctcccccgcctcccgcgctcgctccctcgctccctccccgctcgcttcctcccccaccatcgcagcctangagaangggccggggctcaagatggctttagccgggctctgcgccctgctcgcctgctgctgggggccggcggcggtgctggccacggccgccggcgacgtggatccatccaaggagctggagtgcaagctcaaaagcatcacggtgtcggcactgcccttcctgcgcgagaacgacctgagcatcatgcacagcccctcggcctcggagcccaagctcctcttctcggtgcgcaacgacttcccgggagaaatggtcgtggtggacgacctggagaacacggagctgccctacttcgtgctggagatctcagggaacacagaggatatccctttggtgcgctggaggcagcagtggctggagaatggcactttgctttttcacattcatcaccaagatggtgccccaagccttcctggacaagaccccactgaagaaccccaacatgagtcggcagaagaggagctgaggatcctccacatctcagtcatgggtggcatgatcgctctgctgctgtccatcttgtgcctggtgatgatcctgtatactcgccggcgctggtgcaaacgccgccgggtcccgcagccccagaagagtgccagtgctgaggcagccaatgagattcactacattccttctgtgctgatcggcgggcacggacgggagagcctgcgcaatgcccgcgtgcagggccacaactccagtggcaccctgagcatccgggagacacctatcctggacggctatgagtatgacatcactgatctgcgccaccatctgcagagggagtgcatgaacggaggggaggactttgccagccaggtcacgcgcaccctcgactccctgcagggctgcaatgaaaagtcggggatggacctcacaccaggaagtgacaatgccaagctgtcactgatgaacaagtataaagataatattatagccactagccctgtggactccaaccaccagcaagccacccttctctctcacacctccagcagccagagaaagcggatcaacaacaaagcaagagctggttccgccttcttgaaccctgaaggggattctggcacagaggcagaaaacgacccccagctgaccttttacacggatccttcaaggagcaggaggcgtagtagagtgggttctccccgaagtcctgtgaataagaccaccttgaccctgatcagcatcaccagctgtgtgattggcctcgtgtgctcctctcacgtcaactgccctctcgttgtcaagatcaccctgcatgtccctgagcacctgattgctgatgggagccgcttcatcttgctggaggggagccagctggatgccagtgactggctgaaccctgcccaagtggttctcttctctcagcagaactccagcggaccctgggccatggacctctgtgcccggcggctcctggacccctgtgaacaccaatgtgaccccgaaactggggaatgcctctgctatgaaggctacatgaaggatccagtacataagcacctttgcattcggaacgaatgggggacaaaccaggggccatggccttacacaatatttcagcgaggctttgacctggttttgggagagcagccctctgataaaatatttagattcacctacactcttggggagggcatgtggttgcccctcagcaagagctttgtgattccaccagccgaactggccatcaatccatcagcaaagtgcaagacggacatgactgtgatggaggatgctgtggaggtcagagaggagctgatgacttcatcctccttcgacagcctggaggttctcttagattcctttgggccggtgcgcgactgcagcaaagataacgggggctgcagtaagaatttccgctgtatttcagatcgcaagctggactccactggttgcgtgtgcccatctggactcagtcccatgaaggacagctctggctgctatgaccgccacatcggggtggactgttccgacggcttcaacggcggctgtgagcagctgtgcctccagcagatggcgcccttcccggacgaccccaccttgtataacatcctcatgttctgtgggtgcatcgaggactacaagcttggtgtggatggacgctcttgccaactcatcacggagacctgtccagagggaagtgactgtggggaaagcagggagcttcccatgaaccagaccctctttggggagatgttctttggttacaacaaccattccaaggaagtggctgccggacaggtgctgaaaggaacattcaggcaaaacaactttgctcgtggtttagaccagcaactgccagatggtcttgtggtggccactgtgcccctggagaatcaatgcctagaggagatctcggagcccacccctgaccctgacttcctgactgggatggtgaacttcagtgaagtgtctgggtaccctgtgctgcagcactggaaggtccggtctgtgatgtaccacatcaaactcaaccaagtggccatctctcaggccctcagcaatgctctccactcgctggatggggctacatctcgtgcagattttgtggcgctgttggaccagttcggcaaccattacatccaggaagctatctacggctttgaggagtcctgttctatctggtacccaaacaagcaggtccagcggcgactctggctggagtatgaagacatcagtaaaggcaactccccatcagatgagtctgaggagcgggaaagagaccccaaggtgctgacattcccagaatacatcaccagcttgtcagactccggcaccaagcacatggcggctggagtccgcatggagtgccacagcaagggacgatgcccctcgtcctgccccctgtgtcatgtgacatccagccctgacacccctgctgagccggttctgctggaggtgaccaaagcagcccccatctatgaactagtgaccaacaaccagacccagaggctcttgcaggaggctaccatgagctctctctggtgctcagggactggagatgtcatcgaggactggtgtcgatgtgactccactgcttttggagctgatggactccccacctgtgcgcctctcccacagcctgtgctgagactctccacggttcacgagcccagcagcactcttgtggtcctggagtgggaacactcagagccaccaatcggggtgcagattgtagattacctcctccgtcaagagaaagtcactgacaggatggaccactccaaagtggagacagaaacagtgctgagctttgtggacgacatcatctctggagcaaagtctccttgtgcaatgccatctcaggtgccggacaagcagctcaccaccatctctctgatcatacgatgcctggaacctgacaccatttacatgttcacgctgtggggagtggacaacacaggacggcgctccaggccaagcgacgtgatcgtgaagaccccatgccccgtggtggatgatgtcaaggctcaagaaatagcagacaagatctacaatctcttcaatggctacactagtgggaaggagcagcagaccgcctacaacaccctcctggatctgggttcccccaccttacaccgggtcctctaccactataaccagcactatgagagttttggggaattcacctggcgatgtgaggatgagttaggtcccaggtaatcaataaactaagtcaacccttaaaa

SEQ ID NO: 59775 - DNA, 3715 bp, Homo sapiens
  misc_feature (171)..(171): n is a, c, g, or t
  misc_feature (177)..(177): n is a, c, g, or t
atccggggctctccagacatcagagcttaaacccaggactctgcaagcggcatctcattccggggtccagggctctcccggctctccatcccctccctaacctcccccgcctcccgcgctcgctccctcgctccctccccgctcgcttcctcccccaccatcgcagcctangagaangggccggggctcaagatggctttagccgggctctgcgccctgctcgcctgctgctgggggccggcggcggtgctggccacggccgccggcgacgtggatccatccaaggagctggagtgcaagctcaaaagcatcacggtgtcggcactgcccttcctgcgcgagaacgacctgagcatcatgcacagcccctcggcctcggagcccaagctcctcttctcggtgcgcaacgacttcccgggagaaatggtcgtggtggacgacctggagaacacggagctgccctacttcgtgctggagatctcagggaacacagaggatatccctttggtgcgctggaggcagcagtggctggagaatggcactttgctttttcacattcatcaccaagatggtgccccaagccttcctggacaagaccccactgaagaaccccaacatgagtcggcagaagaggagctgaggatcctccacatctcagtcatgggtggcatgatcgctctgctgctgtccatcttgtgcctggtgatgatcctgtatactcgccggcgctggtgcaaacgccgccgggtcccgcagccccagaagagtgccagtgctgaggcagccaatgagattcactacattccttctgtgctgatcggcgggcacggacgggagagcctgcgcaatgcccgcgtgcagggccacaactccagtggcaccctgagcatccgggagacacctatcctggacggctatgagtatgacatcactgatctgcgccaccatctgcagagggagtgcatgaacggaggggaggactttgccagccaggtcacgcgcaccctcgactccctgcagggctgcaatgaaaagtcggggatggacctcacaccaggaagtgacaatgccaagctgtcactgatgaacaagtataaagataatattatagccactagccctgtggactccaaccaccagcaagccacccttctctctcacacctccagcagccagagaaagcggatcaacaacaaagcaagagctggttccgccttcttgaaccctgaaggggattctggcacagaggcagaaaacgacccccagctgaccttttacacggatccttcaaggagcaggaggcgtagtagagtgggttctccccgaagtcctgtgaataagaccaccttgaccctgatcagcatcaccagctgtgtgattggcctcgtgtgctcctctcacgtcaactgccctctcgttgtcaagatcaccctgcatgtccctgagcacctgattgctgatgggagccgcttcatcttgctggaggggagccagctggatgccagtgactggctgaaccctgcccaagtggttctcttctctcagcagaactccagcggaccctgggccatggacctctgtgcccggcggctcctggacccctgtgaacaccaatgtgaccccgaaactggggaatgcctctgctatgaaggctacatgaaggatccagtacataagcacctttgcattcggaacgaatgggggacaaaccaggggccatggccttacacaatatttcagcgaggctttgacctggttttgggagagcagccctctgataaaatatttagattcacctacactcttggggagggcatgtggttgcccctcagcaagagctttgtgattccaccagccgaactggccatcaatccatcagcaaagtgcaagacggacatgactgtgatggaggatgctgtggaggtcagagaggagctgatgacttcatcctccttcgacagcctggaggttctcttagattcctttgggccggtgcgcgactgcagcaaagataacgggggctgcagtaagaatttccgctgtatttcagatcgcaagctggactccactggttgcgtgtgcccatctggactcagtcccatgaaggacagctctggctgctatgaccgccacatcggggtggactgttccgacggcttcaacggcggctgtgagcagctgtgcctccagcagatggcgcccttcccggacgaccccaccttgtataacatcctcatgttctgtgggtgcatcgaggactacaagcttggtgtggatggacgctcttgccaactcatcacggagacctgtccagagggaagtgactgtggggaaagcagggagcttcccatgaaccagaccctctttggggagatgttctttggttacaacaaccattccaaggaagtggctgccggacaggtgctgaaaggaacattcaggcaaaacaactttgctcgtggtttagaccagcaactgccagatggtcttgtggtggccactgtgcccctggagaatcaatgcctagaggagatctcggagcccacccctgaccctgacttcctgactgggatggtgaacttcagtgaagtgtctgggtaccctgtgctgcagcactggaaggtccggtctgtgatgtaccacatcaaactcaaccaagtggccatctctcaggccctcagcaatgctctccactcgctggatggggctacatctcgtgcagattttgtggcgctgttggaccagttcggcaaccattacatccaggaagctatctacggctttgaggagtcctgttctatctggtacccaaacaagcaggtccagcggcgactctggctggagtatgaagacatcagtaaaggcaactccccatcagatgagtctgaggagcgggaaagagaccccaaggtgctgacattcccagaatacatcaccagcttgtcagactccggcaccaagcacatggcggctggagtccgcatggagtgccacagcaagggacgatgcccctcgtcctgccccctgtgtcatgtgacatccagccctgacacccctgctgagccggttctgctggaggtgaccaaagcagcccccatctatgaactagtgaccaacaaccagacccagaggctcttgcaggaggctaccatgagctctctctggtgctcagggactggagatgtcatcgaggactggtgtcgatgtgactccactgcttttggagctgatggactccccacctgtgcgcctctcccacagcctgtgctgagactctccacggttcacgagcccagcagcactcttgtggtcctggagtgggaacactcagagccaccaatcggggtgcagattgtagattacctcctccgtcaagagaaagtcactgacaggatggaccactccaaagtggagacagaaacagtgctgagctttgtggacgacatcatctctggagcaaagtctccttgtgcaatgccatctcaggtgccggacaagcagaaatagcagacaagatctacaatctcttcaatggctacactagtgggaaggagcagcagaccgcctacaacaccctcctggatctgggttcccccaccttacaccgggtcctctaccactataaccagcactatgagagttttggggaattcacctggcgatgtgaggatgagttaggtcccaggtaatcaataaactaagtcaacccttaaaa

SEQ ID NO: 59776 - DNA, 413 bp, Homo sapiens
catgctaatatcagagtaagagtttaccctgactatttcatgttaatttttacaaacacagacatgttaatcaattccttcatgtttctctttcttcctccttaccctgcttctaaggggaatgcctctgctatgaaggctacatgaaggatccagtacataagcacctttgcattcggaacgaatgggggacaaaccaggggtaagtgagggcatgacgacttagctggttcccacatatcactgctccttacacagacatgacgtggagcaactgcatggagaggaatagagctaaagggtggctatattctgaacagcaaatgggtaaaaatgtcactatgcctttccatatttataccattccagtgacgtctatatcatctttttctccatttacgagcctctgactc

SEQ ID NO: 59777 - DNA, 662 bp, Homo sapiens
ttaattcattctacaaatatttattaaagcccaactgtgtgccagccaccaggcatagaatagggaacaaaatagtttccctgcaactatataaaaagaatggcatattgtacttaaatgcctccttgccaaaataagaggcacaggacaacagctgtctggagatgacctcaagccagtcaggccccattttaaatatagaaacccctaagaatagccgccagtgctccagactcaacaggtgattggcccagagaggggaggtgaccccaggccccaggaaagggagcgaggacagcgctggttcccggctccccgcaccatcatggctttgcctctgaggcccctgacccggggcttggccagcgctgccaaaggaggccacggaggagcaggagctcgtacctggcgtctgctgaccttcgtgctggcgctgcccagcgtggccctctgcaccttcaactcctatctccactcgggccaccgcccgcgccccgagttccgtccctaccaacacctccgcatccgcaccaagccctacccctggggggacggcaaccacactctgttccacaatagccacgtgaaccctctgcccacgggctacgaacacccctgaggccccggacgcccccggacacaataaaggtgtgaagcttcga

SEQ ID NO: 59778 - DNA, 763 bp, Homo sapiens
ttaattcattctacaaatatttattaaagcccaactgtgtgccagccaccaggcatagaatagggaacaaaatagtttccctgcaactatataaaaagaatggcatattgtacttaaatgcctccttgccaaaataagaggcacaggacaacagctgtctggagatgacctcaagccagtcaggccccattttaaatatagaaacccctaagaatagccgccagtgctccagactcaacaggtgattggcccagagaggggaggtgaccccaggccccaggaaagggagcgaggacagcgctggttcccggctccccgcaccatcatggctttgcctctgaggcccctgacccggggcttggccagcgctgccaaaggaggccacggaggagcaggaggtgagtggggaacgggcggatccgggggctcccctaccctgcccacctgttcacaggcccgccgccccaggaccgccgcgctcaccccgctccgtccgcagctcgtacctggcgtctgctgaccttcgtgctggcgctgcccagcgtggccctctgcaccttcaactcctatctccactcgggccaccgcccgcgccccgagttccgtccctaccaacacctccgcatccgcaccaagccctacccctggggggacggcaaccacactctgttccacaatagccacgtgaaccctctgcccacgggctacgaacacccctgaggccccggacgcccccggacacaataaaggtgtgaagcttcga

SEQ ID NO: 59779 - DNA, 318 bp, Homo sapiens
ggcccctgacccggggcctcagaggcaaagccatgatggtgcggggagcaggagctcgtacctggcgtctgctgaccttcgtgctggcgctgcccagcgtggccctctgcaccttcaactcctatctccactcgggccaccgcccgcgccccgagttccgtccctaccaacacctccgcatccgcaccaagccctacccctggggggacggcaaccacactctgttccacaatagccacgtgaaccctctgcccacgggctacgaacacccctgaggccccggacgcccccggacacaataaaggtgtgaagcttcga

SEQ ID NO: 59780 - DNA, 4332 bp, Homo sapiens
aaaccaataaggttaggacaagagaatagctgtggtttgcgttgcaaaaaccaaaaaaaaaaaaaaaaaaaaaaagaaagccccgaggctccatgggcagacctacaaggctgcgcaaacaaatcgagggatgagattctgctgtttctttgtctagggttctcagatgctatctgccgctgctgtttggtggggaaggagcgctgggcgcaaagctgttaccaaacagaacggtgggagctgatggctccgagtttggggcgaggtagaaactctccagtgccacttccgactttaagccttcctgttgccgtccactgtggcgggtttcttcctggggaacacgttttcgctcagtcgctcggcagcccgagcctgcggcagcggccaggcgcctgccccctgcgccgagctttcccctgcagaggcgctccactcccagaagcgccgcggctgcaccagagcgcctgagagcccccgcgcgtacccatccaggagcaaaactatgtcaggaatggaggtttgctaacccagaaaattcgaaggaacacattaaactggtggatgcagcagatgtaagcgctgtgcaaacatctcaagccagttcagatgttgctgtttcctcaagttgcaggtctatggaaatgcaggatctaaccagcccgcatagccgtctgagtggtagtagtgaatcccccagtggccccaaactcggtaactctcatataaatagtaattccatgactcccaatggcaccgaagttaaaacagagccaatgagcagcagtgaaacagcttcaacgacagccgacgggtctttaaacaatttctcaggttcagcaattgggagcagtagtttcagcccacgaccaactcaccagttctctccaccacagatttacccttccaacagaccatacccacatattctccctaccccttcctcacaaactatggctgcatatgggcaaacacagtttaccacaggaatgcaacaagctacagcctatgccacgtacccacagccaggacagccgtacggcatttcctcatatggtgcattgtgggcaggcatcaagactgaaggtggattgtcacagtctcagtcacctggacagacaggatttctcagctatggcacaagcttcagtacccctcaacctggacaggcaccatacagctaccagatgcaaggtagcagttttacaacatcatcaggaatatatacaggaaataattcactcacaaattcctctggatttaatagttcacagcaggactatccgtcttatcccagttttggccagggtcagtacgcacagtattataacagctcaccgtatccagcacattatatgaccagcagcaacaccagcccaacgacaccatccaccaatgccacttaccagcttcaagaaccgccatctggcatcaccagccaagcagttacagatcccacagcagagtacagcacaatccacagcccatcaacacccattaaagattcagattctgatcgattgcgtcgaggttcagatgggaaatcacgtggacggggccgaagaaacaataatccttcacctcccccagattctgatcttgagagagtgttcatctgggacttggatgagacaatcattgttttccactccttgcttactgggtcctacgccaacagatatgggagggatccacccacttcagtttcccttggactgcgaatggaagaaatgattttcaacttggcagacacacatttattttttaatgacttagaagaatgtgaccaagtccatatagatgatgtttcttcagatgataacggacaggacctaagcacatataactttggaacagatggctttcctgctgcagcaaccagtgctaacttatgtttggcaactggtgtacggggcggtgtggactggatgagaaagttggccttccgctacagacgggtaaaagagatttacaacacctacaaaaataatgttggaggtctgcttggtccagctaagagggaagcctggctgcagttgagggccgaaattgaagccctgaccgactcctggttgacactggccctgaaagcactctcgctcattcactcccggacaaactgtgtgaatattttagtaacaactactcagctcatcccagcattggcgaaagtcctgctgtatgggttaggaattgtatttccaatagaaaatatttacagtgcaactaaaataggaaaagaaagctgttttgagagaataattcaaaggtttggaagaaaagtggtgtatgttgttataggagatggtgtagaagaagaacaaggagcaaaaaagcacgcgatgcccttctggaggatctccagccactcggacctcatggccctgcaccatgccttggaactggagtacctgtaacagcgctcggcactttgacagcgcacagctgctctgtgaccagggacagatccagcaggccccagtctcgcatcagcgccggcctccagaacttagcaatttccgcctggtgatgcgcagttgctgtcagtcttgacctctgcctttgtggtgaatggaggaccacgtctatttcatcagaacagctgttgactctagtactgtgaatccagtgaaaataagccatgagaatgttttagcacagcgttatgtgtctgccacattaactacacggttcaaacctgtgaagaaaggacctgcaaacgcttcagttgttagcattttcaatgtgatataaacagcttctccaatacagcaaacctaattgcacaacagagactgaaatgtgtttcctgaataccagtggaggaattttcttgtaaagaaggtttactttttggtgtctcatacccagggtaatctgtacatctctacttatttatgaacagactttttttaaaaagataaaaaaacagctttattgaggtataattcacccaccagacttttttaaacatcaaataattgaagagacaatagcattagaaataagtgattaaaggcctctgcctcacaacatggcaagtacagtactttgaattttagcacattgcatagtagttttaagtatgtctaatttaaacgtataatatgtacatcactgagacaatcatgtacagaaagaatttttggtgtaaatttgtaataatggataattcttttacatattgtttagggaaatgatattgaaaggtagcaatgcctggatagtgaagcatgaggcagcacgtgcacaaattcatgtgccgtgccttatctgagttttcggtataaatatgtagataatggatttttttttttagataatgttgtcaagaccaaaagcatggatgtcaagtgtcagtaaggattttgttttctaaaattttttcctgcatcagttcttctgagggccttgatgaaataacacagcagtttcttaaacaatttgaaacaaaatgagctctcctaccacctcactttttcatttccacactaatgtattatatgtaactacttggaaaaaataattattcaaatgcttcttcccacaaagaatatagatgatagtagatatattttattaataaaatggttcatgaatcggagactaacaaagttttcatgtgctcagaattattaattatcgtgtctgcattttctttcgataaaggaagacacacgatgctaatccggaaatcagcaaactttgcattactccctatgtgcgtattttctctttcttcctgtcaccctgaggaaggttcattgccattgtcatcaccatggaaacaacgttcctctccacctgcattatgtactacatgacaggcatcaatctggggaaataataaaattatcacctttgtcagaccataagagtttctccaaaagtggtcagtttggctgggcaatattttctctcatctaacaaacacaatccattgtcatgaaattacccttaggatgagtcttctttaatcaatcatatattgggcggaaaaaacaccagctttgacccgaagtagttgaagagctacttcattcttttctgaagttgtgtgttgctgctagaaatagtcatttgtgaattatccaaattgtttaaattcacaattgaattagttttttcttcctttttgcttgaagcaaacagttgacaatttttaaccttttcattttatgtttttgtactctgcagactgaaaagacaaagtttatcttggccttactgtataaaggtgtgctgtgtccaccgttgtgtacagaatttttcttcattaattttgtgtttaagttaataaaatttatttgtgatgtactgtaaaaaccctga

SEQ ID NO: 59781 - DNA, 3871 bp, Homo sapiens
  misc_feature (29)..(29): n is a, c, g, or t
tctcctttttctcttttggttaaaagagngcattgtcgttctcagccatgtgctctgtataattaagagctgacactgaagcagagtaacaacatcttctaatttttttacccctgatcacaggtgcaaacatctcaagccagttcagatgttgctgtttcctcaagttgcaggtctatggaaatgcaggatctaaccagcccgcatagccgtctgagtggtagtagtgaatcccccagtggccccaaactcggtaactctcatataaatagtaattccatgactcccaatggcaccgaagttaaaacagagccaatgagcagcagtgaaacagcttcaacgacagccgacgggtctttaaacaatttctcaggttcagcaattgggagcagtagtttcagcccacgaccaactcaccagttctctccaccacagatttacccttccaacagaccatacccacatattctccctaccccttcctcacaaactatggctgcatatgggcaaacacagtttaccacaggaatgcaacaagctacagcctatgccacgtacccacagccaggacagccgtacggcatttcctcatatggtgcattgtgggcaggcatcaagactgaaggtggattgtcacagtctcagtcacctggacagacaggatttctcagctatggcacaagcttcagtacccctcaacctggacaggcaccatacagctaccagatgcaaggtagcagttttacaacatcatcaggaatatatacaggaaataattcactcacaaattcctctggatttaatagttcacagcaggactatccgtcttatcccagttttggccagggtcagtacgcacagtattataacagctcaccgtatccagcacattatatgaccagcagcaacaccagcccaacgacaccatccaccaatgccacttaccagcttcaagaaccgccatctggcatcaccagccaagcagttacagatcccacagcagagtacagcacaatccacagcccatcaacacccattaaagattcagattctgatcgattgcgtcgaggttcagatgggaaatcacgtggacggggccgaagaaacaataatccttcacctcccccagattctgatcttgagagagtgttcatctgggacttggatgagacaatcattgttttccactccttgcttactgggtcctacgccaacagatatgggagggatccacccacttcagtttcccttggactgcgaatggaagaaatgattttcaacttggcagacacacatttattttttaatgacttagaagaatgtgaccaagtccatatagatgatgtttcttcagatgataacggacaggacctaagcacatataactttggaacagatggctttcctgctgcagcaaccagtgctaacttatgtttggcaactggtgtacggggcggtgtggactggatgagaaagttggccttccgctacagacgggtaaaagagatttacaacacctacaaaaataatgttggaggtctgcttggtccagctaagagggaagcctggctgcagttgagggccgaaattgaagccctgaccgactcctggttgacactggccctgaaagcactctcgctcattcactcccggacaaactgtgtgaatattttagtaacaactactcagctcatcccagcattggcgaaagtcctgctgtatgggttaggaattgtatttccaatagaaaatatttacagtgcaactaaaataggaaaagaaagctgttttgagagaataattcaaaggtttggaagaaaagtggtgtatgttgttataggagatggtgtagaagaagaacaaggagcaaaaaagcacgcgatgcccttctggaggatctccagccactcggacctcatggccctgcaccatgccttggaactggagtacctgtaacagcgctcggcactttgacagcgcacagctgctctgtgaccagggacagatccagcaggccccagtctcgcatcagcgccggcctccagaacttagcaatttccgcctggtgatgcgcagttgctgtcagtcttgacctctgcctttgtggtgaatggaggaccacgtctatttcatcagaacagctgttgactctagtactgtgaatccagtgaaaataagccatgagaatgttttagcacagcgttatgtgtctgccacattaactacacggttcaaacctgtgaagaaaggacctgcaaacgcttcagttgttagcattttcaatgtgatataaacagcttctccaatacagcaaacctaattgcacaacagagactgaaatgtgtttcctgaataccagtggaggaattttcttgtaaagaaggtttactttttggtgtctcatacccagggtaatctgtacatctctacttatttatgaacagactttttttaaaaagataaaaaaacagctttattgaggtataattcacccaccagacttttttaaacatcaaataattgaagagacaatagcattagaaataagtgattaaaggcctctgcctcacaacatggcaagtacagtactttgaattttagcacattgcatagtagttttaagtatgtctaatttaaacgtataatatgtacatcactgagacaatcatgtacagaaagaatttttggtgtaaatttgtaataatggataattcttttacatattgtttagggaaatgatattgaaaggtagcaatgcctggatagtgaagcatgaggcagcacgtgcacaaattcatgtgccgtgccttatctgagttttcggtataaatatgtagataatggatttttttttttagataatgttgtcaagaccaaaagcatggatgtcaagtgtcagtaaggattttgttttctaaaattttttcctgcatcagttcttctgagggccttgatgaaataacacagcagtttcttaaacaatttgaaacaaaatgagctctcctaccacctcactttttcatttccacactaatgtattatatgtaactacttggaaaaaataattattcaaatgcttcttcccacaaagaatatagatgatagtagatatattttattaataaaatggttcatgaatcggagactaacaaagttttcatgtgctcagaattattaattatcgtgtctgcattttctttcgataaaggaagacacacgatgctaatccggaaatcagcaaactttgcattactccctatgtgcgtattttctctttcttcctgtcaccctgaggaaggttcattgccattgtcatcaccatggaaacaacgttcctctccacctgcattatgtactacatgacaggcatcaatctggggaaataataaaattatcacctttgtcagaccataagagtttctccaaaagtggtcagtttggctgggcaatattttctctcatctaacaaacacaatccattgtcatgaaattacccttaggatgagtcttctttaatcaatcatatattgggcggaaaaaacaccagctttgacccgaagtagttgaagagctacttcattcttttctgaagttgtgtgttgctgctagaaatagtcatttgtgaattatccaaattgtttaaattcacaattgaattagttttttcttcctttttgcttgaagcaaacagttgacaatttttaaccttttcattttatgtttttgtactctgcagactgaaaagacaaagtttatcttggccttactgtataaaggtgtgctgtgtccaccgttgtgtacagaatttttcttcattaattttgtgtttaagttaataaaatttatttgtgatgtactgtaaaaaccctga

SEQ ID NO: 59782 - DNA, 728 bp, Homo sapiens
aaaccaataaggttaggacaagagaatagctgtggtttgcgttgcaaaaaccaaaaaaaaaaaaaaaaaaaaaaagaaagccccgaggctccatgggcagacctacaaggctgcgcaaacaaatcgagggatgagattctgctgtttctttgtctagggttctcagatgctatctgccgctgctgtttggtggggaaggagcgctgggcgcaaagctgttaccaaacagaacggtgggagctgatggctccgagtttggggcgaggtagaaactctccagtgccacttccgactttaagccttcctgttgccgtccactgtggcgggtttcttcctggggaacacgttttcgctcagtcgctcggcagcccgagcctgcggcagcggccaggcgcctgccccctgcgccgagctttcccctgcagaggcgctccactcccagaagcgccgcggctgcaccagagcgcctgagagcccccgcgcgtacccatccaggagcaaaactatgtcaggaatggaggtttgctaacccagaaaattcgaaggaacacattaaactggtggatgcagcagatgtaagcgctgtaagtacaagctgactgtttgaaaaattgtagtgactgacaacagctgtcctgtgggcaaagcccaagctaacaggagcgcttttattattgttttgatttgttttcaaagaaaaacattatggcatggggaaaattatgaca

SEQ ID NO: 59783 - DNA, 3592 bp, Homo sapiens
  misc_feature (7)..(7): n is a, c, g, or t
  misc_feature (13)..(13): n is a, c, g, or t
  misc_feature (15)..(16): n is a, c, g, or t
  misc_feature (20)..(20): n is a, c, g, or t
atgttgntgtttntnnttgnagttaaaacagagccaatgagcagcagtgaaacagcttcaacgacagccgacgggtctttaaacaatttctcaggttcagcaattgggagcagtagtttcagcccacgaccaactcaccagttctctccaccacagatttacccttccaacagaccatacccacatattctccctaccccttcctcacaaactatggctgcatatgggcaaacacagtttaccacaggaatgcaacaagctacagcctatgccacgtacccacagccaggacagccgtacggcatttcctcatatggtgcattgtgggcaggcatcaagactgaaggtggattgtcacagtctcagtcacctggacagacaggatttctcagctatggcacaagcttcagtacccctcaacctggacaggcaccatacagctaccagatgcaaggtagcagttttacaacatcatcaggaatatatacaggaaataattcactcacaaattcctctggatttaatagttcacagcaggactatccgtcttatcccagttttggccagggtcagtacgcacagtattataacagctcaccgtatccagcacattatatgaccagcagcaacaccagcccaacgacaccatccaccaatgccacttaccagcttcaagaaccgccatctggcatcaccagccaagcagttacagatcccacagcagagtacagcacaatccacagcccatcaacacccattaaagattcagattctgatcgattgcgtcgaggttcagatgggaaatcacgtggacggggccgaagaaacaataatccttcacctcccccagattctgatcttgagagagtgttcatctgggacttggatgagacaatcattgttttccactccttgcttactgggtcctacgccaacagatatgggagggatccacccacttcagtttcccttggactgcgaatggaagaaatgattttcaacttggcagacacacatttattttttaatgacttagaagaatgtgaccaagtccatatagatgatgtttcttcagatgataacggacaggacctaagcacatataactttggaacagatggctttcctgctgcagcaaccagtgctaacttatgtttggcaactggtgtacggggcggtgtggactggatgagaaagttggccttccgctacagacgggtaaaagagatttacaacacctacaaaaataatgttggaggtctgcttggtccagctaagagggaagcctggctgcagttgagggccgaaattgaagccctgaccgactcctggttgacactggccctgaaagcactctcgctcattcactcccggacaaactgtgtgaatattttagtaacaactactcagctcatcccagcattggcgaaagtcctgctgtatgggttaggaattgtatttccaatagaaaatatttacagtgcaactaaaataggaaaagaaagctgttttgagagaataattcaaaggtttggaagaaaagtggtgtatgttgttataggagatggtgtagaagaagaacaaggagcaaaaaagcacgcgatgcccttctggaggatctccagccactcggacctcatggccctgcaccatgccttggaactggagtacctgtaacagcgctcggcactttgacagcgcacagctgctctgtgaccagggacagatccagcaggccccagtctcgcatcagcgccggcctccagaacttagcaatttccgcctggtgatgcgcagttgctgtcagtcttgacctctgcctttgtggtgaatggaggaccacgtctatttcatcagaacagctgttgactctagtactgtgaatccagtgaaaataagccatgagaatgttttagcacagcgttatgtgtctgccacattaactacacggttcaaacctgtgaagaaaggacctgcaaacgcttcagttgttagcattttcaatgtgatataaacagcttctccaatacagcaaacctaattgcacaacagagactgaaatgtgtttcctgaataccagtggaggaattttcttgtaaagaaggtttactttttggtgtctcatacccagggtaatctgtacatctctacttatttatgaacagactttttttaaaaagataaaaaaacagctttattgaggtataattcacccaccagacttttttaaacatcaaataattgaagagacaatagcattagaaataagtgattaaaggcctctgcctcacaacatggcaagtacagtactttgaattttagcacattgcatagtagttttaagtatgtctaatttaaacgtataatatgtacatcactgagacaatcatgtacagaaagaatttttggtgtaaatttgtaataatggataattcttttacatattgtttagggaaatgatattgaaaggtagcaatgcctggatagtgaagcatgaggcagcacgtgcacaaattcatgtgccgtgccttatctgagttttcggtataaatatgtagataatggatttttttttttagataatgttgtcaagaccaaaagcatggatgtcaagtgtcagtaaggattttgttttctaaaattttttcctgcatcagttcttctgagggccttgatgaaataacacagcagtttcttaaacaatttgaaacaaaatgagctctcctaccacctcactttttcatttccacactaatgtattatatgtaactacttggaaaaaataattattcaaatgcttcttcccacaaagaatatagatgatagtagatatattttattaataaaatggttcatgaatcggagactaacaaagttttcatgtgctcagaattattaattatcgtgtctgcattttctttcgataaaggaagacacacgatgctaatccggaaatcagcaaactttgcattactccctatgtgcgtattttctctttcttcctgtcaccctgaggaaggttcattgccattgtcatcaccatggaaacaacgttcctctccacctgcattatgtactacatgacaggcatcaatctggggaaataataaaattatcacctttgtcagaccataagagtttctccaaaagtggtcagtttggctgggcaatattttctctcatctaacaaacacaatccattgtcatgaaattacccttaggatgagtcttctttaatcaatcatatattgggcggaaaaaacaccagctttgacccgaagtagttgaagagctacttcattcttttctgaagttgtgtgttgctgctagaaatagtcatttgtgaattatccaaattgtttaaattcacaattgaattagttttttcttcctttttgcttgaagcaaacagttgacaatttttaaccttttcattttatgtttttgtactctgcagactgaaaagacaaagtttatcttggccttactgtataaaggtgtgctgtgtccaccgttgtgtacagaatttttcttcattaattttgtgtttaagttaataaaatttatttgtgatgtactgtaaaaaccctga

SEQ ID NO: 59784 - DNA, 3355 bp, Homo sapiens
ccatcccccaatgccacttaccagcttcaagaaccgccatctggcatcaccagccaagcagttacagatcccacagcaggtgcattgtgggcaggcatcaagactgaaggtggattgtcacagtctcagtcacctggacagacaggatttctcagctatggcacaagcttcagtacccctcaacctggacaggcaccatacagctaccagatgcaaggtagcagttttacaacatcatcaggaatatatacaggaaataattcactcacaaattcctctggatttaatagttcacagcaggactatccgtcttatcccagttttggccagggtcagtacgcacagtattataacagctcaccgtatccagcacattatatgaccagcagcaacaccagcccaacgacaccatccaccaatgccacttaccagcttcaagaaccgccatctggcatcaccagccaagcagttacagatcccacagcagagtacagcacaatccacagcccatcaacacccattaaagattcagattctgatcgattgcgtcgaggttcagatgggaaatcacgtggacggggccgaagaaacaataatccttcacctcccccagattctgatcttgagagagtgttcatctgggacttggatgagacaatcattgttttccactccttgcttactgggtcctacgccaacagatatgggagggatccacccacttcagtttcccttggactgcgaatggaagaaatgattttcaacttggcagacacacatttattttttaatgacttagaagaatgtgaccaagtccatatagatgatgtttcttcagatgataacggacaggacctaagcacatataactttggaacagatggctttcctgctgcagcaaccagtgctaacttatgtttggcaactggtgtacggggcggtgtggactggatgagaaagttggccttccgctacagacgggtaaaagagatttacaacacctacaaaaataatgttggaggtctgcttggtccagctaagagggaagcctggctgcagttgagggccgaaattgaagccctgaccgactcctggttgacactggccctgaaagcactctcgctcattcactcccggacaaactgtgtgaatattttagtaacaactactcagctcatcccagcattggcgaaagtcctgctgtatgggttaggaattgtatttccaatagaaaatatttacagtgcaactaaaataggaaaagaaagctgttttgagagaataattcaaaggtttggaagaaaagtggtgtatgttgttataggagatggtgtagaagaagaacaaggagcaaaaaagcacgcgatgcccttctggaggatctccagccactcggacctcatggccctgcaccatgccttggaactggagtacctgtaacagcgctcggcactttgacagcgcacagctgctctgtgaccagggacagatccagcaggccccagtctcgcatcagcgccggcctccagaacttagcaatttccgcctggtgatgcgcagttgctgtcagtcttgacctctgcctttgtggtgaatggaggaccacgtctatttcatcagaacagctgttgactctagtactgtgaatccagtgaaaataagccatgagaatgttttagcacagcgttatgtgtctgccacattaactacacggttcaaacctgtgaagaaaggacctgcaaacgcttcagttgttagcattttcaatgtgatataaacagcttctccaatacagcaaacctaattgcacaacagagactgaaatgtgtttcctgaataccagtggaggaattttcttgtaaagaaggtttactttttggtgtctcatacccagggtaatctgtacatctctacttatttatgaacagactttttttaaaaagataaaaaaacagctttattgaggtataattcacccaccagacttttttaaacatcaaataattgaagagacaatagcattagaaataagtgattaaaggcctctgcctcacaacatggcaagtacagtactttgaattttagcacattgcatagtagttttaagtatgtctaatttaaacgtataatatgtacatcactgagacaatcatgtacagaaagaatttttggtgtaaatttgtaataatggataattcttttacatattgtttagggaaatgatattgaaaggtagcaatgcctggatagtgaagcatgaggcagcacgtgcacaaattcatgtgccgtgccttatctgagttttcggtataaatatgtagataatggatttttttttttagataatgttgtcaagaccaaaagcatggatgtcaagtgtcagtaaggattttgttttctaaaattttttcctgcatcagttcttctgagggccttgatgaaataacacagcagtttcttaaacaatttgaaacaaaatgagctctcctaccacctcactttttcatttccacactaatgtattatatgtaactacttggaaaaaataattattcaaatgcttcttcccacaaagaatatagatgatagtagatatattttattaataaaatggttcatgaatcggagactaacaaagttttcatgtgctcagaattattaattatcgtgtctgcattttctttcgataaaggaagacacacgatgctaatccggaaatcagcaaactttgcattactccctatgtgcgtattttctctttcttcctgtcaccctgaggaaggttcattgccattgtcatcaccatggaaacaacgttcctctccacctgcattatgtactacatgacaggcatcaatctggggaaataataaaattatcacctttgtcagaccataagagtttctccaaaagtggtcagtttggctgggcaatattttctctcatctaacaaacacaatccattgtcatgaaattacccttaggatgagtcttctttaatcaatcatatattgggcggaaaaaacaccagctttgacccgaagtagttgaagagctacttcattcttttctgaagttgtgtgttgctgctagaaatagtcatttgtgaattatccaaattgtttaaattcacaattgaattagttttttcttcctttttgcttgaagcaaacagttgacaatttttaaccttttcattttatgtttttgtactctgcagactgaaaagacaaagtttatcttggccttactgtataaaggtgtgctgtgtccaccgttgtgtacagaatttttcttcattaattttgtgtttaagttaataaaatttatttgtgatgtactgtaaaaaccctga

SEQ ID NO: 59785 - DNA, 555 bp, Homo sapiens
ccatcccccaatgccacttaccagcttcaagaaccgccatctggcatcaccagccaagcagttacagatcccacagcaggtgcattgtgggcaggcatcaagactgaaggtggattgtcacagtctcagtcacctggacagacaggatttctcagctatggcacaagcttcagtacccctcaacctggacaggcaccatacagctaccagatgcaaggtagcagttttacaacatcatcaggaatatatacaggaaataattcactcacaaattcctctggatttaatagttcacagcaggactatccgtcttatcccagttttggccagggtcagtacgcacagtattataacagctcaccgtatccagcacattatatgaccagcagcaacaccagcccaacgacaccatccaccaatgccacttaccagcttcaagaaccgccatctggcatcaccagccaagcagttacagatcccacagcagttaaaacagagccaatgagcagcagtgaaacagcttcaacgacagccgactgtcatctacagggggtg

SEQ ID NO: 59786 - DNA, 958 bp, Homo sapiens
aaaccaataaggttaggacaagagaatagctgtggtttgcgttgcaaaaaccaaaaaaaaaaaaaaaaaaaaaaagaaagccccgaggctccatgggcagacctacaaggctgcgcaaacaaatcgagggatgagattctgctgtttctttgtctagggttctcagatgctatctgccgctgctgtttggtggggaaggagcgctgggcgcaaagctgttaccaaacagaacggtgggagctgatggctccgagtttggggcgaggtagaaactctccagtgccacttccgactttaagccttcctgttgccgtccactgtggcgggtttcttcctggggaacacgttttcgctcagtcgctcggcagcccgagcctgcggcagcggccaggcgcctgccccctgcgccgagctttcccctgcagaggcgctccactcccagaagcgccgcggctgcaccagagcgcctgagagcccccgcgcgtacccatccaggagcaaaactatgtcaggaatggaggtttgctaacccagaaaattcgaaggaacacattaaactggtggatgcagcagatgtaagcgctgtgcaaacatctcaagccagttcagatgttgctgtttcctcaagttgcaggtctatggaaatgcaggatctaaccagcccgcatagccgtctgagtggtagtagtgaatcccccagtggccccaaactcggtaactctcatataaatagtaattccatgactcccaatggcaccgaagttaaaacagagccaatgagcagcagtgaaacagcttcaacgacagccgacgggtctttaaacaatttctcaggttcagcaattgggagcagtagtttcagcccacgaccaactcaccagttctctccaccacagatttacccttccaagtaagatgtattttctcttaatcaataaataacttctctgagtagact

SEQ ID NO: 59787 - DNA, 1572 bp, Homo sapiens
cgcgctgggtggttcagaagcgaattctgcaccgcgaagcctgagaggcaggtagctgcggcgctgggctggcggcggcgagtccacgtgctccccgcggccggttgaaaccgttggcgggcgctggctgagaggcaatgtttgctgtcttccattggagtgactgaatttctacatgacggctttttgacaagacttaaaacctgtcttggatagagaatatttagccatttacctaaaaatggtattttttacatgcaatgcatgtggtgaatcagtgaagaaaatacaagtggaaaagcatgtgtctgtttgcagaaactgtgaatgcctttcttgcattgactgcggtaaagatttctggggcgatgactataaaaaccacgtgaaatgcataagtgaagatcagaagtatggtggcaaaggctatgaaggtaaaacccacaaaggcgacatcaaacagcaggcgtggattcagaaaattagtgaattaataaagagacccaatgtcagccccaaagtgagagaacttttagagcaaattagtgcttttgacaacgttcccaggaaaaaggcaaaatttcagaattggatgaagaacagtttaaaagttcataatgaatccattctggaccaggtgtggaatatcttttctgaagcttccaacagcgaaccagtcaataaggaacaggatcaacggccactccacccagtggcaaatccacatgcagaaatctccaccaaggttccagcctccaaagtgaaagacgccgtggaacagcaaggggaggtgaagaagaataaaagagaaagaaaggaagaacggcagaagaaaaggaaaagagaaaagaaagaactaaagttagaaaaccaccaggaaaactcaaggaatcagaagcctaagaagcgcaaaaagggacaggaggctgaccttgaggctggtggggaggaagtccctgaggccaatggctctgcagggaagaggagcaagaagaagaagcagcgcaaggacagcgccagtgaggaagaggcacgcgtgggcgcagggaagaggaagcggaggcactcggaagttgaaacagattctaagaagaaaaagatgaagctcccagagcatcctgagggcggagaaccagaagacgatgaggctcctgcaaaaggtaaattcaactggaagggaactattaaagcaattctgaaacaggccccagacaatgaaataaccatcaaaaagctaaggaaaaaggttttagctcagtactacacagtgacagatgagcatcacagatccgaagaggaactcctggtcatctttaacaagaaaatcagcaagaaccctacctttaagttattaaaggacaaagtcaagcttgtgaaatgaacatttgtgtatttaaaaattgaatccattctgctgacttcttcctttcactgctgtttataaaatgtgtaatgaattctaacaactcaaattttgctttttgaagctgtatttttaagttaagaaaatatatttttggtataacttttatgagaaaaataaaatatattctggtccaaacttctaaaaaa

SEQ ID NO: 59788 - DNA, 441 bp, Homo sapiens
  misc_feature (45)..(45): n is a, c, g, or t
  misc_feature (50)..(50): n is a, c, g, or t
  misc_feature (55)..(55): n is a, c, g, or t
  misc_feature (57)..(57): n is a, c, g, or t
  misc_feature (64)..(64): n is a, c, g, or t
  misc_feature (68)..(68): n is a, c, g, or t
  misc_feature (87)..(87): n is a, c, g, or t
  misc_feature (94)..(94): n is a, c, g, or t
  misc_feature (104)..(104): n is a, c, g, or t
  misc_feature (115)..(115): n is a, c, g, or t
cggggggcgcccgggccgcggggtcgtttttcccgcaatccgttnaaaancctgntngggactntaancattctgaacagccccaanatgaaanacctcaaaanctaaggaaaangttttagctcagtactacacagtgacagatgagcatcacagatccgaagaggaactcctggtcatctttaacaagaaaatcagcaagaaccctacctttaagttattaaaggacaaagtcaagcttgtgaaatgaacatttgtgtatttaaaaattgaatccattctgctgacttcttcctttcactgctgtttataaaatgtgtaatgaattctaacaactcaaattttgctttttgaagctgtatttttaagttaagaaaatatatttttggtataacttttatgagaaaaataaaatatattctggtccaaacttctaaaaaa

SEQ ID NO: 59789 - DNA, 1622 bp, Homo sapiens
cgcgctgggtggttcagaagcgaattctgcaccgcgaagcctgagaggcaggtagctgcggcgctgggctggcggcggcgagtccacgtgctccccgcggccggttgaaaccgttggcgggcgctggctgagaggtgaggggtggtggcccagaggtccgacctgggaggctggggctcagagagcaatgtttgctgtcttccattggagtgactgaatttctacatgacggctttttgacaagacttaaaacctgtcttggatagagaatatttagccatttacctaaaaatggtattttttacatgcaatgcatgtggtgaatcagtgaagaaaatacaagtggaaaagcatgtgtctgtttgcagaaactgtgaatgcctttcttgcattgactgcggtaaagatttctggggcgatgactataaaaaccacgtgaaatgcataagtgaagatcagaagtatggtggcaaaggctatgaaggtaaaacccacaaaggcgacatcaaacagcaggcgtggattcagaaaattagtgaattaataaagagacccaatgtcagccccaaagtgagagaacttttagagcaaattagtgcttttgacaacgttcccaggaaaaaggcaaaatttcagaattggatgaagaacagtttaaaagttcataatgaatccattctggaccaggtgtggaatatcttttctgaagcttccaacagcgaaccagtcaataaggaacaggatcaacggccactccacccagtggcaaatccacatgcagaaatctccaccaaggttccagcctccaaagtgaaagacgccgtggaacagcaaggggaggtgaagaagaataaaagagaaagaaaggaagaacggcagaagaaaaggaaaagagaaaagaaagaactaaagttagaaaaccaccaggaaaactcaaggaatcagaagcctaagaagcgcaaaaagggacaggaggctgaccttgaggctggtggggaggaagtccctgaggccaatggctctgcagggaagaggagcaagaagaagaagcagcgcaaggacagcgccagtgaggaagaggcacgcgtgggcgcagggaagaggaagcggaggcactcggaagttgaaacagattctaagaagaaaaagatgaagctcccagagcatcctgagggcggagaaccagaagacgatgaggctcctgcaaaaggtaaattcaactggaagggaactattaaagcaattctgaaacaggccccagacaatgaaataaccatcaaaaagctaaggaaaaaggttttagctcagtactacacagtgacagatgagcatcacagatccgaagaggaactcctggtcatctttaacaagaaaatcagcaagaaccctacctttaagttattaaaggacaaagtcaagcttgtgaaatgaacatttgtgtatttaaaaattgaatccattctgctgacttcttcctttcactgctgtttataaaatgtgtaatgaattctaacaactcaaattttgctttttgaagctgtatttttaagttaagaaaatatatttttggtataacttttatgagaaaaataaaatatattctggtccaaacttctaaaaaa

SEQ ID NO: 59790 - DNA, 1395 bp, Homo sapiens
cgcgctgggtggttcagaagcgaattctgcaccgcgaagcctgagaggcaggtagctgcggcgctgggctggcggcggcgagtccacgtgctccccgcggccggttgaaaccgttggcgggcgctggctgagaggcaatgtttgctgtcttccattggagtgactgaatttctacatgacggctttttgacaagacttaaaacctgtcttggatagagaatatttagccatttacctaaaaatggtattttttacatgcaatgcatgtggtgaatcagtgaagaaaatacaagtggaaaagcatgtgtctgtttgcagaaactgtgaatgcctttcttgcattgactgcggtaaagatttctggggcgatgactataaaaaccacgtgaaatgcataagtgaagatcagaagtatggtggcaaaggctatgaaggtaaaacccacaaaggcgacatcaaacagcaggcgtggattcagaaaattagtgaattaataaagagacccaatgtcagccccaaagtgagagaacttttagagcaaattagtgcttttgacaacgttcccaggaaaaaggcaaaatttcagaattggatgaagaacagtttaaaagttcataatgaatccattctggaccaggtgtggaatatcttttctgaagcttccaacagcgaaccagtcaataaggaacaggatcaacggccactccacccagtggcaaatccacatgcagaaatctccaccaaggttccagcctccaaagtgaaagacgccgtggaacagcaaggggaggtgaagaagaataaaagagaaagaaaggaagaacggcagaagaaaaggaaaagagaaaagaaagaactaaagttagaaaaccaccaggaaaactcaaggaatcagaagcctaagaagcgcaaaaagggacaggaggctgaccttgaggctggtggggaggaagtccctgaggccaatggctctgcagggaagaggagcaagaagaagaagcagcgcaaggacagcgccagtgaggaagaggcacgcgtgggcgcagggaagaggaagcggaggcactcggaagttgaaacagattctaagaagaaaaagatgaagctcccagagcatcctgagggcggagaaccagaagacgatgaggctcctgcaaaaggtaaattcaactggaagggaactattaaagcaattctgaaacaggccccagacaatgaaataaccatcaaaaagctaaggaaaaaggttttagctcagtactacacagtgacagatgagcatcacagatccgaagaggaactcctggtcatctttaacaagaaaatcagcaagaaccctacctttaagttattaaaggacaaagtcaagcttgtgaaatgaacatttgtgtattt

SEQ ID NO: 59791 - DNA, 879 bp, Homo sapiens
cgcgctgggtggttcagaagcgaattctgcaccgcgaagcctgagaggcaggtagctgcggcgctgggctggcggcggcgagtccacgtgctccccgcggccggttgaaaccgttggcgggcgctggctgagaggcaatgtttgctgtcttccattggagtgactgaatttctacatgacggctttttgacaagacttaaaacctgtcttggatagagaatatttagccatttacctaaaaatggtattttttacatgcaatgcatgtggtgaatcagtgaagaaaatacaagtggaaaagcatgtgtctgtttgcagaaactgtgaatgcctttcttgcattgactgcggtaaagatttctggggcgatgactataaaaaccacgtgaaatgcataagtgaagatcagaagtatggtggcaaaggctatgaaggtaaaacccacaaaggcgacatcaaacagcaggcgtggattcagaaaattagtgaattaataaagagacccaatgtcagccccaaagtgagagaacttttagagcaaattagtgcttttgacaacgttcccaggaaaaaggcaaaatttcagaattggatgaagaacagtttaaaagttcataatgaatccattctggaccaggtgtggaatatcttttctgaagcttccaacagcgaaccagtcaataaggaacaggatcaacggccactccacccagtggcaaatccacatgcagaaatctccaccaaggttccagcctccaaagtgaaagacgccgtggaacagcaaggggaggtgaagaagaataaaagagaaagaaaggaagagtgcgcccgaaaaccccttcccatcccgcattggtgtggcgttaggcgcacacggtg

SEQ ID NO: 59792 - DNA, 487 bp, Homo sapiens
tgcagaagttgtttctttacccttctcgtagtacaacaaaacgaaatgtcttaaatattattatttatattgtaggtaaattcaactggaagggaactattaaagcaattctgaaacaggccccagacaatgaaataaccatcaaaaagctaaggaaaaaggttttagctcagtactacacagtgacagatgagcatcacagatccgaagaggaactcctggtcatctttaacaagaaaatcagcaagaaccctacctttaagttattaaaggacaaagtcaagcttgtgaaatgaacatttgtgtatttaaaaattgaatccattctgctgacttcttcctttcactgctgtttataaaatgtgtaatgaattctaacaactcaaattttgctttttgaagctgtatttttaagttaagaaaatatatttttggtataacttttatgagaaaaataaaatatattctggtccaaacttctaaaaaa

SEQ ID NO: 59793 - DNA, 336 bp, Homo sapiens
ctgccgttcttcctttctttctcttttattcttcttcacctccccttgctgttccacggcgtctttcactttggaggctggaaccttggtggagatttctgcacgtgaaatgcataagtgaagatcagaagtatggtggcaaaggctatgaaggtaaaacccacaaaggcgacatcaaacagcaggcgtggattcagaaaattagtgaattaataaagagacccaatgtcagccccaaagtgagagaacttttagagcaaattaggtctcttttattcttcttcacctccccttgctgttccacggcgtctttcactttggaggctggaaccttgg

SEQ ID NO: 59794 - DNA, 2005 bp, Homo sapiens
cgcgctgggtggttcagaagcgaattctgcaccgcgaagcctgagaggcaggtagctgcggcgctgggctggcggcggcgagtccacgtgctccccgcggccggttgaaaccgttggcgggcgctggctgagaggtgaggggtggtggcccagaggtccgacctgggaggctggggctcagagagtgagtaggggagggacgggatttccaccgtcagcccctctgggttacgcatggaggaaggagttccattcagatctcactcctgctctggggaagtggcaggagtcctggacttagggtgaccaactcgttttagttttaaaacttaaggtcccgcgtcctgggaactccctcgggcctggccaaaccaggacggttggtcaccgcccgactgggcttcaggcttgctgcatgttggagacagggctcttctctgagccttgggagatcagtccctaaagaggaggccttaggatgtagcggtccagagcacatacttaggatcagaataactactgcgtgtgaatctgggttgccactacctggatgtgggatgacctggtgcaatgtttgctgtcttccattggagtgactgaatttctacatgacggctttttgacaagacttaaaacctgtcttggatagagaatatttagccatttacctaaaaatggtattttttacatgcaatgcatgtggtgaatcagtgaagaaaatacaagtggaaaagcatgtgtctgtttgcagaaactgtgaatgcctttcttgcattgactgcggtaaagatttctggggcgatgactataaaaaccacgtgaaatgcataagtgaagatcagaagtatggtggcaaaggctatgaaggtaaaacccacaaaggcgacatcaaacagcaggcgtggattcagaaaattagtgaattaataaagagacccaatgtcagccccaaagtgagagaacttttagagcaaattagtgcttttgacaacgttcccaggaaaaaggcaaaatttcagaattggatgaagaacagtttaaaagttcataatgaatccattctggaccaggtgtggaatatcttttctgaagcttccaacagcgaaccagtcaataaggaacaggatcaacggccactccacccagtggcaaatccacatgcagaaatctccaccaaggttccagcctccaaagtgaaagacgccgtggaacagcaaggggaggtgaagaagaataaaagagaaagaaaggaagaacggcagaagaaaaggaaaagagaaaagaaagaactaaagttagaaaaccaccaggaaaactcaaggaatcagaagcctaagaagcgcaaaaagggacaggaggctgaccttgaggctggtggggaggaagtccctgaggccaatggctctgcagggaagaggagcaagaagaagaagcagcgcaaggacagcgccagtgaggaagaggcacgcgtgggcgcagggaagaggaagcggaggcactcggaagttgaaacagattctaagaagaaaaagatgaagctcccagagcatcctgagggcggagaaccagaagacgatgaggctcctgcaaaaggtaaattcaactggaagggaactattaaagcaattctgaaacaggccccagacaatgaaataaccatcaaaaagctaaggaaaaaggttttagctcagtactacacagtgacagatgagcatcacagatccgaagaggaactcctggtcatctttaacaagaaaatcagcaagaaccctacctttaagttattaaaggacaaagtcaagcttgtgaaatgaacatttgtgtatttaaaaattgaatccattctgctgacttcttcctttcactgctgtttataaaatgtgtaatgaattctaacaactcaaattttgctttttgaagctgtatttttaagttaagaaaatatatttttggtataacttttatgagaaaaataaaatatattctggtccaaacttctaaaaaa

SEQ ID NO: 59795 - DNA, 742 bp, Homo sapiens
cgcgctgggtggttcagaagcgaattctgcaccgcgaagcctgagaggcaggtagctgcggcgctgggctggcggcggcgagtccacgtgctccccgcggccggttgaaaccgttggcgggcgctggctgagaggcaatgtttgctgtcttccattggagtgactgaatttctacatgacggctttttgacaagacttaaaacctgtcttggatagagaatatttagccatttacctaaaaatggtattttttacatgcaatgcatgtggtgaatcagtgaagaaaatacaagtggaaaagcatgtgtctgtttgcagaaactgtgaatgcctttcttgcattgactgcggtaaagatttctggggcgatgactataaaaaccacgtgaaatgcatcgttttgttcctaatatctccttccagctcacaaaccttcaaggctcccagaaaggcacagagcctgggaagtagcactgtagaaatggcagctaatgttgttttaacatccagattccttaacctggaattaaagtcctttgttacagaccccacctcctgtccaaatgtatttcccattattttcctatatggaccctgtagcagtcagcctcttattttggaacttggcactggcagtgctacctctatgcttttgtcctgctgctcccctgcctggaatgtaaactacctggctaactcatactgctcctctgtgactctgcaaggagggcgcgcggggctc

SEQ ID NO: 59796 - DNA, 500 bp, Homo sapiens
ccatggatgcatgcaatgaaagcttttgctgagccgaatacgctgttagcacgaccgtctccccactgacgtattgcaccagacaaacaccagacgtcaaggacattgggaaagcaccaacatattcagccaggcagtgtggggatgcacccccagtcccgagatgaaaacctccagccagcccagcgcttcccagcagggagcacagaacaccatgaagcctcaagatgttgctttcctaaaacagaccagcgtggttcatggatttggggctctaagtgccccccatttcccttctcctagacctcgtccccagcatcgcgacgctattggggctggagcacccagctgggaggttaaactttcctaacctgggctcaaccttggtttcgtctctcagtcttaattttgcttcagcctggtctgtcttgctggtttatgctgtcatctaacacagggccagcaatgaagatgcttagtaaaagctgttgaaaggaaaa

SEQ ID NO: 59797 - DNA, 310 bp, Homo sapiens
gtatgtagcccagtgggtgtcttcccacagggtaggtactcagtttgctctggagggtgactcatacctaaacaagtgcacatctcctttctcagtaaagccaaagcaggtttctacatttggaacaaaagagatcctgaccagagagctatcactggtggtccacttgggccctccttgatgggtgtgttcacttagaaaaccaaattacagatctgaaggctgctgggtagggacaggattagaacaaagggaatgagattgaatgttatttaagggatatttctgtcaagttttggtttctcgatga

SEQ ID NO: 59798 - DNA, 1165 bp, Homo sapiens
  misc_feature (1)..(2): n is a, c, g, or t
  misc_feature (7)..(7): n is a, c, g, or t
nncaganccaaaaacaaaaatcatatgatcagctcaatagatgcaaaaaaaaaaaaaaagctttggaggcaggcggggccgctctttgcgcactagctcgccggcgttcccaaggcccgcaggaatggccctcgcctgggggcccagctcgccaccgctagccccgcagagccagctgctgttggggcccccgcagccgccagggggcgggagaggcgtcgcgaacaatggccgcgctgggtcgcgggccggcgggaggcgtagtggagagacaagggctttagcttactttttaaagattgaagaaaaataaagaagaagaagacagaaaaagaagaactcaaagatacacaaagtaatttgaccaaggctcagaagtttttggagccgtgagggacacagcagtttggtcaatattgtcttaacatgcttcaaataaatcagcttctctccaagataaaattggcaaacccaaaagagaaaactgcaatgtatctggtaaatgagttagcccgtttcaatagagtccaaccccagtataaacttctggattaaagagggcctgctcattcaaagatgttctcagtgcaactgagtcttggtgagcagacatgggaatccgaaggcagcagtataaagaaggctcaacaggctgtcggtaataaagctttgactgaatctacgcttcccaaacctatttagaagccacccaaaagtaatgttaacaataacccaggctgtataacaccaactgtggaactgaatgggcttgctatgaaaaggggcagagcctgccatccacaggccattagatccaaagccattcccaaataatagagctaattacaactttcaagtcatgtataatcagaggtatcattgcccaatacctaagatcttttatgttcagctcatgtaggaaataatgaatttttgggggaaggaaagccagacacaatgctgcaatgaaagacatccaagcactgcagattgaacctattccagaaagatcgccttagaatggtgaatcaggaaaggatatagatgatgacagatgcaaataagcctgagatcagcttagtgtttgaaattgctctgaactgaaatatacctgttagttctgaggttattaaagaaagtggaccaccacatatgaaaagctttg

SEQ ID NO: 59799 - DNA, 258 bp, Homo sapiens
gagggctgggtgaaaaaaatactgtttcaggtaatagcaggaaatgccctcttaacttgcaggatttttatttgtatgcacaaatgaaactgctggttataatgaggctgtggggtaagaggaaggacttttcgtcttatgatggtaggaaaattacctgaggtggcaacattctgataaaagggtcaaagtaaatttgggaagaagttgtcagactcctaagatacaacacattcgggtggttcacaaggtgctttt

SEQ ID NO: 59800 - DNA, 467 bp, Homo sapiens
gaatttatgtggaatgaacaatatacaaagcaatatacttgaactgtgtttgcatggaaaatactttttttcattttctatatcctgttcaaacaactgagctattcattaaaatgatgtaataattatattagtcatttagcattgcatagataaaaccatgtaagttcaatatccattaaagttagaagattgaccacattcagctttgtaactgggggattttgcaggtacataaaaatgttaaaaggaattttaaatgaatgaaaacattccagttgaaaatggtaagaatgtgcattcagaattaaatgcactcttttccatacaatgactaaggaatacactaatgcaattgtaagtttagctactgaagcacctcttctggttcgaggacattttcccaaatctcaccacctaaaaaccccaaatttgtttcttcttctgactgaggtagttaatatttt

SEQ ID NO: 59801 - DNA, 454 bp, Homo sapiens
tatgatacatgtctcatataagggagttgtaagaattaaaggaaataatgtttataaatggcttagcatagtacccggtacagtaaacgctcgacaatgaaagctaacaaagtacagtttcaattaaggtatactctataaaaattatagactatgttagttacattgatttttcaaaatatgttgtctaattaaattaaaactttaataaattttaaataatttaaaacaacatttaaaataaagttttggattagattgattatgtacttagaatagctatttgaacctaatagaaaaataagaatattaatgtttttggctatagtcatcttatggaatcctctgtacttcttattttccttattaatatagcttgttaaacacaactttatttttcttattaatattactggttaaacacataaccattgactatcacctctattggaag

SEQ ID NO: 59802 - DNA, 688 bp, Homo sapiens
ggctagggcctccagtagtgttgaatgagagtggtgagaacacacatccttgtcttattcccaaccttaggcagaaagcgttccgtcttctaccattaagtatgatgttagctgtgggtttctttgaagacagctttattaggttgacgaagttcccttccactgcttgttcactgagagattttatttcattttttattttttcagcatttatttatgcattttaatttttttcttttcttttcttttttttttttgaaacagggtctcactctgttgcccaggctggagtccagtgatgcaatcataactcactgcagcttctaactttgggctcaagtgatcttcccacctcagcctcccatctagctgggactacagtagttcactgagagattttattatgaaaaccttttatcatagaaccatttcttaagacctcagagacctttagtttggtgtttgatagagtcttatgaatagatatcgtatgtagaagttcaaataaggtgcgttttcattaaccaaaagagtatctcagcatcccttctgggcattgttcccctgcattctcacagacagtggtccaagatagagaagggcctaagagattttagccatgacttttgtctaatgacacaaatccaataaaattaatggagataaatgggaaaaggttttttattgc

SEQ ID NO: 59803 - DNA, 396 bp, Homo sapiens
tatttctcttcaaaaatgtcagagaactgtgatcaagtagtctggactggttactatggcttagtgtataacctggtgaaaatttcatgggaacttcaaggagacgaagaacaggatggacttagaaacatgatatggcaaacattgcagaaaacaaaggattatgaggaagatgtacgaatccaaaatgcaatcaatatagctcaggctgagttaaatgacccaactgatcctttcactagatatagtacaaatatttcatcaaatgtaggagaagaagttttctccaaatatattgggtggagaattgccaacactctttccaaactattctttccccccattgaggcccattttcttcctttgaagaaaccatcaataaaaaaggatcaaaca

SEQ ID NO: 59804 - DNA, 282 bp, Homo sapiens
gccctcactgtaaacaaatgaggatggaggacactgagaggatcaaatatgaaaggcagtatggggagttagagccactcgtctactcctgtaaagagcatgactactcacagtctttctagcgggtagtcactctttcatttaacaaatacttagtccctgcaatgatctaggataataactcaacagtgtatatcaagagcctttaaaaagttatacctggccgggcgcagtggctcatgtatgtaaccctagcactttgggaggccaaggcaggcagat

SEQ ID NO: 59805 - DNA, 160 bp, Homo sapiens
tgaaattaatgatttctgcttcaccagattggtagaatgtataagatggtgcatggggaagcatttaatacccaacaatatctgattacattgaatcacaatggctccctataaataagtagagttactgtttgagtctgaaaactttgaaaataacttg

SEQ ID NO: 59806 - DNA, 457 bp, Homo sapiens
ttagtccaatggggaacatcatggtcagatctcagggtcccaggccaacagttctcctattctaccaactgggcataattattcagttgctggtgacagaaaaaaatgttctgaccagaggtccctcttcaggtcacacagcactcttagtgcatcatctggggtctgggtgtccttagaaacctccccaccacacctgagtattcaccttttagcattctctaggcaaaagagggcttagttcttccattttgcagctggcaaaaccaaggcaggcagtcactgacatgtaaaaacaatgagagcccttcacaacgctcctggcacccttgcttaatctccagaaactgactcagggtataactgtatcattcagaaatcagttgatatcacagttagccagtctacccatcttcctcccacaaatacatcaagggccaaaacatagggcaaaaaa

SEQ ID NO: 59807 - DNA, 791 bp, Homo sapiens
aattgactaaaaaaatgttgtccatttatgtgaggtctcacctctgagcctgagtgagtgtttcctgtcttgaaggtcatacttgctccctctctgcaggaagttaattcagttagaagagttgcactgggagggtgcaagcacagccaacttatccagtccaagatatccagggagatgaggatgagacctgttgaattttttcttaggaaaggaaaggtcttgacagactgttcaccaactgccctagcttcctttaagcttccccatagctaccatccatcaaaacctcattgcagctgtagcctaccaaaaggcctttgggatacctgtatggttctgccagtcattcttccttaatgaaaaggcttggacatacttagtcctcaattatcctacaggtcatgtatcgactaaataaataaactgacttcattgtttctgaagatggcaaaggcgattaatggaagaagatgcagacaaactcaaaactttcagaagtctaggaggataactgagtgctattttctgtctcatgcagtttgaacatgttttctttaaaatacacataatgtaattgaattatttctatatactgttcttgagtctttcttgacctcttcttttatcccctctttcatagtcttgtttgtggaaccatctactctgcagatttttattgtctctaattatcagctctgccttcacaaattccaaatttgaaccacctaaaggggaaaaaatgcaacacacacacgcacgctcacatgcacactttgtacaaatagggc

SEQ ID NO: 59808 - DNA, 499 bp, Homo sapiens
tgagaaggccaccacggtcatttcttcccttctgtcagacataattcctcagtttggccttcccacctctatacagtctgatagcagaccggcctttattaatcaagtcagtcaagcattttttcaggctcttagtgttcagtgaaacctttatatcccttacagtcctcagtcttcaggaaaggtagaacagactaatggtcttttaaaaacacaccttaccaagctcagccaccaactgaaaaaggactggacaatacttttaccactttcccttctcagaagtcaggcctgtccttggaatgctgcaaggtacagcccatttgttgcgggaagtcagggaccccaaaacggagggaccggctgaagccatggcagaagaacgtggattgtgaagattttatggacatttattagttcccaattaatacttttgtaatttcttatgcctgtctttactgcaatctccaaatataaattgtaaagatttcatggacgc

SEQ ID NO: 59809 - DNA, 344 bp, Homo sapiens
ccaaagtgctgggattacaggcgtgagccaccgcgcctagcctattttttaatttttttgaatagaccactttgtgctgaataaatgtttaacatttatttttaaaacaacaattgcacctaatttaaaatagtttattaaatgaattcattaaagcagattatatgcctttggggcttcagaaaatcagtttaagcaaaagaacttatgagagtaagtcatttgtacttgaattttttcagagttttaatgaactaaagtattttaatttttctatttttgtaagccgcatacttcattttcctgtatattctctgtactatgtcgattcgacggaacattca

SEQ ID NO: 59810 - DNA, 1256 bp, Homo sapiens
ccaaagtgctgggattacaggcgtgagccaccgcgcctagcctattttttaatttttttgaatagaccactttgtgctgaataaatgtttaacatttatttttaaaacaacaattgcacctaatttaaaatagtttattaaatgaattcattaaagcagattatatgcctttggggcttcagaaaatcagtttaagcaaaagaacttatgagagtaagtcatttgtacttgaattttttcagagttttaatgaactaaagtattttaatttttctatttttgtaagccgcatacttcattttttgagtttttcagtggaatttgttttaaaacgttttgaagatttcagaggccttcatatttctcttatccactttctgaacccataaagcctttgcagtctccttgagtagtttatatttagtaatttagttgtgtacctttttattttgaagtaatttttgatttgcagaagagttgcagagacggtacagggtttccatgtaccctcaccttcccccaagtcaatatcaaaacaaagaaaaaacacaaaaccagagcgggggtgtgaccgagaggcgagaattccttctcaggggttagagccttctttaaataacgagttaaaacaggaggtggggggttgtcagggttgaatacgtggcccgggttgggaatcttttgattccctctaccattatctggggcaactattagtgcgcaaattaatctcatttaaattctctccaaacggtcccttttaccaattctttctggtgtgtctcataggtctctattcccttatttttaccatttttgaggaatttgggggattaaccatttgttattttccccctagaggtaatatactaaaattatcccgggaccaaattaggtgtgtaccagaaggaaccagggggttttataaaaaaaacccattgaggttgggttcccccacgtatagggtggttcacctgtgggaactagtgttaaattcagttcctgggttaggaaaccaaggtgaaagagcggtggtttaagagggtgattacctgggataaactcaggtttgggttaaagataattacttctgtataaattgggtttcctatggcgtatggccaagcagacctacaaattttgggtacggggaagcgggtaaaatgaatggaggtatattcacgggagaaattcctttgttttgaacggggctatgggtcagtcacgtgtgcactgtagagttttatcatgatgag

SEQ ID NO: 59811 - DNA, 1202 bp, Homo sapiens
ccaaagtgctgggattacaggcgtgagccaccgcgcctagcctattttttaatttttttgaatagaccactttgtgctgaataaatgtttaacatttatttttaaaacaacaattgcacctaatttaaaatagtttattaaatgaattcattaaagcagattatatgcctttggggcttcagaaaatcagtttaagcaaaagaacttatgagagtaagtcatttgtacttgaattttttcagagttttaatgaactaaagtattttaatttttctatttttgtaagccgcatacttcattttttgagtttttcagtggaatttgttttaccataaagcctttgcagtctccttgagtagtttatatttagtaatttagttgtgtacctttttattttgaagtaatttttgatttgcagaagagttgcagagacggtacagggtttccatgtaccctcaccttcccccaagtcaatatcaaaacaaagaaaaaacacaaaaccagagcgggggtgtgaccgagaggcgagaattccttctcaggggttagagccttctttaaataacgagttaaaacaggaggtggggggttgtcagggttgaatacgtggcccgggttgggaatcttttgattccctctaccattatctggggcaactattagtgcgcaaattaatctcatttaaattctctccaaacggtcccttttaccaattctttctggtgtgtctcataggtctctattcccttatttttaccatttttgaggaatttgggggattaaccatttgttattttccccctagaggtaatatactaaaattatcccgggaccaaattaggtgtgtaccagaaggaaccagggggttttataaaaaaaacccattgaggttgggttcccccacgtatagggtggttcacctgtgggaactagtgttaaattcagttcctgggttaggaaaccaaggtgaaagagcggtggtttaagagggtgattacctgggataaactcaggtttgggttaaagataattacttctgtataaattgggtttcctatggcgtatggccaagcagacctacaaattttgggtacggggaagcgggtaaaatgaatggaggtatattcacgggagaaattcctttgttttgaacggggctatgggtcagtcacgtgtgcactgtagagttttatcatgatgag

SEQ ID NO: 59812 - DNA, 431 bp, Homo sapiens
tgatagtattgtaccaatgttaatgtcttagttttcataaatgtaccatggttatgtaagatgttaagattaggggaagctcaaggaagagtatacaagaactctctgtaccatctttacaacttttctgtatatctaaaattatttcaaaataattttttttttttttttttaaagaagaaggataagctgatcaactacagtgatggggagtgtcttcctagggaagataggggcagaagttcaagaaaaccacagagaaatagttcagaagtatttctcattcctgggctaaagagtattcattctatataaacttattaataaagaaagcagtagcagtactaccttatagttttgaaaccttcacatatatctccttgtgagcttcacaatagctgtgtgaatagattagataaggtattattagt

SEQ ID NO: 59813 - DNA, 228 bp, Homo sapiens
gggtcttcactctgaaccacccattaacaattgcttcagttgataagcaagttggtccttaccctggactgccaatgccattaggtctctgctggccctatgctgatggagacttttttaagaacagaaatgagattcatgttagttcatgttcaactatagaaaacaatgatggtgaaacattacctgctccaaattggaatttgaaacatggaaacagcagtgtgg

SEQ ID NO: 59814 - DNA, 503 bp, Homo sapiens
agctctcccagacggctctcttttccttcacattaaaaagcaaagcaaagcaagagaaactgaggcctatgttctgcaggaagtccaaagccctctccaacatctcagaggactgtttatccctgggaaaagaatagtaggatggctctcatttctccaaagtcaattctgctgtggcctctccacccttgctggcactctctggcctatcactcctacaacctcattctgagcttgacaccaccatcttctattattcctccatcactcacccaagggattgtgtggggcagagggattgcagcacagagcaggagacaagtccacattcaaggtttaacctccccattctttgaaaattattggctaggccccatctccaaggactttctgtgtcctgctgtgttcatgaggctcctctctgtacatgcgattgtcacagccttcctttttcttcattcgtcatctctcccctcctctctagagccgagtgcctcaacagg

SEQ ID NO: 59815 - DNA, 379 bp, Homo sapiens
acatatatctatatatatagacatatttctgctttactaggtgagaagagttgcttgattttaagggctctcaatcaacaggcaccaaatgaacttacagcttgcaaaaatataaagcgctcaaggccgtacagacaaaggtaagggggcacagacctttcagttgtctacaggtattatcatctgaaattgacatacgaagaaagaaggtcagagaagaaatgtgacatgcccaaggcaatccaactgaaaaaatagccaatgtggacaataatcccagtttatagcttctagtgcaatgacttttgccagcacccagcatatcagaagataaacccactgactttctttagtgaagattgcgaattgtttaaatcag

SEQ ID NO: 59816 - DNA, 532 bp, Homo sapiens
ataatcttctgtcttaagagcacccaggatgtgttttcattggtacggaattagctagccctgggaaagacagtccctccagagttagcaacaccccaagatgtcaaagataaaaatgcaaaaattaaaactccatgattaacacaactttgaagtccttctcacttgtctttagatgaagggcaacatcattgcaacaagtcacactttgagaactcaagagaatatgtttgttctgaaaatccaggaattattgccaacccatggttgtctccatatgtcttgggaaaaataggaaaaggattttttgagttggtgatttgaatccaagacacaaagattcaggctctggtaaaaagattgtataggctatattggctgacataaaaggtaagagcaagaatgcagaggatttctatcaacataaagaagagtcaaagatggagaataagagaagttaagtggttttcctaagatcacataattaagacttattaataaaaagtttgatgctctttctattataacatag

SEQ ID NO: 59817 - DNA, 596 bp, Homo sapiens
ccttggacatggctacttatcggtcattcccgaatttgaataaaggaatttagatgtgggcaacatgcacagtgctagcttggtttgccctttcctctacatttggatttactgaggaaatttagtttaacatttatcttgagttctagcaatacatagctcacaagattggggcctcttgtccttcagggtcatttcacaaggtcaggcagtctctgtttttcctccctgactcacagagtatggctccttaaacctctaccttccagggatatgaacataggtggcagatggagaccctgtgctctgcagcaaactaacttggtgggaggatgcattatggggatacttgccttttggtttcacattggtttcttgggcagcatcagcagtgcccgctttcaagaatgttggacttaaaaagaggggctgggtggggaatgatggaagaaaagttaaacagccttgttgcagataggtgttggctgcaatggttacctgctagggccaatgagtcacacacttaggtcactcatgaagacgttttaatgtaaactttaaaaagaaaagacaagttttctttaaagacttttatg

SEQ ID NO: 59818 - DNA, 422 bp, Homo sapiens
gcttaatggactcacagttccacatgtctgaggaggcttcacaatcatggtggaaggcaaaaggcacatcttacatggcagcaggcaacagagagaaagagagccaagtaaaaggggtttccctttacaaaaccatcagatctcatgagacttattcactaccacgagaatggtctgggggaaaacgcccccatgattcagttatctcccaccaggtccctcccacaacacgtgggaattatgggagctacaattcaacatcagatttgggtggggacacagccaaaccatatcagttggattacaggtgtgagccactactcctggccccaaatgtccttttaaattagtgagttttttcagtctcatggctaaaattttattttatttttgagacagggtctcactctgtcaccaaaaaa

SEQ ID NO: 59819 - DNA, 572 bp, Homo sapiens
ttgcattctctaacaatgtttggaatgcaaacttgttgtattggtagattcttggttgcaatccttggtaaaagtagcatattgtgaatttcaacaattcccaacaagtttgaaattaaacttgtcaataattgagcccattatcctccctaccacgtttcagttatttccatcaccaccatcctccagtatttcaggtccaggacattaaaattatttctgacacctcttctgttgcccacttgcagtctgttactgattcttactgactgaccacattttattctcttgacacagtatcatctgaaactctgaagtagattaatcaacttgtattcctctgttctctaaacaatctaaccttaaaaagtaagaattatcttaaagcatcttcttaaagactatgctcagaaatttaaggttactttcaattgcctgcaacttgtatccccagcaatgatctttattaattctcaaacattgtgagagccaagtaaaccagatttctgttccatgctcacctctgcctgtttctacttgccctcctctgtccgtaatcaacttatttttct

SEQ ID NO: 59820 - DNA, 423 bp, Homo sapiens
agtacactgtagctggtaagaactaaattaaatttgatcacatgacattgtttactctgtgcattaagttttcttgaagttttaaggttgggaactcccacagggttaccttccaggaagtcctcctgggacaagcatgtcctataaatgccagcttactgatataaaaatctctcatatttgaaaacgcattctaattaacttttaagaacaagttgcaataaagattgtttatacttacacataaccatttggtgtaattggtagaaaaatcctatttgacatcctcacattgcttaaaattctctctgctgtttaaattgctttaaaaattgttttatgcctcatttaatataaattaaataagggtactggatgtccaattactgctcaataaaaatatttgtttttattttaaatgtg

SEQ ID NO: 59821 - DNA, 2892 bp, Homo sapiens
cgtgcgtcccggcatcaccccgggatccgctcctccccgctggcggggggagaaagggcaggaggccttccgtcccggctataaagggccccggaccgccgcggctcgcctcggcttgcctcgacacgcctaggcgccctccggctccgccctagccgccgcgtcccagctagagctccagcgcccgctcaggccccactcgaccctctcgggcctcggctacttggactgcggcggaatatggcggctccgatgactcccgcggctcggcccgaggactacgaggcggcgctcaatgccgccctggctgacgtgcccgaactggccagactcctggagatcgacccgtacttgaagccctacgccgtggacttccagcgcaggtataagcagtttagccaaattttgaagaacattggagaaaatgaaggtggtattgataagttttccagaggctatgaatcatttggcgtccacagatgtgctgatggtggtttatactgcaaagaatgggccccgggagcagaaggagtttttcttactggagattttaatggttggaatccattttcgtacccatacaaaaaactggattatggaaaatgggagctgtatatcccaccaaagcagaataaatctgtactcgtgcctcatggatccaaattaaaggtagttattactagtaaaagcggagagatcttgtatcgtatttcaccgtgggcaaagtatgtggttcgtgaaggtgataatgtgaattatgattggatacactgggatccagaacactcatatgagtttaagcattccagaccaaagaagccacggagtctaagaatttatgaatctcatgtgggaatttcttcccatgaaggaaaagtagcttcttataaacattttacatgcaatgtactaccaagaatcaaaggccttggatacaactgcattcagttgatggcaatcatggagcatgcttactatgccagctttggttaccaaatcacaagcttctttgcagcttccagccgttatggaacacctgaagagctacaagaactggtagacacagctcattccatgggtatcatagtcctcttagatgtggtacacagccatgcttcaaaaaattcagcagatggattgaatatgtttgatgggacagattcctgttattttcattctggacctagagggactcatgatctttgggatagcagattgtttgcctactccagctgggaagttttaagattccttctgtcaaacataagatggtggttggaagaatatcgctttgatggatttcgttttgatggtgttacgtccatgctttatcatcaccatggagtgggtcaaggtttctcaggtgattacagtgaatatttcggactacaagtagatgaagatgccttgacttacctcatgttggcaaatcatttggttcacacgctgtgtcccgattctataacaatagctgaggatgtatcaggaatgccagctctgtgctctccaatttcccagggagggggtggttttgactatcgactagccatggcaattccagataagtggattcagctacttaaagagtttaaagatgaagactggaacatgggcgatatagtatacacgctcacaaacaggcgctaccttgaaaagtgcattgcttatgcagagagccatgatcaggcattggttggggataagtcgctggcattttggttgatggatgccgaaatgtatacaaacatgagtgtcctgactccttttactccagttattgatcgtggaatacagcttcataaaatgattcgactcattacgcatgggcttggtggagaaggctatctcaatttcatgggtaatgaatttgggcatcctgaatggttagacttcccaagaaaaggaaataatgagagttaccattatgccaggcggcagtttcatttaactgacgacgaccttcttcgctacaagttcctaaataattttgacagggatatgaatagattggaagaaagatatggttggcttgcagctccacaggcctacgtgagtgaaaaacatgaaggcaataagatcattgcttttgaaagagcaggtcttcttttcattttcaacttccatccaagcaagagctacactgactaccgagttggaacagcattgccagggaaattcaaaattgtgctagattcagatgcagcggaatatggagggcatcagagactggaccacagcactgactttttttctgaggcttttgaacataatgggcgtccctattctcttttggtgtacattccaagcagagtggccctcatccttcagaatgtggatctgccgaattgaagaggcctgatttcagctccaccagatgcagatttgtgttttgttttcttgttatcactgtcacacagcttataacatgtatgcttttcagaatacagttgtctagccaagccatcaagtgtctgaaattcaatattggtttatgcaaatacagcaaacttttatttaagtagatgggagaatatgtttaaaatattaggaatcctagaccatattttcaagtcatcttagcagctaggattctcaaatggaagtgttatatataatatgttaaaaacattttgctttcctggctaattatttgatccttttaaattcaaatttgaatcatttgtcatgtatgattatttctgttaaatgtacacagtatttaagatggatatttggtggctctatttgttctgatatcttttggtctaaattatgaggtaccaagattgtttctttgtttctttttttcaaattgtgtttagaaatactgtaataaatatgcagtagtgatataaagaattatatccaaggtaatataaaagccattacgta

SEQ ID NO: 59822 - DNA, 802 bp, Homo sapiens
cgcggaatagtacggggcaggagaagaagaaggttctaggtgtacattccaagcagagtggccctcatccttcagaatgtggatctgccgaattgaagaggcctgatttcagctccaccagatgcagatttgtgttttgttttcttgttatcactgtcacacagcttataacatgtatgcttttcagaatacagttgtctagccaagccatcaagtgtctgaaattcaatattggtttatgcaaatacagcaaacttttatttaagtagatgggagaatatgtttaaaatattaggaatcctagaccatattttcaagtcatcttagcagctaggattctcaaatggaagtgttatatataatatgttaaaaacattttgctttcctggctaattatttgatccttttaaattcaaatttgaatcatttgtcatgtatgattatttctgttaaatgtacacagtatttaagatggatatttggtggctctatttgttctgatatcttttggtctaaattatgaggtaccaagattgtttctttgtttctttttttcaaattgtgtttagaaatactgtaataaatatgcagtagtgatataaagaattatatccaaggtaatataaaagccattacgtatgaactcatccgtgtctcattttgtgttttattttgtgatctcttgtccactaagtatcttgttaaatgccagtatctcagtctttctgaagccctgaaatggtaattgtagcatttcagaaaatgtctttcatttcaatcaataaaaagcttttgtaaaatt

SEQ ID NO: 59823 - DNA, 950 bp, Homo sapiens
  misc_feature (807)..(807): n is a, c, g, or t
  misc_feature (812)..(812): n is a, c, g, or t
  misc_feature (819)..(819): n is a, c, g, or t
cgcggaatagtacggggcaggagaagaagaaggttctaggtgtacattccaagcagagtggccctcatccttcagaatgtggatctgccgaattgaagaggcctgatttcagctccaccagatgcagatttgtgttttgttttcttgttatcactgtcacacagcttataacatgtatgcttttcagaatacagttgtctagccaagccatcaagtgtctgaaattcaatattggtttatgcaaatacagcaaacttttatttaagtagatgggagaatatgtttaaaatattaggaatcctagaccatattttcaagtcatcttagcagctaggattctcaaatggaagtgttatatataatatgttaaaaacattttgctttcctggctaattatttgatccttttaaattcaaatttgaatcatttgtcatgtatgattatttctgttaaatgtacacagtatttaagatggatatttggtggctctatttgttctgatatcttttggtctaaattatgaggtaccaagattgtttctttgtttctttttttcaaattgtgtttagaaatactgtaataaatatgcagtagtgatataaagaattatatccaaggtaatataaaagccattacgtatgaactcatccgtgtctcattttgtgttttattttgtgatctcttgtccactaagtatcttgttaaatgccagtatctcagtctttctgaagccctgaaatggtaattgtagcatttcagaaaatgtctttcatttcaatcaataaaaagcttttgtaaaattaaaanaaaanggctttntggcctagggggaaatcttcgcatttccttaagagggtaatcatgagactgtcactgaatcatgccctggtgctcggtgggcgacgtctattccctaaggcgacacggattccagatacgggaaacaaaag

SEQ ID NO: 59824 - DNA, 642 bp, Homo sapiens
  misc_feature (36)..(36): n is a, c, g, or t
accgaaagagagcccccccgccgctgccactcactncctctggtgtacattccaagcagagtggccctcatccttcagaatgtggatctgccgaattgaagaggcctgatttcagctccaccagatgcagatttgtgttttgttttcttgttatcactgtcacacagcttataacatgtatgcttttcagaatacagttgtctagccaagccatcaagtgtctgaaattcaatattggtttatgcaaatacagcaaacttttatttaagtagatgggagaatatgtttaaaatattaggaatcctagaccatattttcaagtcatcttagcagctaggattctcaaatggaagtgttatatataatatgttaaaaacattttgctttcctggctaattatttgatccttttaaattcaaatttgaatcatttgtcatgtatgattatttctgttaaatgtacacagtatttaagatggatatttggtggctctatttgttctgatatcttttggtctaaattatgaggtaccaagattgtttctttgtttctttttttcaaattgtgtttagaaatactgtaataaatatgcagtagtgatataaagaattatatccaaggtaatataaaagccattacgta

SEQ ID NO: 59825 - DNA, 636 bp, Homo sapiens
accacgtctgcgcttcgctaaaaaaagaaggtccttgtgtacattccaagcagagtggccctcatccttcagaatgtggatctgccgaattgaagaggcctgatttcagctccaccagatgcagatttgtgttttgttttcttgttatcactgtcacacagcttataacatgtatgcttttcagaatacagttgtctagccaagccatcaagtgtctgaaattcaatattggtttatgcaaatacagcaaacttttatttaagtagatgggagaatatgtttaaaatattaggaatcctagaccatattttcaagtcatcttagcagctaggattctcaaatggaagtgttatatataatatgttaaaaacattttgctttcctggctaattatttgatccttttaaattcaaatttgaatcatttgtcatgtatgattatttctgttaaatgtacacagtatttaagatggatatttggtggctctatttgttctgatatcttttggtctaaattatgaggtaccaagattgtttctttgtttctttttttcaaattgtgtttagaaatactgtaataaatatgcagtagtgatataaagaattatatccaaggtaatataaaagccattacgta

SEQ ID NO: 59826 - DNA, 324 bp, Homo sapiens
tttttttttgggggggtttttttttcccccttttgggaaaaattaggtaccaagattgtttctttgtttctttttttcaaattgtgtttagaaatactgtaataaatatgcagtagtgatataaagaattatatccaaggtaatataaaagccattacgtatgaactcatccgtgtctcattttgtgttttattttgtgatctcttgtccactaagtatcttgttaaatgccagtatctcagtctttctgaagccctgaaatggtaattgtagcatttcagaaaatgtctttcatttcaatcaataaaaagcttttgtaaaatt

SEQ ID NO: 59827 - DNA, 1096 bp, Homo sapiens
tacagatgtaatttcttttcagaccttatctttttattaagaaaaaaaagtattgtaattgactttaggttgccattgaatctgacaaagttgggtaaaaatgtaaaatgtttaagagaactgtaatttcagaaactacattaaaataaaaatgttacattaaattttgaaaagtaattttatgtacctaaccgcattaagctggagactaaaagtcttacagaaaattcacttataagtagatctaatatatacaaacgaacactttgtagtatgtataggtaccatggttttacttaaaacctgagccacaacactgtttctctatttgtgctatgagggtagcaagtggctggtgagctttgtatactccactaaacaatttttgagactgttcttggctcacagttaggtacagcaaaattgtaacatgttcaaaaaaatatagtgttctgaaatactcatttttggtttaataaccagactattaagaaagacaaaaaataatgtacttgtagcagcatctaggtattatttaaatgtaacatgtgtgctaattcttgcaggcctacgtgagtgaaaaacatgaaggcaataagatcattgcttttgaaagagcaggtcttcttttcattttcaacttccatccaagcaagagctacactgactaccgagttggaacagcattgccagggaaatatcctttttgttaccagtgaatatgactgtccacattcacttctttattacattataggacaaaaaaaaaaaaaagactaaggttgatcttgatgacagaaacattcattttcctcatctgaaaaatgaggaacttaaaatagttgatggataaatctttgctcgactcagttatactgaattattcctaagcttcattttgggtttaaacagaggggttagtgcagacgtggttcacatcaaaggaaagagctgtggatcttgctgtcctgaaggtttcactatggagccctgctctccaggtccccacatccaccaatacagaagacaataaatgaagtcttctgagataatagcagaggctctggacttaggggaccaggctttaaaaagtata

SEQ ID NO: 59828 - DNA, 3192 bp, Homo sapiens
  misc_feature (3081)..(3082): n is a, c, g, or t
  misc_feature (3086)..(3086): n is a, c, g, or t
  misc_feature (3091)..(3091): n is a, c, g, or t
  misc_feature (3095)..(3095): n is a, c, g, or t
  misc_feature (3100)..(3100): n is a, c, g, or t
cgtgcgtcccggcatcaccccgggatccgctcctccccgctggcggggggagaaagggcaggaggccttccgtcccggctataaagggccccggaccgccgcggctcgcctcggcttgcctcgacacgcctaggcgccctccggctccgccctagccgccgcgtcccagctagagctccagcgcccgctcaggccccactcgaccctctcgggcctcggctacttggactgcggcggaatatggcggctccgatgactcccgcggctcggcccgaggactacgaggcggcgctcaatgccgccctggctgacgtgcccgaactggccagactcctggagatcgacccgtacttgaagccctacgccgtggacttccagcgcaggtataagcagtttagccaaattttgaagaacattggagaaaatgaaggtggtattgataagttttccagaggctatgaatcatttggcgtccacagatgtgctgatggtggtttatactgcaaagaatgggccccgggagcagaaggagtttttcttactggagattttaatggttggaatccattttcgtacccatacaaaaaactggattatggaaaatgggagctgtatatcccaccaaagcagaataaatctgtactcgtgcctcatggatccaaattaaaggtagttattactagtaaaagcggagagatcttgtatcgtatttcaccgtgggcaaagtatgtggttcgtgaaggtgataatgtgaattatgattggatacactgggatccagaacactcatatgagtttaagcattccagaccaaagaagccacggagtctaagaatttatgaatctcatgtgggaatttcttcccatgaaggaaaagtagcttcttataaacattttacatgcaatgtactaccaagaatcaaaggccttggatacaactgcattcagttgatggcaatcatggagcatgcttactatgccagctttggttaccaaatcacaagcttctttgcagcttccagccgttatggaacacctgaagagctacaagaactggtagacacagctcattccatgggtatcatagtcctcttagatgtggtacacagccatgcttcaaaaaattcagcagatggattgaatatgtttgatgggacagattcctgttattttcattctggacctagagggactcatgatctttgggatagcagattgtttgcctactccagctgggaagttttaagattccttctgtcaaacataagatggtggttggaagaatatcgctttgatggatttcgttttgatggtgttacgtccatgctttatcatcaccatggagtgggtcaaggtttctcaggtgattacagtgaatatttcggactacaagtagatgaagatgccttgacttacctcatgttggcaaatcatttggttcacacgctgtgtcccgattctataacaatagctgaggatgtatcaggaatgccagctctgtgctctccaatttcccagggagggggtggttttgactatcgactagccatggcaattccagataagtggattcagctacttaaagagtttaaagatgaagactggaacatgggcgatatagtatacacgctcacaaacaggcgctaccttgaaaagtgcattgcttatgcagagagccatgatcaggcattggttggggataagtcgctggcattttggttgatggatgccgaaatgtatacaaacatgagtgtcctgactccttttactccagttattgatcgtggaatacagcttcataaaatgattcgactcattacgcatgggcttggtggagaaggctatctcaatttcatgggtaatgaatttgggcatcctgaatggttagacttcccaagaaaaggaaataatgagagttaccattatgccaggcggcagtttcatttaactgacgacgaccttcttcgctacaagttcctaaataattttgacagggatatgaatagattggaagaaagatatggttggcttgcagctccacaggcctacgtgagtgaaaaacatgaaggcaataagatcattgcttttgaaagagcaggtcttcttttcattttcaacttccatccaagcaagagctacactgactaccgagttggaacagcattgccagggaaattcaaaattgtgctagattcagatgcagcggaatatggagggcatcagagactggaccacagcactgactttttttctgaggcttttgaacataatgggcgtccctattctcttttggtgtacattccaagcagagtggccctcatccttcagaatgtggatctgccgaattgaagaggcctgatttcagctccaccagatgcagatttgtgttttgttttcttgttatcactgtcacacagcttataacatgtatgcttttcagaatacagttgtctagccaagccatcaagtgtctgaaattcaatattggtttatgcaaatacagcaaacttttatttaagtagatgggagaatatgtttaaaatattaggaatcctagaccatattttcaagtcatcttagcagctaggattctcaaatggaagtgttatatataatatgttaaaaacattttgctttcctggctaattatttgatccttttaaattcaaatttgaatcatttgtcatgtatgattatttctgttaaatgtacacagtatttaagatggatatttggtggctctatttgttctgatatcttttggtctaaattatgaggtaccaagattgtttctttgtttctttttttcaaattgtgtttagaaatactgtaataaatatgcagtagtgatataaagaattatatccaaggtaatataaaagccattacgtatgaactcatccgtgtctcattttgtgttttattttgtgatctcttgtccactaagtatcttgttaaatgccagtatctcagtctttctgaagccctgaaatggtaattgtagcatttcagaaaatgtctttcatttcaatcaataaaaagcttttgtaaaattaaaaaaaaaaaaatggctcgttggcnnaggnggaantttnggccnttcctttaggagagtaattatgacctcgtcactaccgctggctggtgtcggtgtgcagcgtttattattaaggcgtatctggtaccaatatg

SEQ ID NO: 59829 - DNA, 1578 bp, Homo sapiens
tacagatgtaatttcttttcagaccttatctttttattaagaaaaaaaagtattgtaattgactttaggttgccattgaatctgacaaagttgggtaaaaatgtaaaatgtttaagagaactgtaatttcagaaactacattaaaataaaaatgttacattaaattttgaaaagtaattttatgtacctaaccgcattaagctggagactaaaagtcttacagaaaattcacttataagtagatctaatatatacaaacgaacactttgtagtatgtataggtaccatggttttacttaaaacctgagccacaacactgtttctctatttgtgctatgagggtagcaagtggctggtgagctttgtatactccactaaacaatttttgagactgttcttggctcacagttaggtacagcaaaattgtaacatgttcaaaaaaatatagtgttctgaaatactcatttttggtttaataaccagactattaagaaagacaaaaaataatgtacttgtagcagcatctaggtattatttaaatgtaacatgtgtgctaattcttgcaggcctacgtgagtgaaaaacatgaaggcaataagatcattgcttttgaaagagcaggtcttcttttcattttcaacttccatccaagcaagagctacactgactaccgagttggaacagcattgccagggaaattcaaaattgtgctagattcagatgcagcggaatatggagggcatcagagactggaccacagcactgactttttttctgaggcttttgaacataatgggcgtccctattctcttttggtgtacattccaagcagagtggccctcatccttcagaatgtggatctgccgaattgaagaggcctgatttcagctccaccagatgcagatttgtgttttgttttcttgttatcactgtcacacagcttataacatgtatgcttttcagaatacagttgtctagccaagccatcaagtgtctgaaattcaatattggtttatgcaaatacagcaaacttttatttaagtagatgggagaatatgtttaaaatattaggaatcctagaccatattttcaagtcatcttagcagctaggattctcaaatggaagtgttatatataatatgttaaaaacattttgctttcctggctaattatttgatccttttaaattcaaatttgaatcatttgtcatgtatgattatttctgttaaatgtacacagtatttaagatggatatttggtggctctatttgttctgatatcttttggtctaaattatgaggtaccaagattgtttctttgtttctttttttcaaattgtgtttagaaatactgtaataaatatgcagtagtgatataaagaattatatccaaggtaatataaaagccattacgtatgaactcatccgtgtctcattttgtgttttattttgtgatctcttgtccactaagtatcttgttaaatgccagtatctcagtctttctgaagccctgaaatggtaattgtagcatttcagaaaatgtctttcatttcaatcaataaaaagcttttgtaaaatt

SEQ ID NO: 59830 - DNA, 2927 bp, Homo sapiens
  misc_feature (2903)..(2903): n is a, c, g, or t
  misc_feature (2913)..(2913): n is a, c, g, or t
cgtgcgtcccggcatcaccccgggatccgctcctccccgctggcggggggagaaagggcaggaggccttccgtcccggctataaagggccccggaccgccgcggctcgcctcggcttgcctcgacacgcctaggcgccctccggctccgccctagccgccgcgtcccagctagagctccagcgcccgctcaggccccactcgaccctctcgggcctcggctacttggactgcggcggaatatggcggctccgatgactcccgcggctcggcccgaggactacgaggcggcgctcaatgccgccctggctgacgtgcccgaactggccagactcctggagatcgacccgtacttgaagccctacgccgtggacttccagcgcaggtataagcagtttagccaaattttgaagaacattggagaaaatgaaggtggtattgataagttttccagaggctatgaatcatttggcgtccacagatgtgctgatggtggtttatactgcaaagaatgggccccgggagcagaaggagtttttcttactggagattttaatggttggaatccattttcgtacccatacaaaaaactggattatggaaaatgggagctgtatatcccaccaaagcagaataaatctgtactcgtgcctcatggatccaaattaaaggtagttattactagtaaaagcggagagatcttgtatcgtatttcaccgtgggcaaagtatgtggttcgtgaaggtgataatgtgaattatgattggatacactgggatccagaacactcatatgagtttaagcattccagaccaaagaagccacggagtctaagaatttatgaatctcatgtgggaatttcttcccatgaaggaaaagtagcttcttataaacattttacatgcaatgtactaccaagaatcaaaggccttggatacaactgcattcagttgatggcaatcatggagcatgcttactatgccagctttggttaccaaatcacaagcttctttgcagcttccagccgttatggaacacctgaagagctacaagaactggtagacacagctcattccatgggtatcatagtcctcttagatgtggtacacagccatgcttcaaaaaattcagcagatggattgaatatgtttgatgggacagattcctgttattttcattctggacctagagggactcatgatctttgggatagcagattgtttgcctactccagctgggaagttttaagattccttctgtcaaacataagatggtggttggaagaatatcgctttgatggatttcgttttgatggtgttacgtccatgctttatcatcaccatggagtgggtcaaggtttctcaggtgattacagtgaatatttcggactacaagtagatgaagatgccttgacttacctcatgttggcaaatcatttggttcacacgctgtgtcccgattctataacaatagctgaggatgtatcaggaatgccagctctgtgctctccaatttcccagggagggggtggttttgactatcgactagccatggcaattccagataagtggattcagctacttaaagagtttaaagatgaagactggaacatgggcgatatagtatacacgctcacaaacaggcgctaccttgaaaagtgcattgcttatgcagagagccatgatcaggcattggttggggataagtcgctggcattttggttgatggatgccgaaatgtatacaaacatgagtgtcctgactccttttactccagttattgatcgtggaatacagcttcataaaatgattcgactcattacgcatgggcttggtggagaaggctatctcaatttcatgggtaatgaatttgggcatcctgaatggttagacttcccaagaaaaggaaataatgagagttaccattatgccaggcggcagtttcatttaactgacgacgaccttcttcgctacaagttcctaaataattttgacagggatatgaatagattggaagaaagatatggttggcttgcagctccacaggcctacgtgagtgaaaaacatgaaggcaataagatcattgcttttgaaagagcaggtcttcttttcattttcaacttccatccaagcaagagctacactgactaccgagttggaacagcattgccagggaaattcaaaattgtgctagattcagatgcagcggaatatggagggcatcagagactggaccacagcactgactttttttctgaggcttttgaacataatgggcgtccctattctcttttggtgtacattccaagcagagtggccctcatccttcagaatgtggatctgccgaattgaagaggcctgatttcagctccaccagatgcagatttgtgttttgttttcttgttatcactgtcacacagcttataacatgtatgcttttcagaatacagttgtctagccaagccatcaagtgtctgaaattcaatattggtttatgcaaatacagcaaacttttatttaagtagatgggagaatatgtttaaaatattaggaatcctagaccatattttcaagtcatcttagcagctaggattctcaaatggaagtgttatatataatatgttaaaaacattttgctttcctggctaattatttgatccttttaaattcaaatttgaatcatttgtcatgtatgattatttctgttaaatgtacacagtatttaagatggatatttggtggctctatttgttctgatatcttttggtctaaattatgaggtaccaagattgtttctttgtttctttttttcaaattgtgtttagaaatactgtaataaatatgcagtagtgatataaagaattatatccaaggtaatataaaagccattacgtaaaaaaaaaaanaatggcctcnttgccctcagaggg

SEQ ID NO: 59831 - DNA, 800 bp, Homo sapiens
tatttattatttttaaatctatccgcggtaccctcaggtgtacattccaagcagagtggccctcatccttcagaatgtggatctgccgaattgaagaggcctgatttcagctccaccagatgcagatttgtgttttgttttcttgttatcactgtcacacagcttataacatgtatgcttttcagaatacagttgtctagccaagccatcaagtgtctgaaattcaatattggtttatgcaaatacagcaaacttttatttaagtagatgggagaatatgtttaaaatattaggaatcctagaccatattttcaagtcatcttagcagctaggattctcaaatggaagtgttatatataatatgttaaaaacattttgctttcctggctaattatttgatccttttaaattcaaatttgaatcatttgtcatgtatgattatttctgttaaatgtacacagtatttaagatggatatttggtggctctatttgttctgatatcttttggtctaaattatgaggtaccaagattgtttctttgtttctttttttcaaattgtgtttagaaatactgtaataaatatgcagtagtgatataaagaattatatccaaggtaatataaaagccattacgtatgaactcatccgtgtctcattttgtgttttattttgtgatctcttgtccactaagtatcttgttaaatgccagtatctcagtctttctgaagccctgaaatggtaattgtagcatttcagaaaatgtctttcatttcaatcaataaaaagcttttgtaaaatt

SEQ ID NO: 59832 - DNA, 801 bp, Homo sapiens
aatatacgataatttctaataacacagtgtgccttcaggtgtacattccaagcagagtggccctcatccttcagaatgtggatctgccgaattgaagaggcctgatttcagctccaccagatgcagatttgtgttttgttttcttgttatcactgtcacacagcttataacatgtatgcttttcagaatacagttgtctagccaagccatcaagtgtctgaaattcaatattggtttatgcaaatacagcaaacttttatttaagtagatgggagaatatgtttaaaatattaggaatcctagaccatattttcaagtcatcttagcagctaggattctcaaatggaagtgttatatataatatgttaaaaacattttgctttcctggctaattatttgatccttttaaattcaaatttgaatcatttgtcatgtatgattatttctgttaaatgtacacagtatttaagatggatatttggtggctctatttgttctgatatcttttggtctaaattatgaggtaccaagattgtttctttgtttctttttttcaaattgtgtttagaaatactgtaataaatatgcagtagtgatataaagaattatatccaaggtaatataaaagccattacgtatgaactcatccgtgtctcattttgtgttttattttgtgatctcttgtccactaagtatcttgttaaatgccagtatctcagtctttctgaagccctgaaatggtaattgtagcatttcagaaaatgtctttcatttcaatcaataaaaagcttttgtaaaatt

SEQ ID NO: 59833 - DNA, 806 bp, Homo sapiens
cgaggtctcgcgggtcgcgggcaattaggtagggggcgtgctggtgtacattccaagcagagtggccctcatccttcagaatgtggatctgccgaattgaagaggcctgatttcagctccaccagatgcagatttgtgttttgttttcttgttatcactgtcacacagcttataacatgtatgcttttcagaatacagttgtctagccaagccatcaagtgtctgaaattcaatattggtttatgcaaatacagcaaacttttatttaagtagatgggagaatatgtttaaaatattaggaatcctagaccatattttcaagtcatcttagcagctaggattctcaaatggaagtgttatatataatatgttaaaaacattttgctttcctggctaattatttgatccttttaaattcaaatttgaatcatttgtcatgtatgattatttctgttaaatgtacacagtatttaagatggatatttggtggctctatttgttctgatatcttttggtctaaattatgaggtaccaagattgtttctttgtttctttttttcaaattgtgtttagaaatactgtaataaatatgcagtagtgatataaagaattatatccaaggtaatataaaagccattacgtatgaactcatccgtgtctcattttgtgttttattttgtgatctcttgtccactaagtatcttgttaaatgccagtatctcagtctttctgaagccctgaaatggtaattgtagcatttcagaaaatgtctttcatttcaatcaataaaaagcttttgtaaaatt

SEQ ID NO: 59834 - DNA, 802 bp, Homo sapiens
aacccgcgccggaaataggaaggaaggggggggcttagagtgtacattccaagcagagtggccctcatccttcagaatgtggatctgccgaattgaagaggcctgatttcagctccaccagatgcagatttgtgttttgttttcttgttatcactgtcacacagcttataacatgtatgcttttcagaatacagttgtctagccaagccatcaagtgtctgaaattcaatattggtttatgcaaatacagcaaacttttatttaagtagatgggagaatatgtttaaaatattaggaatcctagaccatattttcaagtcatcttagcagctaggattctcaaatggaagtgttatatataatatgttaaaaacattttgctttcctggctaattatttgatccttttaaattcaaatttgaatcatttgtcatgtatgattatttctgttaaatgtacacagtatttaagatggatatttggtggctctatttgttctgatatcttttggtctaaattatgaggtaccaagattgtttctttgtttctttttttcaaattgtgtttagaaatactgtaataaatatgcagtagtgatataaagaattatatccaaggtaatataaaagccattacgtatgaactcatccgtgtctcattttgtgttttattttgtgatctcttgtccactaagtatcttgttaaatgccagtatctcagtctttctgaagccctgaaatggtaattgtagcatttcagaaaatgtctttcatttcaatcaataaaaagcttttgtaaaatt

SEQ ID NO: 59835 - DNA, 806 bp, Homo sapiens
gattagtcgaactattaatatatcacgagaaggaaagcccttagtgtacattccaagcagagtggccctcatccttcagaatgtggatctgccgaattgaagaggcctgatttcagctccaccagatgcagatttgtgttttgttttcttgttatcactgtcacacagcttataacatgtatgcttttcagaatacagttgtctagccaagccatcaagtgtctgaaattcaatattggtttatgcaaatacagcaaacttttatttaagtagatgggagaatatgtttaaaatattaggaatcctagaccatattttcaagtcatcttagcagctaggattctcaaatggaagtgttatatataatatgttaaaaacattttgctttcctggctaattatttgatccttttaaattcaaatttgaatcatttgtcatgtatgattatttctgttaaatgtacacagtatttaagatggatatttggtggctctatttgttctgatatcttttggtctaaattatgaggtaccaagattgtttctttgtttctttttttcaaattgtgtttagaaatactgtaataaatatgcagtagtgatataaagaattatatccaaggtaatataaaagccattacgtatgaactcatccgtgtctcattttgtgttttattttgtgatctcttgtccactaagtatcttgttaaatgccagtatctcagtctttctgaagccctgaaatggtaattgtagcatttcagaaaatgtctttcatttcaatcaataaaaagcttttgtaaaatt

SEQ ID NO: 59836 - DNA, 803 bp, Homo sapiens
atatccgctataatattataaaatgattaagataacttcagtgtacattccaagcagagtggccctcatccttcagaatgtggatctgccgaattgaagaggcctgatttcagctccaccagatgcagatttgtgttttgttttcttgttatcactgtcacacagcttataacatgtatgcttttcagaatacagttgtctagccaagccatcaagtgtctgaaattcaatattggtttatgcaaatacagcaaacttttatttaagtagatgggagaatatgtttaaaatattaggaatcctagaccatattttcaagtcatcttagcagctaggattctcaaatggaagtgttatatataatatgttaaaaacattttgctttcctggctaattatttgatccttttaaattcaaatttgaatcatttgtcatgtatgattatttctgttaaatgtacacagtatttaagatggatatttggtggctctatttgttctgatatcttttggtctaaattatgaggtaccaagattgtttctttgtttctttttttcaaattgtgtttagaaatactgtaataaatatgcagtagtgatataaagaattatatccaaggtaatataaaagccattacgtatgaactcatccgtgtctcattttgtgttttattttgtgatctcttgtccactaagtatcttgttaaatgccagtatctcagtctttctgaagccctgaaatggtaattgtagcatttcagaaaatgtctttcatttcaatcaataaaaagcttttgtaaaatt

SEQ ID NO: 59837 - DNA, 805 bp, Homo sapiens
  misc_feature (23)..(23): n is a, c, g, or t
gtgtcgacaggcacattgagatncccaccacccattgtcaaggtgtacattccaagcagagtggccctcatccttcagaatgtggatctgccgaattgaagaggcctgatttcagctccaccagatgcagatttgtgttttgttttcttgttatcactgtcacacagcttataacatgtatgcttttcagaatacagttgtctagccaagccatcaagtgtctgaaattcaatattggtttatgcaaatacagcaaacttttatttaagtagatgggagaatatgtttaaaatattaggaatcctagaccatattttcaagtcatcttagcagctaggattctcaaatggaagtgttatatataatatgttaaaaacattttgctttcctggctaattatttgatccttttaaattcaaatttgaatcatttgtcatgtatgattatttctgttaaatgtacacagtatttaagatggatatttggtggctctatttgttctgatatcttttggtctaaattatgaggtaccaagattgtttctttgtttctttttttcaaattgtgtttagaaatactgtaataaatatgcagtagtgatataaagaattatatccaaggtaatataaaagccattacgtatgaactcatccgtgtctcattttgtgttttattttgtgatctcttgtccactaagtatcttgttaaatgccagtatctcagtctttctgaagccctgaaatggtaattgtagcatttcagaaaatgtctttcatttcaatcaataaaaagcttttgtaaaatt

SEQ ID NO: 59838 - DNA, 806 bp, Homo sapiens
ggcggggccgcgcggcagaggcagcccgaccgggcgcttccaggtgtacattccaagcagagtggccctcatccttcagaatgtggatctgccgaattgaagaggcctgatttcagctccaccagatgcagatttgtgttttgttttcttgttatcactgtcacacagcttataacatgtatgcttttcagaatacagttgtctagccaagccatcaagtgtctgaaattcaatattggtttatgcaaatacagcaaacttttatttaagtagatgggagaatatgtttaaaatattaggaatcctagaccatattttcaagtcatcttagcagctaggattctcaaatggaagtgttatatataatatgttaaaaacattttgctttcctggctaattatttgatccttttaaattcaaatttgaatcatttgtcatgtatgattatttctgttaaatgtacacagtatttaagatggatatttggtggctctatttgttctgatatcttttggtctaaattatgaggtaccaagattgtttctttgtttctttttttcaaattgtgtttagaaatactgtaataaatatgcagtagtgatataaagaattatatccaaggtaatataaaagccattacgtatgaactcatccgtgtctcattttgtgttttattttgtgatctcttgtccactaagtatcttgttaaatgccagtatctcagtctttctgaagccctgaaatggtaattgtagcatttcagaaaatgtctttcatttcaatcaataaaaagcttttgtaaaatt

SEQ ID NO: 59839 - DNA, 803 bp, Homo sapiens
gtcgttacggccccctaattagcaacggagccgggtctaggtgtacattccaagcagagtggccctcatccttcagaatgtggatctgccgaattgaagaggcctgatttcagctccaccagatgcagatttgtgttttgttttcttgttatcactgtcacacagcttataacatgtatgcttttcagaatacagttgtctagccaagccatcaagtgtctgaaattcaatattggtttatgcaaatacagcaaacttttatttaagtagatgggagaatatgtttaaaatattaggaatcctagaccatattttcaagtcatcttagcagctaggattctcaaatggaagtgttatatataatatgttaaaaacattttgctttcctggctaattatttgatccttttaaattcaaatttgaatcatttgtcatgtatgattatttctgttaaatgtacacagtatttaagatggatatttggtggctctatttgttctgatatcttttggtctaaattatgaggtaccaagattgtttctttgtttctttttttcaaattgtgtttagaaatactgtaataaatatgcagtagtgatataaagaattatatccaaggtaatataaaagccattacgtatgaactcatccgtgtctcattttgtgttttattttgtgatctcttgtccactaagtatcttgttaaatgccagtatctcagtctttctgaagccctgaaatggtaattgtagcatttcagaaaatgtctttcatttcaatcaataaaaagcttttgtaaaatt

SEQ ID NO: 59840 - DNA, 808 bp, Homo sapiens
  misc_feature (27)..(27): n is a, c, g, or t
tattttcacataagtcttacataccanccaaaagagccccttcaggtgtacattccaagcagagtggccctcatccttcagaatgtggatctgccgaattgaagaggcctgatttcagctccaccagatgcagatttgtgttttgttttcttgttatcactgtcacacagcttataacatgtatgcttttcagaatacagttgtctagccaagccatcaagtgtctgaaattcaatattggtttatgcaaatacagcaaacttttatttaagtagatgggagaatatgtttaaaatattaggaatcctagaccatattttcaagtcatcttagcagctaggattctcaaatggaagtgttatatataatatgttaaaaacattttgctttcctggctaattatttgatccttttaaattcaaatttgaatcatttgtcatgtatgattatttctgttaaatgtacacagtatttaagatggatatttggtggctctatttgttctgatatcttttggtctaaattatgaggtaccaagattgtttctttgtttctttttttcaaattgtgtttagaaatactgtaataaatatgcagtagtgatataaagaattatatccaaggtaatataaaagccattacgtatgaactcatccgtgtctcattttgtgttttattttgtgatctcttgtccactaagtatcttgttaaatgccagtatctcagtctttctgaagccctgaaatggtaattgtagcatttcagaaaatgtctttcatttcaatcaataaaaagcttttgtaaaatt

SEQ ID NO: 59841 - DNA, 871 bp, Homo sapiens
cgtgcgtcccggcatcaccccgggatccgctcctccccgctggcggggggagaaagggcaggaggccttccgtcccggctataaagggccccggaccgccgcggctcgcctcggcttgcctcgacacgcctaggcgccctccggctccgccctagccgccgcgtcccagctagagctccagcgcccgctcaggccccactcgaccctctcgggcctcggctacttggactgcggcggaatatggcggctccgatgactcccgcggctcggcccgaggactacgaggcggcgctcaatgccgccctggctgacgtgcccgaactggccagactcctggagatcgacccgtacttgaagccctacgccgtggacttccagcgcaggtataagcagtttagccaaattttgaagaacattggagaaaatgaaggtggtattgataagttttccagaggctatgaatcatttggcgtccacagatgtgctgatggtggtttatactgcaaagaatgggccccgggagcagaaggagtttttcttactggagattttaatggttggaatccattttcgtacccatacaaaaaactggattatggaaaatgggagctgtatatcccaccaaagcagaataaatctgtactcgtgcctcatggatccaaattaaagaacttccagaactcgggacaactcagctattaaaggattaacagctggcaaatactctgtggccatcatctcatctgattggtagaaacaaaaaatatacatgttgttaaaatatgttgggtttatgtgtacatatatcaaaacattgttttacaccttgaatatatacaatttttgttaattataactcaataaagcacga

SEQ ID NO: 59842 - DNA, 777 bp, Homo sapiens
catctaaatgaagtagtaacattgcaaactgtggggcagccttccttcaccacctaatacagcctcaacatggcagtaacagggccattcacgtcattcttgtgtaaggagcattggttttcattaagtcgtatggcgccctctagtggtggttgctttatggtagtcatgttgctgccagaactgttggaactgtgaaattgagccttctaagagcttgtaaaattgtaaaggtaactgtaactttaggcagatgtgagactgcgtcatgcctatgtttctttgacataatgacaggccgtttggtactttcttcaattgcactgacataattgttttgacgtaggtgtacattccaagcagagtggccctcatccttcagaatgtggatctgccgaattgaagaggcctgatttcagctccaccagatgcagatttgtgttttgttttcttgttatcactgtcacacagcttataacatgtatgcttttcagaatacagttgtctagccaagccatcaagtgtctgaaattcaatattggtttatgcaaatacagcaaacttttatttaagtagatgggagaatatgtttaaaatattaggaatcctagaccatattttcaagtcatcttagcagctaggattctcaaatggaagtgttatatataatatgttaaaaacattttgctttcctggctaattatttgatccttttaaattcaaatttgaatcatttgtcatgtatgattatttctgttaaatgtacacagtatttaa

SEQ ID NO: 59843 - DNA, 3055 bp, Homo sapiens
cgtgcgtcccggcatcaccccgggatccgctcctccccgctggcggggggagaaagggcaggaggccttccgtcccggctataaagggccccggaccgccgcggctcgcctcggcttgcctcgacacgcctaggcgccctccggctccgccctagccgccgcgtcccagctagagctccagcgcccgctcaggccccactcgaccctctcgggcctcggctacttggactgcggcggaatatggcggctccgatgactcccgcggctcggcccgaggactacgaggcggcgctcaatgccgccctggctgacgtgcccgaactggccagactcctggagatcgacccgtacttgaagccctacgccgtggacttccagcgcaggtataagcagtttagccaaattttgaagaacattggagaaaatgaaggtggtattgataagttttccagaggctatgaatcatttggcgtccacagatgtgctgatggtggtttatactgcaaagaatgggccccgggagcagaaggagtttttcttactggagattttaatggttggaatccattttcgtacccatacaaaaaactggattatggaaaatgggagctgtatatcccaccaaagcagaataaatctgtactcgtgcctcatggatccaaattaaaggtagttattactagtaaaagcggagagatcttgtatcgtatttcaccgtgggcaaagtatgtggttcgtgaaggtgataatgtgaattatgattggatacactgggatccagaacactcatatgagtttaagcattccagaccaaagaagccacggagtctaagaatttatgaatctcatgtgggaatttcttcccatgaaggaaaagtagcttcttataaacattttacatgcaatgtactaccaagaatcaaaggccttggatacaactgcattcagttgatggcaatcatggagcatgcttactatgccagctttggttaccaaatcacaagcttctttgcagcttccagccgttatggaacacctgaagagctacaagaactggtagacacagctcattccatgggtatcatagtcctcttagatgtggtacacagccatgcttcaaaaaattcagcagatggattgaatatgtttgatgggacagattcctgttattttcattctggacctagagggactcatgatctttgggatagcagattgtttgcctactccagctgggaagttttaagattccttctgtcaaacataagatggtggttggaagaatatcgctttgatggatttcgttttgatggtgttacgtccatgctttatcatcaccatggagtgggtcaaggtttctcaggtgattacagtgaatatttcggactacaagtagatgaagatgccttgacttacctcatgttggcaaatcatttggttcacacgctgtgtcccgattctataacaatagctgaggatgtatcaggaatgccagctctgtgctctccaatttcccagggagggggtggttttgactatcgactagccatggcaattccagataagtggattcagctacttaaagagtttaaagatgaagactggaacatgggcgatatagtatacacgctcacaaacaggcgctaccttgaaaagtgcattgcttatgcagagagccatgatcaggcattggttggggataagtcgctggcattttggttgatggatgccgaaatgtatacaaacatgagtgtcctgactccttttactccagttattgatcgtggaatacagcttcataaaatgattcgactcattacgcatgggcttggtggagaaggctatctcaatttcatgggtaatgaatttgggcatcctgaatggttagacttcccaagaaaaggaaataatgagagttaccattatgccaggcggcagtttcatttaactgacgacgaccttcttcgctacaagttcctaaataattttgacagggatatgaatagattggaagaaagatatggttggcttgcagctccacaggcctacgtgagtgaaaaacatgaaggcaataagatcattgcttttgaaagagcaggtcttcttttcattttcaacttccatccaagcaagagctacactgactaccgagttggaacagcattgccagggaaattcaaaattgtgctagattcagatgcagcggaatatggagggcatcagagactggaccacagcactgactttttttctgaggcttttgaacataatgggcgtccctattctcttttggtgtacattccaagcagagtggccctcatccttcagaatgtggatctgccgaattgaagaggcctgatttcagctccaccagatgcagatttgtgttttgttttcttgttatcactgtcacacagcttataacatgtatgcttttcagaatacagttgtctagccaagccatcaagtgtctgaaattcaatattggtttatgcaaatacagcaaacttttatttaagtagatgggagaatatgtttaaaatattaggaatcctagaccatattttcaagtcatcttagcagctaggattctcaaatggaagtgttatatataatatgttaaaaacattttgctttcctggctaattatttgatccttttaaattcaaatttgaatcatttgtcatgtatgattatttctgttaaatgtacacagtatttaagatggatatttggtggctctatttgttctgatatcttttggtctaaattatgaggtaccaagattgtttctttgtttctttttttcaaattgtgtttagaaatactgtaataaatatgcagtagtgatataaagaattatatccaaggtaatataaaagccattacgtatgaactcatccgtgtctcattttgtgttttattttgtgatctcttgtccactaagtatcttgttaaatgccagtatctcagtctttctgaagccctgaaatggtaattgtagcatttcagaaaatgtctttcatttcaatcaataaaaagcttttgtaaaatt

SEQ ID NO: 59844 - DNA, 2641 bp, Homo sapiens
cccagcctacatctttctcccatgctggatgcttaaagcccgtcgaacgtcagactccaaattcttcagttctgggacttggagtggctctccttgctcctcagcttgcagacggcctatcgtggaaccttgccattgcatggttggaatccattttcgtacccatacaaaaaactggattatggaaaatgggagctgtatatcccaccaaagcagaataaatctgtactcgtgcctcatggatccaaattaaaggtagttattactagtaaaagcggagagatcttgtatcgtatttcaccgtgggcaaagtatgtggttcgtgaaggtgataatgtgaattatgattggatacactgggatccagaacactcatatgagtttaagcattccagaccaaagaagccacggagtctaagaatttatgaatctcatgtgggaatttcttcccatgaaggaaaagtagcttcttataaacattttacatgcaatgtactaccaagaatcaaaggccttggatacaactgcattcagttgatggcaatcatggagcatgcttactatgccagctttggttaccaaatcacaagcttctttgcagcttccagccgttatggaacacctgaagagctacaagaactggtagacacagctcattccatgggtatcatagtcctcttagatgtggtacacagccatgcttcaaaaaattcagcagatggattgaatatgtttgatgggacagattcctgttattttcattctggacctagagggactcatgatctttgggatagcagattgtttgcctactccagctgggaagttttaagattccttctgtcaaacataagatggtggttggaagaatatcgctttgatggatttcgttttgatggtgttacgtccatgctttatcatcaccatggagtgggtcaaggtttctcaggtgattacagtgaatatttcggactacaagtagatgaagatgccttgacttacctcatgttggcaaatcatttggttcacacgctgtgtcccgattctataacaatagctgaggatgtatcaggaatgccagctctgtgctctccaatttcccagggagggggtggttttgactatcgactagccatggcaattccagataagtggattcagctacttaaagagtttaaagatgaagactggaacatgggcgatatagtatacacgctcacaaacaggcgctaccttgaaaagtgcattgcttatgcagagagccatgatcaggcattggttggggataagtcgctggcattttggttgatggatgccgaaatgtatacaaacatgagtgtcctgactccttttactccagttattgatcgtggaatacagcttcataaaatgattcgactcattacgcatgggcttggtggagaaggctatctcaatttcatgggtaatgaatttgggcatcctgaatggttagacttcccaagaaaaggaaataatgagagttaccattatgccaggcggcagtttcatttaactgacgacgaccttcttcgctacaagttcctaaataattttgacagggatatgaatagattggaagaaagatatggttggcttgcagctccacaggcctacgtgagtgaaaaacatgaaggcaataagatcattgcttttgaaagagcaggtcttcttttcattttcaacttccatccaagcaagagctacactgactaccgagttggaacagcattgccagggaaattcaaaattgtgctagattcagatgcagcggaatatggagggcatcagagactggaccacagcactgactttttttctgaggcttttgaacataatgggcgtccctattctcttttggtgtacattccaagcagagtggccctcatccttcagaatgtggatctgccgaattgaagaggcctgatttcagctccaccagatgcagatttgtgttttgttttcttgttatcactgtcacacagcttataacatgtatgcttttcagaatacagttgtctagccaagccatcaagtgtctgaaattcaatattggtttatgcaaatacagcaaacttttatttaagtagatgggagaatatgtttaaaatattaggaatcctagaccatattttcaagtcatcttagcagctaggattctcaaatggaagtgttatatataatatgttaaaaacattttgctttcctggctaattatttgatccttttaaattcaaatttgaatcatttgtcatgtatgattatttctgttaaatgtacacagtatttaagatggatatttggtggctctatttgttctgatatcttttggtctaaattatgaggtaccaagattgtttctttgtttctttttttcaaattgtgtttagaaatactgtaataaatatgcagtagtgatataaagaattatatccaaggtaatataaaagccattacgtatgaactcatccgtgtctcattttgtgttttattttgtgatctcttgtccactaagtatcttgttaaatgccagtatctcagtctttctgaagccctgaaatggtaattgtagcatttcagaaaatgtctttcatttcaatcaataaaaagcttttgtaaaatt

SEQ ID NO: 59845 - DNA, 2997 bp, Homo sapiens
cgtgcgtcccggcatcaccccgggatccgctcctccccgctggcggggggagaaagggcaggaggccttccgtcccggctataaagggccccggaccgccgcggctcgcctcggcttgcctcgacacgcctaggcgccctccggctccgccctagccgccgcgtcccagctagagctccagcgcccgctcaggccccactcgaccctctcgggcctcggctacttggactgcggcggaatatggcggctccgatgactcccgcggctcggcccgaggactacgaggcggcgctcaatgccgccctggctgacgtgcccgaactggccagactcctggagatcgacccgtacttgaagccctacgccgtggacttccagcgcaggtataagcagtttagccaaattttgaagaacattggagaaaatgaaggtggtattgataagttttccagaggctatgaatcatttggcgtccacagatgtgctgatggtggtttatactgcaaagaatgggccccgggagcagaaggagtttttcttactggagattttaatggttggaatccattttcgtacccatacaaaaaactggattatggaaaatgggagctgtatatcccaccaaagcagaataaatctgtactcgtgcctcatggatccaaattaaaggtagttattactagtaaaagcggagagatcttgtatcgtatttcaccgtgggcaaagtatgtggttcgtgaaggtgataatgtgaattatgattggatacactgggatccagaacactcatatgagtttaagcattccagaccaaagaagccacggagtctaagaatttatgaatctcatgtgggaatttcttcccatgaaggaaaagtagcttcttataaacattttacatgcaatgtactaccaagaatcaaaggccttggatacaactgcattcagttgatggcaatcatggagcatgcttactatgccagctttggttaccaaatcacaagcttctttgcagcttccagccgttatggaacacctgaagagctacaagaactggtagacacagctcattccatgggtatcatagtcctcttagatgtggtacacagccatgcttcaaaaaattcagcagatggattgaatatgtttgatgggacagattcctgttattttcattctggacctagagggactcatgatctttgggatagcagattgtttgcctactccagctgggaagttttaagattccttctgtcaaacataagatggtggttggaagaatatcgctttgatggatttcgttttgatggtgttacgtccatgctttatcatcaccatggagtgggtcaaggtttctcaggtgattacagtgaatatttcggactacaagtagatgaagatgccttgacttacctcatgttggcaaatcatttggttcacacgctgtgtcccgattctataacaatagctgaggatgtatcaggaatgccagctctgtgctctccaatttcccagggagggggtggttttgactatcgactagccatggcaattccagataagtggattcagctacttaaagagtttaaagatgaagactggaacatgggcgatatagtatacacgctcacaaacaggcgctaccttgaaaagtgcattgcttatgcagagagccatgatcaggcattggttggggataagtcgctggcattttggttgatggatgccgaaatgtatacaaacatgagtgtcctgactccttttactccagttattgatcgtggaatacagcttcataaaatgattcgactcattacgcatgggcttggtggagaaggctatctcaatttcatgggtaatgaatttgggcatcctgaatggttagacttcccaagaaaaggaaataatgagagttaccattatgccaggcggcagtttcatttaactgacgacgaccttcttcgctacaagttcctaaataattttgacagggatatgaatagattggaagaaagatatggttggcttgcagctccacaggcctacgtgagtgaaaaacatgaaggcaataagatcattgcttttgaaagagcaggtcttcttttcattttcaacttccatccaagcaagagctacactgactaccgagttggaacagcattgccagggaacacagcactgactttttttctgaggcttttgaacataatgggcgtccctattctcttttggtgtacattccaagcagagtggccctcatccttcagaatgtggatctgccgaattgaagaggcctgatttcagctccaccagatgcagatttgtgttttgttttcttgttatcactgtcacacagcttataacatgtatgcttttcagaatacagttgtctagccaagccatcaagtgtctgaaattcaatattggtttatgcaaatacagcaaacttttatttaagtagatgggagaatatgtttaaaatattaggaatcctagaccatattttcaagtcatcttagcagctaggattctcaaatggaagtgttatatataatatgttaaaaacattttgctttcctggctaattatttgatccttttaaattcaaatttgaatcatttgtcatgtatgattatttctgttaaatgtacacagtatttaagatggatatttggtggctctatttgttctgatatcttttggtctaaattatgaggtaccaagattgtttctttgtttctttttttcaaattgtgtttagaaatactgtaataaatatgcagtagtgatataaagaattatatccaaggtaatataaaagccattacgtatgaactcatccgtgtctcattttgtgttttattttgtgatctcttgtccactaagtatcttgttaaatgccagtatctcagtctttctgaagccctgaaatggtaattgtagcatttcagaaaatgtctttcatttcaatcaataaaaagcttttgtaaaatt

SEQ ID NO: 59846 - DNA, 1377 bp, Homo sapiens
ctcgtgccgaattcggcacgctaccttgaaaagtgcattgcttatgcagagagccatgatcaggcattggttggggataagtcgctggcattttggttgatggatgccgaaatgtatacaaacatgagtgtcctgactccttttactccagttattgatcgtggaatacagcttcataaaatgattcgactcattacgcatgggcttggtggagaaggctatctcaatttcatgggtaatgaatttgggcatcctgaatggttagacttcccaagaaaaggaaataatgagagttaccattatgccaggcggcagtttcatttaactgacgacgaccttcttcgctacaagttcctaaataattttgacagggatatgaatagattggaagaaagatatggttggcttgcagctccacaggtcttcttttcattttcaacttccatccaagcaagagctacactgactaccgagttggaacagcattgccagggaaattcaaaattgtgctagattcagatgcagcggaatatggagggcatcagagactggaccacagcactgactttttttctgaggcttttgaacataatgggcgtccctattctcttttggtgtacattccaagcagagtggccctcatccttcagaatgtggatctgccgaattgaagaggcctgatttcagctccaccagatgcagatttgtgttttgttttcttgttatcactgtcacacagcttataacatgtatgcttttcagaatacagttgtctagccaagccatcaagtgtctgaaattcaatattggtttatgcaaatacagcaaacttttatttaagtagatgggagaatatgtttaaaatattaggaatcctagaccatattttcaagtcatcttagcagctaggattctcaaatggaagtgttatatataatatgttaaaaacattttgctttcctggctaattatttgatccttttaaattcaaatttgaatcatttgtcatgtatgattatttctgttaaatgtacacagtatttaagatggatatttggtggctctatttgttctgatatcttttggtctaaattatgaggtaccaagattgtttctttgtttctttttttcaaattgtgtttagaaatactgtaataaatatgcagtagtgatataaagaattatatccaaggtaatataaaagccattacgtatgaactcatccgtgtctcattttgtgttttattttgtgatctcttgtccactaagtatcttgttaaatgccagtatctcagtctttctgaagccctgaaatggtaattgtagcatttcagaaaatgtctttcatttcaatcaataaaaagcttttgtaaaatt

SEQ ID NO: 59847 - DNA, 3000 bp, Homo sapiens
cgtgcgtcccggcatcaccccgggatccgctcctccccgctggcggggggagaaagggcaggaggccttccgtcccggctataaagggccccggaccgccgcggctcgcctcggcttgcctcgacacgcctaggcgccctccggctccgccctagccgccgcgtcccagctagagctccagcgcccgctcaggccccactcgaccctctcgggcctcggctacttggactgcggcggaatatggcggctccgatgactcccgcggctcggcccgaggactacgaggcggcgctcaatgccgccctggctgacgtgcccgaactggccagactcctggagatcgacccgtacttgaagccctacgccgtggacttccagcgcaggtataagcagtttagccaaattttgaagaacattggagaaaatgaaggtggtattgataagttttccagaggctatgaatcatttggcgtccacagatgtgctgatggtggtttatactgcaaagaatgggccccgggagcagaaggagtttttcttactggagattttaatggttggaatccattttcgtacccatacaaaaaactggattatggaaaatgggagctgtatatcccaccaaagcagaataaatctgtactcgtgcctcatggatccaaattaaaggtagttattactagtaaaagcggagagatcttgtatcgtatttcaccgtgggcaaagtatgtggttcgtgaaggtgataatgtgaattatgattggatacactgggatccagaacactcatatgagtttaagcattccagaccaaagaagccacggagtctaagaatttatgaatctcatgtgggaatttcttcccatgaaggaaaagtagcttcttataaacattttacatgcaatgtactaccaagaatcaaaggccttggatacaactgcattcagttgatggcaatcatggagcatgcttactatgccagctttggttaccaaatcacaagcttctttgcagcttccagccgttatggaacacctgaagagctacaagaactggtagacacagctcattccatgggtatcatagtcctcttagatgtggtacacagccatgcttcaaaaaattcagcagatggattgaatatgtttgatgggacagattcctgttattttcattctggacctagagggactcatgatctttgggatagcagattgtttgcctactccagctgggaagttttaagattccttctgtcaaacataagatggtggttggaagaatatcgctttgatggatttcgttttgatggtgttacgtccatgctttatcatcaccatggagtgggtcaaggtttctcaggtgattacagtgaatatttcggactacaagtagatgaagatgccttgacttacctcatgttggcaaatcatttggttcacacgctgtgtcccgattctataacaatagctgaggatgtatcaggaatgccagctctgtgctctccaatttcccagggagggggtggttttgactatcgactagccatggcaattccagataagtggattcagctacttaaagagtttaaagatgaagactggaacatgggcgatatagtatacacgctcacaaacaggcgctaccttgaaaagtgcattgcttatgcagagagccatgatcaggcattggttggggataagtcgctggcattttggttgatggatgccgaaatgtatacaaacatgagtgtcctgactccttttactccagttattgatcgtggaatacagcttcataaaatgattcgactcattacgcatgggcttggtggagaaggctatctcaatttcatgggtaatgaatttgggcatcctgaatggttagacttcccaagaaaaggaaataatgagagttaccattatgccaggcggcagtttcatttaactgacgacgaccttcttcgctacaagttcctaaataattttgacagggatatgaatagattggaagaaagatatggttggcttgcagctccacaggcctacgtgagtgaaaaacatgaaggcaataagatcattgcttttgaaagagcaggtcttcttttcattttcaacttccatccaagcaagagctacactgactaccgagttggaacagcattgccagggaaattcaaaattgtgctagattcagatgcagcggaatatggagggcatcagagactggaccacagcactgactttttttctgaggcttttgaacataatgggcgtccctattctcttttggtaagtaagtttctcaacatatttcctatgcagatttgtgttttgttttcttgttatcactgtcacacagcttataacatgtatgcttttcagaatacagttgtctagccaagccatcaagtgtctgaaattcaatattggtttatgcaaatacagcaaacttttatttaagtagatgggagaatatgtttaaaatattaggaatcctagaccatattttcaagtcatcttagcagctaggattctcaaatggaagtgttatatataatatgttaaaaacattttgctttcctggctaattatttgatccttttaaattcaaatttgaatcatttgtcatgtatgattatttctgttaaatgtacacagtatttaagatggatatttggtggctctatttgttctgatatcttttggtctaaattatgaggtaccaagattgtttctttgtttctttttttcaaattgtgtttagaaatactgtaataaatatgcagtagtgatataaagaattatatccaaggtaatataaaagccattacgtatgaactcatccgtgtctcattttgtgttttattttgtgatctcttgtccactaagtatcttgttaaatgccagtatctcagtctttctgaagccctgaaatggtaattgtagcatttcagaaaatgtctttcatttcaatcaataaaaagcttttgtaaaatt

SEQ ID NO: 59848 - DNA, 1717 bp, Homo sapiens
cgtgcgtcccggcatcaccccgggatccgctcctccccgctggcggggggagaaagggcaggaggccttccgtcccggctataaagggccccggaccgccgcggctcgcctcggcttgcctcgacacgcctaggcgccctccggctccgccctagccgccgcgtcccagctagagctccagcgcccgctcaggccccactcgaccctctcgggcctcggctacttggactgcggcggaatatggcggctccgatgactcccgcggctcggcccgaggactacgaggcggcgctcaatgccgccctggctgacgtgcccgaactggccagactcctggagatcgacccgtacttgaagccctacgccgtggacttccagcgcaggtataagcagtttagccaaattttgaagaacattggagaaaatgaaggtggtattgataagttttccagaggctatgaatcatttggcgtccacagatgtgctgatggtggtttatactgcaaagaatgggccccgggagcagaaggagtttttcttactggagattttaatggttggaatccattttcgtacccatacaaaaaactggattatggaaaatgggagctgtatatcccaccaaagcagaataaatctgtactcgtgcctcatggatccaaattaaaggtagttattactagtaaaagcggagagatcttgtatcgtatttcaccgtgggcaaagtatgtggttcgtgaaggtgataatgtgaattatgattggatacactgggatccagaacactcatatgagtttaagcattccagaccaaagaagccacggagtctaagaatttatgaatctcatgtgggaatttcttcccatgaaggaaaagtagcttcttataaacattttacatgcaatgtactaccaagaatcaaaggccttggatacaactgcattcagttgatggcaatcatggagcatgcttactatgccagctttggttaccaaatcacaagcttctttgcagcttccagccgttatggaacacctgaagagctacaagaactggtagacacagctcattccatgggtatcatagtcctcttagatgtggtacacagccatgcttcaaaaaattcagcagatggattgaatatgtttgatgggacagattcctgttattttcattctggacctagagggactcatgatctttgggatagcagattgtttgcctactccagctgggaagttttaagattccttctgtcaaacataagatggtggttggaagaatatcgctttgatggatttcgttttgatggtgttacgtccatgctttatcatcaccatggagtgggtcaaggtttctcaggtgattacagtgaatatttcggactacaagtagatgaagatgccttgacttacctcatgttggcaaatcatttggttcacacgctgtgtcccgattctataacaatagctgaggatgtatcaggaatgccagctctgtgctctccaatttcccagggagggggtggttttgactatcgactagccatggcaattccagataagtggattcagctacttaaagagtttaaagatgaagactggaacatgggcgatatagtatacacgctcacaaacaggcgctaccttgaaaagtgcattgcttatgcagagagccatgatcaggtaaatgaatatgtgcataaattcatttatt

SEQ ID NO: 59849 - DNA, 2181 bp, Homo sapiens
ccatcagttcctccttgtgggtccgaggcgctctgccgccggcccctcctcacttcttcctccctggggatggatccaagctattgtcctgcccatggcttcccatctcaggaccctctctggccgctatcatcccagcagtggagttcagcccactactctgaaccagccgcaggtggctgcgatgggacggaagccatgaatggtgccggccctggccccgccgcagccgccccggtcccagtcccggtcccggtcccggactggcggcagttctgcgagctgcatgcgcaggcggccgccgtggactttgcgcacaagttctgccgtttcctgcgggacaacccagcttacgacacgcccgacgccggcgcctccttctcccgccacttcgccgccaacttcctggacgtcttcggcgaggaggtgcgccgcgtgctggtggctgggccgacgactcggggcgcggccgtgagcgcagaggccatggagccggagctcgcggacacctctgcactcaaggcggcgccctacggccactcgcggagctcggaggacgtgtccacgcacgcggccaccaaggcccgcgttcgcaagggcttctcgctgcgcaacatgagcctgtgcgtggtggacggcgtgcgcgacatgtggcaccggcgcgcctcgcccgagcccgacgcggcagctgccccgcgcaccgccgagccccgcgacaagtggacgcggcgcctgaggctgtcgcggacgctggctgccaaggtggagctggtggacattcaacgcgagggggcgctgcgcttcatggtggccgacgacgcggccgcgggctccgggggctcggctcagtggcagaagtgccgcctgctcctgcgcagggctgtggccgaggaacgcttccgcctggagttcttcgtgccgcccaaagcctccaggcccaaggtcagcatcccactgtcagccatcattgaggtccgcaccaccatgcccctggaaatgccagagaaggataacacattcgtcctcaaggtagagaatggagccgaatacatcttggagaccatcgactctctgcagaagcactcgtgggtagctgacatccagggctgcgtggaccccggtgacagtgaggaagacaccgagctctcctgtacccgaggaggctgtctggccagccgcgtggcctcctgcagctgtgagctcctgactgatgcagtcgacctgccccgccccccagagacgacagccgtgggtgcagtggtgacagccccccacagccgaggtcgagatgccgtcagagaatccctgatccacgtcccgctagagacctttctgcagaccctggaatccccgggcggcagcggcagtgacagcaataacacaggggaacagggtgcagagacggatcccgaggctgaacccgagctggagctatccgactacccatggttccacgggacactgtcccgggtcaaggctgctcaactggttctggcaggggggccccggaaccacggcctcttcgtgatccgccaaagtgagactcggcctggggagtacgtgctgaccttcaacttccagggcaaggccaagcacctgcgcctgtccctgaacggccacggccagtgtcacgtacagcatctgtggttccagtctgtgcttgacatgctccgccacttccacacacaccccatcccactggagtcagggggctcggccgacatcacccttcgcagctatgtgcgggcccaggaccccccaccagagccgggccccacgccccctgccgcgcccgcgtccccggcctgctggagcgactcgcccggccagcactacttctccagcctcgccgcggccgcctgcccgcctgcctcgccctccgacgccgccggcgcctcctcgtcttccgcctcgtcgtcctctgccgcgtcggggcccgcccccccgcgccccgtcgagggccagctcagcgcgcggagccgcagcaacagcgccgagcgcctgctggaggccgtggccgccaccgccgccgaggagcccccggaggccgcgcccggccgcgcgcgcgccgtggagaaccagtactccttctactagcccgcggcgccgcccgggtgggacacgccaagctcttcagtgaagacacgatgttattaaaagcctgttttagggactgcaaaa

SEQ ID NO: 59850 - DNA, 1241 bp, Homo sapiens
taggctagacaggccggtggttagcggcgagggtccgcaccaccatgcccctggaaatgccagagaaggataacacattcgtcctcaaggtagagaatggagccgaatacatcttggagaccatcgactctctgcagaagcactcgtgggtagctgacatccagggctgcgtggaccccggtgacagtgaggaagacaccgagctctcctgtacccgaggaggctgtctggccagccgcgtggcctcctgcagctgtgagctcctgactgatgcagtcgacctgccccgccccccagagacgacagccgtgggtgcagtggtgacagccccccacagccgaggtcgagatgccgtcagagaatccctgatccacgtcccgctagagacctttctgcagaccctggaatccccgggcggcagcggcagtgacagcaataacacaggggaacagggtgcagagacggatcccgaggctgaacccgagctggagctatccgactacccatggttccacgggacactgtcccgggtcaaggctgctcaactggttctggcaggggggccccggaaccacggcctcttcgtgatccgccaaagtgagactcggcctggggagtacgtgctgaccttcaacttccagggcaaggccaagcacctgcgcctgtccctgaacggccacggccagtgtcacgtacagcatctgtggttccagtctgtgcttgacatgctccgccacttccacacacaccccatcccactggagtcagggggctcggccgacatcacccttcgcagctatgtgcgggcccaggaccccccaccagagccgggccccacgccccctgccgcgcccgcgtccccggcctgctggagcgactcgcccggccagcactacttctccagcctcgccgcggccgcctgcccgcctgcctcgccctccgacgccgccggcgcctcctcgtcttccgcctcgtcgtcctctgccgcgtcggggcccgcccccccgcgccccgtcgagggccagctcagcgcgcggagccgcagcaacagcgccgagcgcctgctggaggccgtggccgccaccgccgccgaggagcccccggaggccgcgcccggccgcgcgcgcgccgtggagaaccagtactccttctactagcccgcggcgccgcccgggtgggacacgccaagctcttcagtgaagacacgatgttattaaaagcctgttttagggactgcaaaa

SEQ ID NO: 59851 - DNA, 1423 bp, Homo sapiens
ccatcagttcctccttgtgggtccgaggcgctctgccgccggcccctcctcacttcttcctccctggggatggatccaagctattgtcctgcccatggcttcccatctcaggaccctctctggccgctatcatcccagcagtggagttcagcccactactctgaaccaggcctccaggcccaaggtcagcatcccactgtcagccatcattgaggtccgcaccaccatgcccctggaaatgccagagaaggataacacattcgtcctcaaggtagagaatggagccgaatacatcttggagaccatcgactctctgcagaagcactcgtgggtagctgacatccagggctgcgtggaccccggtgacagtgaggaagacaccgagctctcctgtacccgaggaggctgtctggccagccgcgtggcctcctgcagctgtgagctcctgactgatgcagtcgacctgccccgccccccagagacgacagccgtgggtgcagtggtgacagccccccacagccgaggtcgagatgccgtcagagaatccctgatccacgtcccgctagagacctttctgcagaccctggaatccccgggcggcagcggcagtgacagcaataacacaggggaacagggtgcagagacggatcccgaggctgaacccgagctggagctatccgactacccatggttccacgggacactgtcccgggtcaaggctgctcaactggttctggcaggggggccccggaaccacggcctcttcgtgatccgccaaagtgagactcggcctggggagtacgtgctgaccttcaacttccagggcaaggccaagcacctgcgcctgtccctgaacggccacggccagtgtcacgtacagcatctgtggttccagtctgtgcttgacatgctccgccacttccacacacaccccatcccactggagtcagggggctcggccgacatcacccttcgcagctatgtgcgggcccaggaccccccaccagagccgggccccacgccccctgccgcgcccgcgtccccggcctgctggagcgactcgcccggccagcactacttctccagcctcgccgcggccgcctgcccgcctgcctcgccctccgacgccgccggcgcctcctcgtcttccgcctcgtcgtcctctgccgcgtcggggcccgcccccccgcgccccgtcgagggccagctcagcgcgcggagccgcagcaacagcgccgagcgcctgctggaggccgtggccgccaccgccgccgaggagcccccggaggccgcgcccggccgcgcgcgcgccgtggagaaccagtactccttctactagcccgcggcgccgcccgggtgggacacgccaagctcttcagtgaagacacgatgttattaaaagcctgttttagggactgcaaaa

SEQ ID NO: 59852 - DNA, 2220 bp, Homo sapiens
ttggagcgcgcggagctcggctgccagagagccgcgcgggggacgcgccgggaccgcgaggagcgcaggagccttcgaggcggtgaacgagggagggagcccagtccgccgcgggccatgagccaccgggcccggggagcccggccgcggtccgggcagcgctcagccggcgccccagcccgctcggccgcagctgcgcgcctgtatgccgcaggtggctgcgatgggacggaagccatgaatggtgccggccctggccccgccgcagccgccccggtcccagtcccggtcccggtcccggactggcggcagttctgcgagctgcatgcgcaggcggccgccgtggactttgcgcacaagttctgccgtttcctgcgggacaacccagcttacgacacgcccgacgccggcgcctccttctcccgccacttcgccgccaacttcctggacgtcttcggcgaggaggtgcgccgcgtgctggtggctgggccgacgactcggggcgcggccgtgagcgcagaggccatggagccggagctcgcggacacctctgcactcaaggcggcgccctacggccactcgcggagctcggaggacgtgtccacgcacgcggccaccaaggcccgcgttcgcaagggcttctcgctgcgcaacatgagcctgtgcgtggtggacggcgtgcgcgacatgtggcaccggcgcgcctcgcccgagcccgacgcggcagctgccccgcgcaccgccgagccccgcgacaagtggacgcggcgcctgaggctgtcgcggacgctggctgccaaggtggagctggtggacattcaacgcgagggggcgctgcgcttcatggtggccgacgacgcggccgcgggctccgggggctcggctcagtggcagaagtgccgcctgctcctgcgcagggctgtggccgaggaacgcttccgcctggagttcttcgtgccgcccaaagcctccaggcccaaggtcagcatcccactgtcagccatcattgaggtccgcaccaccatgcccctggaaatgccagagaaggataacacattcgtcctcaaggtagagaatggagccgaatacatcttggagaccatcgactctctgcagaagcactcgtgggtagctgacatccagggctgcgtggaccccggtgacagtgaggaagacaccgagctctcctgtacccgaggaggctgtctggccagccgcgtggcctcctgcagctgtgagctcctgactgatgcagtcgacctgccccgccccccagagacgacagccgtgggtgcagtggtgacagccccccacagccgaggtcgagatgccgtcagagaatccctgatccacgtcccgctagagacctttctgcagaccctggaatccccgggcggcagcggcagtgacagcaataacacaggggaacagggtgcagagacggatcccgaggctgaacccgagctggagctatccgactacccatggttccacgggacactgtcccgggtcaaggctgctcaactggttctggcaggggggccccggaaccacggcctcttcgtgatccgccaaagtgagactcggcctggggagtacgtgctgaccttcaacttccagggcaaggccaagcacctgcgcctgtccctgaacggccacggccagtgtcacgtacagcatctgtggttccagtctgtgcttgacatgctccgccacttccacacacaccccatcccactggagtcagggggctcggccgacatcacccttcgcagctatgtgcgggcccaggaccccccaccagagccgggccccacgccccctgccgcgcccgcgtccccggcctgctggagcgactcgcccggccagcactacttctccagcctcgccgcggccgcctgcccgcctgcctcgccctccgacgccgccggcgcctcctcgtcttccgcctcgtcgtcctctgccgcgtcggggcccgcccccccgcgccccgtcgagggccagctcagcgcgcggagccgcagcaacagcgccgagcgcctgctggaggccgtggccgccaccgccgccgaggagcccccggaggccgcgcccggccgcgcgcgcgccgtggagaaccagtactccttctactagcccgcggcgccgcccgggtgggacacgccaagctcttcagtgaagacacgatgttattaaaagcctgttttagggactgcaaaa

SEQ ID NO: 59853 - DNA, 952 bp, Homo sapiens
attctctttccttttttaaaggtttaattttccatgataaataaaaatctataaaataataaacaagagaaaagagattggaaacagccaggttggagcagtgagtgagtaaggaaacctggctgccctctccagattccccaggctctcagagaagatcagcagaaagtctgcaagaccctaagaaccatcagccctcagctgcacctcctcccctccaaggatgacaaaggcgctactcatctatttggtcagcagctttcttgccctaaatcaggccagcctcatcagtcgctgtgacttggcccaggtgctgcagctggaggacttggatgggtttgagggttactccctgagtgactggctgtgcctggcttttgtggaaagcaagttcaacatatcaaagataaatgaaaatgcagatggaagctttgactatggcctcttccagatcaacagccactactggtgcaacgattataagagttactcggaaaacctttgccacgtagactgtcaagatctgctgaatcccaaccttcttgcaggcatccactgcgcaaaaaggattgtgtccggagcacgggggatgaacaactgggtagaatggaggttgcactgttcaggccggccactcttctactggctgacaggatgccgcctgagatgaaacagggtgcgggtgcaccgtggagtcattccaagactcctgtcctcactcagggattcttcatttcttcttcctactgcctccacttcatgttattttcttcccttcccatttacaactaaaactgaccagagccccaggaataaatggttttcttggcttcctccttactcccatctggacccagtcccctggttcctgtctgttatttgtaaactgaggaccacaataaagaaatctttatatttatcgaaatattaaagcactcgctctgcaaaaaat

SEQ ID NO: 59854 - DNA, 871 bp, Homo sapiens
attctctttccttttttaaaggtttaattttccatgataaataaaaatctataaaataataaacaagagaaaagagattggaaacagccaggttggagcagtgagtgagtaaggaaacctggctgccctctccagattccccaggctctcagagaagatcagcagaaagtctgcaagaccctaagaaccatcagccctcagctgcacctcctcccctccaaggatgacaaaggcgctactcatctatttggtcagcagctttcttgccctaaatcaggccagcctcatcagtcgctgtgacttggcccaggtgctgcagctggaggacttggatgggtttgagggttactccctgagtgactggctgtgcctggcttttgtggaaagcaagttcaacatatcaaagataaatgaaaatgcagatggaagctttgactatggcctcttccagatcaacagccactactggtgcaacgattataagagttactcggaaaacctttgccacgtagactgtcaaggcatccactgcgcaaaaaggattgtgtccggagcacgggggatgaacaactggtgaggaggacacggtgggactcagcgggcagagccccacgaaggaggacgtgacagagaaaagggtagaatggaggttgcactgttcaggccggccactcttctactggctgacaggatgccgcctgagatgaaacagggtgcgggtgcaccgtggagtcattccaagactcctgtcctcactcagggattcttcatttcttcttcctactgcctccacttcatgttattttcttcccttcccatttacaactaaaactgaccagagccccaggaataaatggttttcttggcttcc

SEQ ID NO: 59855 - DNA, 834 bp, Homo sapiens
attctctttccttttttaaaggtttaattttccatgataaataaaaatctataaaataataaacaagagaaaagagattggaaacagccaggttggagcagtgagtgagtaaggaaacctggctgccctctccagattccccaggctctcagagaagatcagcagaaagtctgcaagaccctaagaaccatcagccctcagctgcacctcctcccctccaaggatgacaaaggcgctactcatctatttggtcagcagctttcttgccctaaatcaggccagcctcatcagtcgctgtgacttggcccaggtgctgcagctggaggacttggatgggtttgagggttactccctgagtgactggctgtgcctggcttttgtggaaagcaagttcaacatatcaaagataaatgaaaatgcagatggaagctttgactatggcctcttccagatcaacagccactactggtgcaacgattataagagttactcggaaaacctttgccacgtagactgtcaagatctgctgaatcccaaccttcttgcaggcatccactgcgcaaaaaggattgtgtccggagcacgggggatgaacaactgggtagaatggaggttgcactgttcaggccggccactcttctactggctgacaggatgccgcctgagatgaaacagggtgcgggtgcaccgtggagtcattccaagactcctgtcctcactcagggattcttcatttcttcttcctactgcctccacttcatgttattttcttcccttcccatttacaactaaaactgaccagagccccaggaataaatggttttcttggcttcc

SEQ ID NO: 59856 - DNA, 443 bp, Homo sapiens
tgctccatatgcgagactcaccaagaactgggtcatgtgtgtggaagagttactgagtgtgaggcaagaaccatgtcttttttctccgcagggtagaatggaggttgcactgttcaggccggccactcttctactggctgacaggatgccgcctgagatgaaacagggtgcgggtgcaccgtggagtcattccaagactcctgtcctcactcagggattcttcatttcttcttcctactgcctccacttcatgttattttcttcccttcccatttacaactaaaactgaccagagccccaggaataaatggttttcttggcttcctccttactcccatctggacccagtcccctggttcctgtctgttatttgtaaactgaggaccacaataaagaaatctttatatttatcgaaatattaaagcactcgctctgcaaaaaat

SEQ ID NO: 59857 - DNA, 796 bp, Homo sapiens
ggagtttaaagatacagaaaccacaaagtggacggagtccagggactctagtctgtcagaaagaagtaacataggaatgatgtgtgacatccctgagattaggggacttgcccagatgatctgagggcatattttgtgctgttgtagaaaatgtagggcatagtcagagaagttattctgaagcaagaaaaatttagagtaggattacactgagccttagttgaattcattttcacctcagttctcatttgcatatgtatactgctcacttttctccctttttttttccttccttggccctctaatacttgagtacttcctctttctaaactatacctggccagtaaagcattcttttcagaaaggtgaaagtcactagcatatttctttagtaggaattaaagatatagaaaccacaaagtggacagagttcagagactccagtccctcagaaagaagtaacataggaatgatgtgtgacatgcctgaggtcagggaacttgcccaaatgatctgaggggatgttttgtgctgttgtagaaaatatttagcttgctaaacattgttgcacctctttcaagtaattttcgaactttgcttgatgtttcttctatataaagaccctcttgcaccagcatttgcagaattaaattccttaggtttgtttctttcatatcaactctttaatacagtattactgttttaaagaagtatctgcactgttttatgtatatcttgaactaataaaaattccaacgtcaaaagttttgaacctcttggttctttatactcttta

SEQ ID NO: 59858 - DNA, 422 bp, Homo sapiens
gaagaggacgttatttaaacattgtaggggtgaagtatgatttatgatactgatgggaaaacacataataatggaaaatttcaaagtgttttatatctagtataataagtaatatgttttccttttaaatgcttgaaaataaagaggcgttggggcatggtggctcaagcctgtaatcccagcactttgggaggccgaggcgggtggatcacctgaggtcaggagttcgagaccagcctggccaacatggtgaaaccccatctctactaaaatacaaaaatgagctgagtgtagaggcaggtgcctataatccccactactctcgaggctgaggcaggagaatctcttgaacccggggggcggagtgaagtaagcgccacttcactccggcctggatgaaagagcgaaactccgtctcaaaa

SEQ ID NO: 59859 - DNA, 309 bp, Homo sapiens
tctcctacatatgaaaaaaatctctattgtatatgtataattattttttatcttaaatttactaccctgcagtacatttttatttataataactgctataagtaattttcaatttggattcttttaacagtctagacttagttctacaaacttattaaacaatctttcaaacttatttggataatagaaaaatatgttaaatggtaccatagtgaaaaatgaatactacctagtttatctttttaatgagtttctactctctctaagtcaaattcgatagtgatacattagtcaatgtatctagtatag

SEQ ID NO: 59860 - DNA, 275 bp, Homo sapiens
taataagccagttctaaaatttatatactagactaaaaggacaagaatagccaagtcactcctgaaaaagaagagcaggaaggtaagatttcccctacaaataggaggacttattatgaagcttacagcactttagaaagcataggagaacaactgaattgttcagtggaataaaattcagccaccatgcccagcctagacttggttcttttggttttatggtaaagtagaaccttgaaggaagttccatctgattaatgactagttaaatgttt

SEQ ID NO: 59861 - DNA, 669 bp, Homo sapiens
ttttttttttaaaaaggagaatctctaatgtggaatttcaaacagtgaatagataaagaagctatttggaggaaatccaaaggcatttctcagctgctgaactgaaatatctagggcccattccacccacgggtaaagctgaccctgagagaaccttttataatagagccatgagttttaatcttaagataggtgcctattaattctgaatattcagttttaaaagaactagaaaaccacactaatgcttagagaaaagctaataatgcttcccatttctcccaagaactatttctaccagctcattcccagggggatatagaggagtaggggcatttcttccaccagttaaatatctttgcaaaagaaaatcatgttacattcacctaagggatttaatcccaagaactttttcccctaaatttaatatgcgaattgctcccaacttgagagaactaggatttgtagatactaaagaagcaaatcagaaattaagctgcttggatttaccagttattgatctggtattattccctggggaaactactcaaacattttcttgctcactctcaccttctatagaaaataaaagtgctaaaaaatttttcttacagatttttctaagtggctgtacatttcccttaaaaatctttgaaagataaagctact

SEQ ID NO: 59862 - DNA, 731 bp, Homo sapiens
gggtagtggacaaatgatagtattatagttttcactatgctcatctttaaataacaatcttggggtagtgtaaaggacacacaattatcgtgacttctgtttgacccataagagaaatgcatattcgggttgtacttttctcaaatgactacaaccaccaatactttacataactcttgactttttagggcagggcatttagctttaaaatactcccattgagggaaaaataatatttaccctaatttcctccctctgtcccttttcgcttctatctaaccaatctgcgtgcttttatgtattttttttttttttttggaacttattttctatctggaatgcttatctaaacaaagagttagatggccttgataagtgagactaatggaatcgtttccctctaacttcataaaaactttaaggattatctttcttgagttctctgtatttctgttttagaagaaaagaacaaaatttcagaaacaagattatagtgcttttgctaaagtataaatacgtgggccctatacaaactggcaaattcattagtcttaaagcagacatccaagctattgtgggtgtttggatgacaccattttcacagtaggaaatcatttcattctgagcgtggactcggcattggttaacgcagtgagttttatgtggtataaacacctggaagtgagagaaaagacagcacagaagctctgtgggagctctgctgagcattg

SEQ ID NO: 59863 - DNA, 212 bp, Homo sapiens
cccggcctgaagttgtcggtcgcccttttgacttgcagcagggcgggcagagcgacttagaggaaaagtgactttttgtaccctcctgcagggagcaggttctctgtccttgtttaattagacatttctcagagaatcctgcctctgctctgaagcctttctgttcgctccagtgaaaattagtcatccaccgggcgcggtggctcacgcct

SEQ ID NO: 59864 - DNA, 421 bp, Homo sapiens
gcactaactaaacatggtgataccatctactgacatggggtgactggaagaaacacggtggcaaagaggaaaaggaaaaaaataaaaagaaaaatcaagcttatcctctctcatcctagtcaactcttaacctacccttcaaagctcaacttagatattaactcctccaagacgccttcccagatccccagactagtttaggaaagatattcaagtactaccattgtattttgtacatatccctatcactgccttcccatattgttttacaattatctgtttacaattttcttcctaactagctaatagtcctcttttgttacggaaggtgtcttgttcattttgatattatcaggacgtaacacaaaacaggtactcggtaaatatttctgaatttaataaatcaattagcataaactta

SEQ ID NO: 59865 - DNA, 1307 bp, Homo sapiens
ggaataagggctgtcactagctgtctggtatcttgccctggggtgattacagcaggtggatagtggcctggagtgtgagaatctgataaaggaggtagttggaatatggtttatatcagttggtttgcattcgaaaagtgcatttgtgggcaagttgctgtatctctaggagaggcaggccctccaggattagcaaaacctcagatgttaaagcatgcagaaaataaaagacatggttcaaatagttccctaacaagcagttgtgcaatgctgctctgaatggaaatccaacctcacagtttcccatctagaaagaattttaaactctctattctgtcttccacatacacgttccctcccactgttatagcatctgagaatctgcttgagctctggatcttcatccaatctcctgattaagatttcaaactggccaggtgcagtggctcacacctgtaatcccagcactttgggaggctgaggcatgtggattgctcgaggccaggagtttgagaccagcctggacaacatggcgaaaccccgtctctacgaaacatacacaaattagttgggtgtggtggcggcgagtgcctgcagtcccagctacttgggaggctgaggtgggagaatctgtggaacccaggaggcggaggttgcagtgagttgagattgcaccactgcactccagcctgggaaacagagcaagaccctgtcttaaaaaaaaaaaattcagactgagcctcacagtgggacactaggtcggtgtcagcccacagtcctactagagtgctgtcctgcgatcaggcctctttgggtctggctatgctgtcagctgagattctgcccaggatcctgtcactcacatgttgtcccagcttgttctcaatgtggcagccccaaatgacagccaaagttcttccctaattgcctactttacaggaatcctgtccaaaaatggaaacacgggcattcagcagcccttgctctccctcagcccctcccctgacagccactgatctgttcttcatccctacacttttgattttttccagagtgtcatataaatggaatcgtgcaatatttagccttttgattctggctttctttagtcagcataatgcctctgagattcattcactttgttgcatgtgttaatatttagttgcttttcgttgctgagtaatataccactgtatggatggaccacactgtgtttatcccttcccctgttaaaggctggttgagtcgcttccagtttgggggcgattatgaataaagctgttgtaagcattcgtgtacaggttttt

SEQ ID NO: 59866 - DNA, 1153 bp, Homo sapiens
  misc_feature (458)..(458): n is a, c, g, or t
ggcattgccagatcagcattgggtggaggcagggtggggatgccacacaggatgggatgtctagagcgggctgtgtctcccggggggatgggcagagggtggggcaggaattagctggaaatgagattgtggggtgcagtttggggatcagatgccccaacctgaactgaccgtcatccctgtggccaggtccccacacaaccctcacccctggctgtgagaatcctgaggcaccttgatgcattttttttcatgccctgtgacaggtgctttgtgctgccagctcacttaaaggggcagagttctaggaacaaaataggggaaaagcacagccccgcctcgacagcaggccccaggtagggggcgatgtggagggaggcccgcctcaggaggagcccccggggtgggggggtgaagcagagggaggccacccctagcaaaggctggcagttcagggnacggcccccaggggccttggcactttattttttattacttgttttttttttttgagattgcaccactgcactccagcctgggaaacagagcaagaccctgtcttaaaaaaaaaaaattcagactgagcctcacagtgggacactaggtcggtgtcagcccacagtcctactagagtgctgtcctgcgatcaggcctctttgggtctggctatgctgtcagctgagattctgcccaggatcctgtcactcacatgttgtcccagcttgttctcaatgtggcagccccaaatgacagccaaagttcttccctaattgcctactttacaggaatcctgtccaaaaatggaaacacgggcattcagcagcccttgctctccctcagcccctcccctgacagccactgatctgttcttcatccctacacttttgattttttccagagtgtcatataaatggaatcgtgcaatatttagccttttgattctggctttctttagtcagcataatgcctctgagattcattcactttgttgcatgtgttaatatttagttgcttttcgttgctgagtaatataccactgtatggatggaccacactgtgtttatcccttcccctgttaaaggctggttgagtcgcttccagtttgggggcgattatgaataaagctgttgtaagcattcgtgtacaggttttt

SEQ ID NO: 59867 - DNA, 922 bp, Homo sapiens
agtagagaggtgctgaagcccatcatcatgagtgcttgtgacctgggcacacacaccatcatacacacacctcctacatagacccctcttctaccgggacagggagccaaattgattagtgtctatcactgcaggaaatagtggcttggaaatggacatgctccaggaccttgagtccctgcagtttgagtatggggttccagaggaagatcgtatctggctgtatttgcagggccgttctcggggactgatgatcgaggcttgtgcccatgcaaccttcttctgcaaactattatataatttgagagcatcattaaataagaatcaaagttccagacatctctcaattggctcccttaattcagccactcctgaagagtttaaggtgggcatcattggaggtggccaccttgggaagcagctggctggcacactgctgcagcttggccccatccctgctgaaagcctgcggatctccactcggaggccagagactctgggtgagctccagaagctgggaatcaaatgcttttaccataacgctgatctggtgagttgggccgatgtgatattcctctgctgcttgccgtctcagctgcctaatatctgcgtagaaatttacaccagccttgagaaggccagcattgtgtacagctttgtagctgccatcccactacccaggctgaaactactgttgaaccacaccaatatcttgcggcctcagtatcagtatgatgaagattctgtcagcgtctggggggccaataagggagtcatagctgctctccaagatcctacgattcttcaagctacctgtccctacagtcctgctggtcacggctcaacatatttctggcattcttttgaaaattactttcctgttggcccattgctatcttattaaatcaatctctctctcaaa

SEQ ID NO: 59868 - DNA, 834 bp, Homo sapiens
tccaggatcagaagtactgaggagcagagccaatcttctctgtttggaaatagtggcttggaaatggacatgctccaggaccttgagtccctgcagtttgagtatggggttccagaggaagatcgtatctggctgtatttgcagggccgttctcggggactgatgatcgaggcttgtgcccatgcaaccttcttctgcaaactattatataatttgagagcatcattaaataagaatcaaagttccagacatctctcaattggctcccttaattcagccactcctgaagagtttaaggtgggcatcattggaggtggccaccttgggaagcagctggctggcacactgctgcagcttggccccatccctgctgaaagcctgcggatctccactcggaggccagagactctgggtgagctccagaagctgggaatcaaatgcttttaccataacgctgatctggtgagttgggccgatgtgatattcctctgctgcttgccgtctcagctgcctaatatctgcgtagaaatttacaccagccttgagaaggccagcattgtgtacagctttgtagctgccatcccactacccaggctgaaactactgttgaaccacaccaatatcttgcggcctcagtatcagtatgatgaagattctgtcagcgtctggggggccaataagggagtcatagctgctctccaagatcctacgattcttcaagctacctgtccctacagtcctgctggtcacggctcaacatatttctggcattcttttgaaaattactttcctgttggcccattgctatcttattaaatcaatctctctctcaaa

SEQ ID NO: 59869 - DNA, 432 bp, Homo sapiens
tgctaagtacagcggtcaggaggagggaagctgaccttgaatcagcaccttagtagaattccctgattgatatgctttgcgtccccctcccttatcagccctctgaacgtatctctaacacagcaggaaccatcgctgtgtttcctgtcagtctccccagctggtatgagaactatccaagagcagaagccttatctaatttgtatttctctccagagcacctaccacagtacctggcacatagctgtttgatcaaagcttgctacactgaactaaactgcagtccagatcctttggataatttatgcaagatcacaaagctaagaggtaaaaccggctcaggacccagagctctgactcattcattctcctgcactggtgactgttgatttttcctagaggagactagctctggaggtgcaagcagtcatc

SEQ ID NO: 59870 - DNA, 372 bp, Homo sapiens
gcagtgatactgaaatgtaactggacaggtcagagaaaacttccttgataaggtgacatataaactgaatattcatgggcttgaacatataaaagtggaaggagggggatttcaggaggggcagagtgagaaaaagaaaaatgaaaaagaaagaggcagaaaaacttagtgcacattttagtttgtcactagggtttttggaggttcaaggtgagattttgattattgaatcctccacctacccctcctgccttctgggattctggactgatgcattatttataaaaatgtatagaagccaacagggaaataaagtactgtttaaaaggtggacaaaggctggatagccctcaatgtctgactttttcaatg

SEQ ID NO: 59871 - DNA, 1335 bp, Homo sapiens
ccacgaggctgcttgagcttcctgggtcctgctccttggcagccaatggagttgcaggatcagtcttggaaccttactgttttgggcccaaagactcctaagaggccagagttggaggaccttaaattttcagatctatgtacttcaaaatgttagattgaattttaaaacctcagagtcacagactgggcttcccagaatcttgtaaccattaacttttacgtctgtagtacacagagccacaggacttcagaacttggaaaatatgaagtttagacttttacaatcagttgtaaaagaatgcaaattctttgaatcagccatataacaataaggccatttaaaagtattaatttaggcgggccgcggtggctcacgcctgtaatcctagcactttgggaggccaaggcaggtggatcatgaggtcaggagatcgagaccatcctggctaacacggtgaaaccccgtctctactaaaaatacaaaaaaattagccgggcatggtggcgggcgcttgcggtcccagctacttgggaggcgaggcaggagaatggcatgaacccgggaggcggagcttgcagtgagccgagatcatgccactgcactccagcctgggcgacagagcaagactccgtctcaaaaaaaaaaaaaaaaaagtatttatttaggccgggtgtggtggctcacgcctgtaattccagtgctttgggaggatgaggtgggtggatcccctgaggtcaggagttcgagaccagcctgaccaacgtggagaaacctcatctctactaaaaaacaaaattagccaggcgtggtggcatatacctgtaatcccagctactcaggaggctgaggcaggagaatcagaacccaggagggggaggttgtggtgagctgagatcgtgccattgcattccagcctgggcaacaagagtgaaacttcatctcaaaaaaaaaaaaaaaaaagtactaatttacaggctgggcatggtggctcacgcttggaatcccagcactttgggaggctgaagtggacggattgcttcagcccaggagttcaagaccagcctgagcaacataatgagaccctgtctctacaaaaaattgaaaaaatcgtgccaggcatggtggtctgtgcctgcagtcctagctactcaggagtctgaagtaggagaatcacttgagcctggagtttgaggcttcagtgagccatgatagattccagcctaggcaacaaagtgagacctggtctcaacaaaagtattaattacacaaataatgcattgcttatcacaagtaaattagaaaatacagataaggaaaaggaagttgatatct

SEQ ID NO: 59872 - DNA, 413 bp, Homo sapiens
cttaaattgaagtatgttaaaacaagccccaggcattgtgtcatttcttctcttcatacctcaagatgcatcttgtagcaacacccgacctgtgtttaaaggagtgtgacattgcaggcagagccccctccacccaccctataccaggagcatagcatatctgcctgggtgccctggcaggcacctgtgtgttgtactctggcaccaggtgtgggttctcaatcatcctggctggaaaacacatttttggctccttctaaaccctctgaccattcaggtgttgatttaattcagttccagcttgtcagttgctgctgagtgccgccttgcctgctttaatgactgtcaggaaaggaggtagagaagctgcctccaggagagttactcaattcctgattcaccagtagaactgt

SEQ ID NO: 59873 - DNA, 411 bp, Homo sapiens
taatcattgaagaggctactccaaccaccaaatacaatatctgacttaataagctgggtgggtttttttcatatagtcacacaagtaacacataaatattcccatggaaaacccagattacagacaaatgaaatctcccttcaccccactccactctcaatgcaatccaagttatttcccagtgttggaagtatgctgtgtgtccttccagatctagcccctctcccttcttattaatttgtttctacttgttgcttttgaaacaatgttatgatgtggggtggggtggggggtgtcttggcagttttgtaagataaaattcctagaaattggatcacttagccaaacagcattaacatttaaattttaaatttccctccagaaaggctaaactaaattctaatcccacac

SEQ ID NO: 59874 - DNA, 258 bp, Homo sapiens
ataaatagtatttgtgaaaaatgcaaaagaatatgaagaaaaaggatatcaaaatcctgctattaacatttcactgtgcgccctttaacgcttcacataattgaagtgaaattgtatcagtttgtgtcctgcttgtgttattctgaaagcattttctgtgttactaaatttttctcaaaaacatttcttttaatggttgcatagtgttttgggtcatggaataccacagcataatatatttttcactataataaataa

SEQ ID NO: 59875 - DNA, 1024 bp, Homo sapiens
caggagaagagaaccttgcaggaacaatgaggaggatttggatttccaagcccttcctggagccctctgtccactaggccaagagtctgcctggatctccatgagtctccagggataacacagaggctggcgcacagtgagtgcttgatataggtctactagcagatggcctctgccatgctcccagtgagagtgctcccaccagcctccaccttcacctatggtggtgagggagggatccccctctttatgccttcggctcagggaaatggggtggcttttccaaatgcatgagctgttaggctttaggacttggtccccagctcccctgaacggccagtggtgctcctgggccagaggcaggatgggggcacatagagtaaggctcacctgtgaccttctcaggtgaatgtacaagcaaatgccagcatttgcaacccatgggctggctgacacaattaatccttttaagacctgccaagagttagaggactcattcatttattttcttctaatagcgttgcgttaaatgaaagaaagaaaaagaaaaaagaatatacatgctcattgtgggcaaaccctgttgttacagaaaaggagaaagagtaaagcaaatccctagatttgctgatctaccactaccatctagagagagccacgatgaacagccttctaaatcttcttctgttcataaatacaaagcagttaaatgtagcaccattttatatagacagtattacgagatttaggctgttctataacctgctttttttcacttaacaacttgtcatgacaccgttacctgtcagttaccacagatctgtaccatttttaatagccccacggtacagttttgcatggatgtggccgtaagttacccaccagttctgttgccagaaatgtggattgttttccatttttctctgcaatgtgctagggaatatcattcagctttttcagatatgtaataatcgtctagcagtaaatatttagaatagctgggatagctagggcaaaaaaaaaa

SEQ ID NO: 59876 - DNA, 761 bp, Homo sapiens
acagagcttggcccgtacccactcccgtattttccatacatcccccacgccatcacacctgcccaccagaccatgcaaaccagggagggaaacaagataagccatgttccaccccaaatcttacccaagggagttaagcctgatgcccacatgcatacaggatcagaacgacgatcctgacctcttgccttgttgtattactaaaaccctctcctcaggggctcatctgccatgccctgatcatgacacatctgtgctaacatgatgttccccggtgcctgccactagcgtgtgtaatgctgctgacacacctcatgactatccatgtcaccctaaaacaccaggaacacctgtcccgagggccagcccgggaactcctgcccctgtgccgctgccctcctgctccagcataagcccattataaagccttgtctgggacactttctctgtctcatgtcaatttccactgcatgagaatctaagaacccacgatcagtaacaatactgtaaattggtacaccagtatttcctgagtatgatttagaattatgtcaaaaataaaagtaaaatacaataaagtgaaggaagaaaagaaaatgtcatggaaacattcatactatctgaattaaaaattccacttctaggaatttcactgaaggtaaaactcacaggttttgtacataataaaacattatgtacaacattatgggatataaatagggctaataataataaaaatcacagtaatgacatgggaatac

SEQ ID NO: 59877 - DNA, 465 bp, Homo sapiens
attcatttagctccgttggtaaaagtaacttagtaataatgctggaattgtaaggaaaattatggtttactataaatgtctttttgaagttatattgtaggtaatcattaagacctaattattagatgatactaatctttaaagtgaccagttttcttacaatttagtttcttgagttcttcaagggaatttaattgttgagcaccattatctatagacacatatactcttacatattgtgctatattatgtagattcagccataaatagtgcttaatcttattaatataaatgtatgcgattcctgtaaaattaatgacacaattattaaactgctatagatgggcatgtatatgtttataaataccatgctatattatgtaggtccatctatatagtgttatgaaaatttcatacatccaaaaaagttaaagatgcatcgccagatgcttcctttggccaaaa

SEQ ID NO: 59878 - DNA, 824 bp, Homo sapiens
  misc_feature (30)..(30): n is a, c, g, or t
  misc_feature (62)..(62): n is a, c, g, or t
aaagaaaaagggggcccggattaacccaanccgaaaaaaaccttaaaacccatggattaatnaaccacgcccacaagaagaacaacaaggggaaaaaggggcccgggaaaacccccaaattgaaaaaaacctgggcagccagtgagtggctgatcatgagtactcaggaaatgcacattaaattcaacagggagaaatcctctctgcccctcagactgcccatcaggcttgggaggtgtcgggagacaggcgttcatcctggtcgctgctttgggtagcagcttgcagtgctgaaacagtcaaagatggctgtccctcagccctgccacctcccattcaagcgcctgctctgaaagctcctgagcagatgggcctgagatgcagacaggggtgctcgtggcagcaccatttacaatgatgcgaaaacagaacccgcctaactccccgtcagccaggaggaggtgggaaaccaacacagcgcatggttatttcatatgcggggatacagcgaagatggacgaagatctacacgcaccagtgcggatagccctcgaggacatgacgttgagtgaaaaaagaaaattgcaaaaggatatgtagagtatgatgccaattatgctatttctccaaaacacaaaaagcaatgatgacgaattcatagttatgtagtaaaaatacagaagccatgcatgggaataaaaaaacaggtctcagtcatgagacagagggaccgaggatgggagcccctgggggcagtcctggcaggattccaggaggaggtgcctttgcatgacgggagctggggtggtgggtccaacagctgt

SEQ ID NO: 59879 - DNA, 231 bp, Homo sapiens
ggtgccttatttagttcatttggtgaggtcatgttttcctgaatgctcttgatgcttgtggatattcattggtgtttgggcattgaagagttaggtcttttatgtagtttttgcagtctgtgattgtttctgcccatctttcttcagaaggccttccaggtgtttaaagggactttggcctccagcccgaaaatgctgtggttcttgcacattcttagaggtaccgccatg

SEQ ID NO: 59880 - DNA, 2746 bp, Homo sapiens
  misc_feature (171)..(172): n is a, c, g, or t
  misc_feature (849)..(849): n is a, c, g, or t
cacaccctggtcggttttgctcacgtgcttcgggtcggttggattcagttcctccatgtggggccgtgggatgtcaccaccctttgccactgtccttgcaggccgggcgcccaggcgtgtggacccgagcccagccttgcgtctttcctcccagttggtaccaggggcctnntgcctccactcatgcagagtggaccagccgcctctgaagcagccccggggagaggagtgccaggcacacagactcaggaagctgggggtgtcagggcaccaggagcctctcaagcggtcctgttggccgtctttctgaagggcagctggggttgcatcatttccccaagtggatcctgccaactttctggggcttctggatgagagccctctccccaccccacccacccctccccgcattgtggcatcagtgctgctgcttccagggagccttcctggccatccaagcctcctctccaggttcctgccctgctgtagtccccaggccagtgcttggcaggtgctcagggaatgtatccaccaaccaaggtttggggtggctgtctctgcctgaccactttccccaggcccctggcgggtacctgagctgtgctctcagggcctcaggaacctccttccatattcagggcctgtgcctggggaggcttcagggtgtagcagctgtgcccatcccaggctgacccacccagcttgcctggtagcccagcctctgggctagtgtgccgtggggcaggggatgtgctgtagcctggtgcagagtccccaaccccagaagggggccatggaagctgacaccccaagtggccgcccccctgctctgtcttgcttcggacactntggccgggtccaggatcctggcatcctgggaggtctctggctttgtgggcagcctgcctggcccgcacagtctgcctgtcctgagggtgagacacaggtcaagcccacagacccccttgctcccctgctggggcctccaggctcacagaccaccccaccctaccctgtccttgcccaagcaaatgagaggcaggggcttcccgggctgctgctgtcccgccctctgtggggcaggaggaggtgcccacagaggctgggtggtgatagccaggagatgggctggcatctgcattacccaagctctgctgcccatggtggcctttctgggggtgggtgctggtccctgccccctgccccacccctgatgtctgctccagagacaaaggtggggagggtgctgaagaggaagtgtttgcccagggagaggctgcggctcctcctgaaacatcagccctgtgggtcctgtttgcagaatctccggcctgtgaaactgtgaggggattcggccaagacgtcctcttccctctgcctcccacccaggccactcttgccactcttcacctccaccatgagcctggacatccagagcctggacatccagtgtgaggagctgagcgacgctagatgggccgagctcctccctctgctccagcagtgccaagtggtcaggtacgcttgctctcggggtggccttggggtgctggtggggcaggctggcgggtggcggctccctctgaagggtgcattgctctggaacgccttgtttgtggacatgaagtatgaattctgtgcagctaccacgtgcatgagatgtgattcttgtgtttctttttgacaatttaggaatgtaaaacccattccaggctcatgcagcatgggctgaggtgggtgggccgaggtgggcggccactggccagtgggtctctggctccggtgtctcagctcctctccctcccttggagacacgagggcaggacacagcttgggtcccctccgtgagcctccatggggcgctgcttgtccctgccaagctgggggctgggagtcctcggccctcgaggtcctcacaaacccagcagcttcacaagcaggacacgagtgcctgggtgggccgcatcttttctccttttacctggtgatttcaagtagtgtcaggtttgcggaggagttacgaggaccggacggggctccctggtgaggtggtcctgtgtacctgcggacgctagctctggcccagcacctccaggcagggtctgcttttccgccctgcccttttcgtcttcctcactggtccaggattgcgtggccctcagccctctgtctccttagccctctcccgtctgtgactgtcccctcgtctctctgggttcttggtggtctgagggtctggccaggctcctgcaggacgtcctctgttggggcttgtctggtggtttcttgtggttgaagtcctacagttttggcaggaatgcagggagatgccgtggggcctgccaggagcgtcctgtcacaggcgccgtctgccaccctctccactgtgacgccactgcctttcctcctgtgactgatcagtgccttcgagagatactttaaattctttttatttttagagacagggcattgctctgtcacccaggctggagtgcagtggtgcgatcttggctcactgcaagctccgcctcccaagttcatgccattctcctgtctcaacctcccgagtagctgggaccacaggcgcccgtcaccacaccaggctaattttttgtacttttagtagagatggggtttcaccgtgttagccagtatggtcttgatatcctgacctcgtgatccgcctgcctcggcctcctaaattgctgggattacaggcgtgagccaccacgcctggcctaatttt

SEQ ID NO: 59881 - DNA, 2086 bp, Homo sapiens
  misc_feature (171)..(172): n is a, c, g, or t
  misc_feature (849)..(849): n is a, c, g, or t
cacaccctggtcggttttgctcacgtgcttcgggtcggttggattcagttcctccatgtggggccgtgggatgtcaccaccctttgccactgtccttgcaggccgggcgcccaggcgtgtggacccgagcccagccttgcgtctttcctcccagttggtaccaggggcctnntgcctccactcatgcagagtggaccagccgcctctgaagcagccccggggagaggagtgccaggcacacagactcaggaagctgggggtgtcagggcaccaggagcctctcaagcggtcctgttggccgtctttctgaagggcagctggggttgcatcatttccccaagtggatcctgccaactttctggggcttctggatgagagccctctccccaccccacccacccctccccgcattgtggcatcagtgctgctgcttccagggagccttcctggccatccaagcctcctctccaggttcctgccctgctgtagtccccaggccagtgcttggcaggtgctcagggaatgtatccaccaaccaaggtttggggtggctgtctctgcctgaccactttccccaggcccctggcgggtacctgagctgtgctctcagggcctcaggaacctccttccatattcagggcctgtgcctggggaggcttcagggtgtagcagctgtgcccatcccaggctgacccacccagcttgcctggtagcccagcctctgggctagtgtgccgtggggcaggggatgtgctgtagcctggtgcagagtccccaaccccagaagggggccatggaagctgacaccccaagtggccgcccccctgctctgtcttgcttcggacactntggccgggtccaggatcctggcatcctgggaggtctctggctttgtgggcagcctgcctggcccgcacagtctgcctgtcctgagggtgagacacaggtcaagcccacagacccccttgctcccctgctggggcctccaggctcacagaccaccccaccctaccctgtccttgcccaagcaaatgagaggcaggggcttcccgggctgctgctgtcccgccctctgtggggcaggaggaggtgcccacagaggctgggtggtgatagccaggagatgggctggcatctgcattacccaagctctgctgcccatggtggcctttctgggggtgggtgctggtccctgccccctgccccacccctgatgtctgctccagagacaaaggtggggagggtgctgaagaggaagtgtttgcccagggagaggctgcggctcctcctgaaacatcagccctgtgggtcctgtttgcagaatctccggcctgtgaaactgtgaggggattcggccaagacgtcctcttccctctgcctcccacccaggccactcttgccactcttcacctccaccatgagcctggacatccagagcctggacatccagtgtgaggagctgagcgacgctagatgggccgagctcctccctctgctccagcagtgccaagtggtcaggctggacgactgtggcctcacggaagcacggtgcaaggacatcagctctgcacttcgagtcaaccctgcactggcagagctcaacctgcgcagcaacgagctgggcgatgtcggcgtgcattgcgtgctccagggcctgcagaccccctcctgcaagatccagaagctgagcctccagaactgctgcctgacgggggccggctgcggggtcctgtccagcacactacgcaccctgcccaccctgcaggagctgcacctcagcgacaacctcttgggggatgcgggcctgcagctgctctgcgaaggactcctggacccccagtgccgcctggaaaagctgcagtgagtttgtgtcctgccccagggcccatgctggccgctgcctgtcccccagccagccccctacatagaacatcgcctgccaggagccgtgaggaggggactcaggtcacaggggccttgtggtgctctcctttccccatgatgctgggtctggggccttgtggtgctctcctctccccatgatgctggggctggggggatctgtcatcaccctccctccccatcc

SEQ ID NO: 59882 - DNA, 3181 bp, Homo sapiens
  misc_feature (171)..(172): n is a, c, g, or t
  misc_feature (849)..(849): n is a, c, g, or t
cacaccctggtcggttttgctcacgtgcttcgggtcggttggattcagttcctccatgtggggccgtgggatgtcaccaccctttgccactgtccttgcaggccgggcgcccaggcgtgtggacccgagcccagccttgcgtctttcctcccagttggtaccaggggcctnntgcctccactcatgcagagtggaccagccgcctctgaagcagccccggggagaggagtgccaggcacacagactcaggaagctgggggtgtcagggcaccaggagcctctcaagcggtcctgttggccgtctttctgaagggcagctggggttgcatcatttccccaagtggatcctgccaactttctggggcttctggatgagagccctctccccaccccacccacccctccccgcattgtggcatcagtgctgctgcttccagggagccttcctggccatccaagcctcctctccaggttcctgccctgctgtagtccccaggccagtgcttggcaggtgctcagggaatgtatccaccaaccaaggtttggggtggctgtctctgcctgaccactttccccaggcccctggcgggtacctgagctgtgctctcagggcctcaggaacctccttccatattcagggcctgtgcctggggaggcttcagggtgtagcagctgtgcccatcccaggctgacccacccagcttgcctggtagcccagcctctgggctagtgtgccgtggggcaggggatgtgctgtagcctggtgcagagtccccaaccccagaagggggccatggaagctgacaccccaagtggccgcccccctgctctgtcttgcttcggacactntggccgggtccaggatcctggcatcctgggaggtctctggctttgtgggcagcctgcctggcccgcacagtctgcctgtcctgagggtgagacacaggtcaagcccacagacccccttgctcccctgctggggcctccaggctcacagaccaccccaccctaccctgtccttgcccaagcaaatgagaggcaggggcttcccgggctgctgctgtcccgccctctgtggggcaggaggaggtgcccacagaggctgggtggtgatagccaggagatgggctggcatctgcattacccaagctctgctgcccatggtggcctttctgggggtgggtgctggtccctgccccctgccccacccctgatgtctgctccagagacaaaggtggggagggtgctgaagaggaagtgtttgcccagggagaggctgcggctcctcctgaaacatcagccctgtgggtcctgtttgcagaatctccggcctgtgaaactgtgaggggattcggccaagacgtcctcttccctctgcctcccacccaggccactcttgccactcttcacctccaccatgagcctggacatccagagcctggacatccagtgtgaggagctgagcgacgctagatgggccgagctcctccctctgctccagcagtgccaagtggtcaggctggacgactgtggcctcacggaagcacggtgcaaggacatcagctctgcacttcgagtcaaccctgcactggcagagctcaacctgcgcagcaacgagctgggcgatgtcggcgtgcattgcgtgctccagggcctgcagaccccctcctgcaagatccagaagctgagcctccagaactgctgcctgacgggggccggctgcggggtcctgtccagcacactacgcaccctgcccaccctgcaggagctgcacctcagcgacaacctcttgggggatgcgggcctgcagctgctctgcgaaggactcctggacccccagtgccgcctggaaaagctgcagctggagtattgcagcctctcggctgccagctgcgagcccctggcctccgtgctcagggccaagccggacttcaaggagctcacggttagcaacaacgacatcaatgaggctggcgtccgtgtgctgtgccagggcctgaaggactccccctgccagctggaggcgctcaagctggagagctgcggtgtgacatcagacaactgccgggacctgtgcggcattgtggcctccaaggcctcgctgcgggagctggccctgggcagcaacaagctgggtgatgtgggcatggcggagctgtgcccagggctgctccaccccagctccaggctcaggaccctgtggatctgggagtgtggcatcactgccaagggctgcggggatctgtgccgtgtcctcagggccaaggagagcctgaaggagctcagcctggccggcaacgagctgggggatgagggtgcccgactgctgtgtgagaccctgctggaacctggctgccagctggagtcgctgtgggtgaagtcctgcagcttcacagccgcctgctgctcccacttcagctcagtgctggcccagaacaggtttctcctggagctacagataagcaacaacaggctggaggatgcgggcgtgcgggagctgtgccagggcctgggccagcctggctctgtgctgcgggtgctctggttggccgactgcgatgtgagtgacagcagctgcagcagcctcgccgcaaccctgttggccaaccacagcctgcgtgagctggacctcagcaacaactgcctgggggacgccggcatcctgcagctggtggagagcgtccggcagccgggctgcctcctggagcagctggtcctgtacgacatttactggtctgaggagatggaggaccggctgcaggccctggagaaggacaagccatccctgagggtcatctcctgaggctcttcctgctgctgctctccctggacgaccggcctcgaggcaaccctggggcccaccagcccctgccatgctctcaccctgcatatcctaggtttgaagagaaacgctcagatccgcttatttctgccagtatattttggacactttataatcattaaagcactttcttggcaggaaaaaaaaaaggttcctaagcctcgagggcaatgaagggtgacacgcggagttgcccacatttggccggccgcgatagtgtgacaccacgcgggtcgtccggggggtccacccccggcggacaatggcggtgaccgcggggccgaggccccaaaacctttggcgcggaagaggaaagggtcccaccgtgtacgccacagg

SEQ ID NO: 59883 - DNA, 690 bp, Homo sapiens
tgtgagtgtgagcacatgggcgagagtgaggatgcatgttcatgtactgggaaaggcgggctggcggcaccactctggcttagttctcattttaactctgaaagtcagaggtcatgtttcatgaagcctgagagcttcacggagctccagcctacctggccaccctgtggtccatcttcctggaagccccgcccacctttctcccttgcgggaaccccgcctgtgtcaggatgtttttccagatttgttttctttgttaaagcacgttcttttgcagctttctaagaaaaggttttgcaggaggtaatttttggggtcttgtgcccctgttctgtccttggatcatttagccgggtatagcatgcaccattatgcccggctaattttattttgtttgtttttttgagagagtcttgctctgtcgcccaggctggagtgcagtggtgcgatcttggctcactgcaagctccgcctcccaagttcatgccattctcctgtctcaacctcccgagtagctgggaccacaggcgcccgtcaccacaccaggctaattttttgtacttttagtagagatggggtttcaccgtgttagccagtatggtcttgatatcctgacctcgtgatccgcctgcctcggcctcctaaattgctgggattacaggcgtgagccaccacgcctggcctaatttt

SEQ ID NO: 59884 - DNA, 190 bp, Homo sapiens
cgacccacgctgtcgcccacgcgtcgcggacgcgtgggtccggacgcgtgggggcaaccctggggcccaccagcccctgccatgctctcaccctgcatatcctaggtttgaagagaaacgctcagatccgcttatttctgccagtatattttggacactttataatcattaaagcactttcttggcagga

SEQ ID NO: 59885 - DNA, 347 bp, Homo sapiens
gggtacctgaggttcccgattttgacgcgtttctcctggagctacagataagcaacaacaggctggaggatgcgggcgtgcgggagctgtgccagggcctgggccagcctggctctgtgctgcgggtgctctggttggccgactgcgatgtgagtgacagcagctgcagcagcctcgccgcaaccctgttggccaaccacagcctgcgtgagctggacctcagcaacaactgcctgggggacgccggcatcctgcagctggtggagagcgtccggcagccgggctgcctcctggagcagctggtcctgtacgacatttactggtctgaggagaacgcgtcaaaatcg

SEQ ID NO: 59886 - DNA, 354 bp, Homo sapiens
ctaagcagctgcagctgggtggttgccggcatcctgcaagtggtgaaaagtgtcaggcagccaaagctccttcttggagaagctggtcctgtacgacatttactggtctgaggagatggaggaccggctgcaggccctggagaaggacaagccatccctgagggtcatctcctgaggctcttcctgctgctgctctccctggacgaccggcctcgaggcaaccctggggcccaccagcccctgccatgctctcaccctgcatatcctaggtttgaagagaaacgctcagatccgcttatttctgccagtatattttggacactttataatcattaaagcactttcttggcagga

SEQ ID NO: 59887 - DNA, 1773 bp, Homo sapiens
gaagcgaaacaggctaggtcgaggctgggggtgaattggccgagggcacgagccggctcgaacacgcccgcgccgctgactggcgggtggggttgtcgacacgttcaacccgttctgctggctcgagaacgaagtaggccgtctcgctctgggtctccaggcccgcgaccgtccgccagtcgtcccgaggccactcttcacctccaccatgagcctggacatccagagcctggacatccagtgtgaggagctgagcgacgctagatgggccgagctcctccctctgctccagcagtgccaagtggtcaggctggacgactgtggcctcacggaagcacggtgcaaggacatcagctctgcacttcgagtcaaccctgcactggcagagctcaacctgcgcagcaacgagctgggcgatgtcggcgtgcattgcgtgctccagggcctgcagaccccctcctgcaagatccagaagctgagcctccagaactgctgcctgacgggggccggctgcggggtcctgtccagcacactacgcaccctgcccaccctgcaggagctgcacctcagcgacaacctcttgggggatgcgggcctgcagctgctctgcgaaggactcctggacccccagtgccgcctggaaaagctgcagctggagtattgcagcctctcggctgccagctgcgagcccctggcctccgtgctcagggccaagccggacttcaaggagctcacggttagcaacaacgacatcaatgaggctggcgtccgtgtgctgtgccagggcctgaaggactccccctgccagctggaggcgctcaagctggagagctgcggtgtgacatcagacaactgccgggacctgtgcggcattgtggcctccaaggcctcgctgcgggagctggccctgggcagcaacaagctgggtgatgtgggcatggcggagctgtgcccagggctgctccaccccagctccaggctcaggaccctgtggatctgggagtgtggcatcactgccaagggctgcggggatctgtgccgtgtcctcagggccaaggagagcctgaaggagctcagcctggccggcaacgagctgggggatgagggtgcccgactgctgtgtgagaccctgctggaacctggctgccagctggagtcgctgtgggtgaagtcctgcagcttcacagccgcctgctgctcccacttcagctcagtgctggcccagaacaggtttctcctggagctacagataagcaacaacaggctggaggatgcgggcgtgcgggagctgtgccagggcctgggccagcctggctctgtgctgcgggtgctctggttggccgactgcgatgtgagtgacagcagctgcagcagcctcgccgcaaccctgttggccaaccacagcctgcgtgagctggacctcagcaacaactgcctgggggacgccggcatcctgcagctggtggagagcgtccggcagccgggctgcctcctggagcagctggtcctgtacgacatttactggtctgaggagatggaggaccggctgcaggccctggagaaggacaagccatccctgagggtcatctcctgaggctcttcctgctgctgctctccctggacgaccggcctcgaggcaaccctggggcccaccagcccctgccatgctctcaccctgcatatcctaggtttgaagagaaacgctcagatccgcttatttctgccagtatattttggacactttataatcattaaagcactttcttggcagga

SEQ ID NO: 59888 - DNA, 1850 bp, Homo sapiens
gaagcgaaacaggctaggtcgaggctgggggtgaattggccgagggcacgagccggctcgaacacgcccgcgccgctgactggcgggtggggttgtcgacacgttcaacccgttctgctggctcgagaacgaagtaggccgtctcgctctgggtctccaggcccgcgaccgtccgccagtcgtcccgagaatctccggcctgtgaaactgtgaggggattcggccaagacgtcctcttccctctgcctcccacccaggccactcttgccactcttcacctccaccatgagcctggacatccagagcctggacatccagtgtgaggagctgagcgacgctagatgggccgagctcctccctctgctccagcagtgccaagtggtcaggctggacgactgtggcctcacggaagcacggtgcaaggacatcagctctgcacttcgagtcaaccctgcactggcagagctcaacctgcgcagcaacgagctgggcgatgtcggcgtgcattgcgtgctccagggcctgcagaccccctcctgcaagatccagaagctgagcctccagaactgctgcctgacgggggccggctgcggggtcctgtccagcacactacgcaccctgcccaccctgcaggagctgcacctcagcgacaacctcttgggggatgcgggcctgcagctgctctgcgaaggactcctggacccccagtgccgcctggaaaagctgcagctggagtattgcagcctctcggctgccagctgcgagcccctggcctccgtgctcagggccaagccggacttcaaggagctcacggttagcaacaacgacatcaatgaggctggcgtccgtgtgctgtgccagggcctgaaggactccccctgccagctggaggcgctcaagctggagagctgcggtgtgacatcagacaactgccgggacctgtgcggcattgtggcctccaaggcctcgctgcgggagctggccctgggcagcaacaagctgggtgatgtgggcatggcggagctgtgcccagggctgctccaccccagctccaggctcaggaccctgtggatctgggagtgtggcatcactgccaagggctgcggggatctgtgccgtgtcctcagggccaaggagagcctgaaggagctcagcctggccggcaacgagctgggggatgagggtgcccgactgctgtgtgagaccctgctggaacctggctgccagctggagtcgctgtgggtgaagtcctgcagcttcacagccgcctgctgctcccacttcagctcagtgctggcccagaacaggtttctcctggagctacagataagcaacaacaggctggaggatgcgggcgtgcgggagctgtgccagggcctgggccagcctggctctgtgctgcgggtgctctggttggccgactgcgatgtgagtgacagcagctgcagcagcctcgccgcaaccctgttggccaaccacagcctgcgtgagctggacctcagcaacaactgcctgggggacgccggcatcctgcagctggtggagagcgtccggcagccgggctgcctcctggagcagctggtcctgtacgacatttactggtctgaggagatggaggaccggctgcaggccctggagaaggacaagccatccctgagggtcatctcctgaggctcttcctgctgctgctctccctggacgaccggcctcgaggcaaccctggggcccaccagcccctgccatgctctcaccctgcatatcctaggtttgaagagaaacgctcagatccgcttatttctgccagtatattttggacactttataatcattaaagcactttcttggcagga

SEQ ID NO: 59889 - DNA, 2023 bp, Homo sapiens
gaagcgaaacaggctaggtcgaggctgggggtgaattggccgagggcacgagccggctcgaacacgcccgcgccgctgactggcgggtggggttgtcgacacgttcaacccgttctgctggctcgagaacgaagtaggccgtctcgctctgggtctccaggcccgcgaccgtccgccagtcgtcccgaggcatgaagaactcttgactgacagaaacggagggtgtgtccaaagttttgaggacggccgagcggcgctccaaaacccgtcctcacagcctcgccccgttcgcctcagctacaacaaatcatcgtcaacctgttccaccttctccagtctggtagcaaaaaggggtgtctcagaatctccggcctgtgaaactgtgaggggattcggccaagacgtcctcttccctctgcctcccacccaggccactcttgccactcttcacctccaccatgagcctggacatccagagcctggacatccagtgtgaggagctgagcgacgctagatgggccgagctcctccctctgctccagcagtgccaagtggtcaggctggacgactgtggcctcacggaagcacggtgcaaggacatcagctctgcacttcgagtcaaccctgcactggcagagctcaacctgcgcagcaacgagctgggcgatgtcggcgtgcattgcgtgctccagggcctgcagaccccctcctgcaagatccagaagctgagcctccagaactgctgcctgacgggggccggctgcggggtcctgtccagcacactacgcaccctgcccaccctgcaggagctgcacctcagcgacaacctcttgggggatgcgggcctgcagctgctctgcgaaggactcctggacccccagtgccgcctggaaaagctgcagctggagtattgcagcctctcggctgccagctgcgagcccctggcctccgtgctcagggccaagccggacttcaaggagctcacggttagcaacaacgacatcaatgaggctggcgtccgtgtgctgtgccagggcctgaaggactccccctgccagctggaggcgctcaagctggagagctgcggtgtgacatcagacaactgccgggacctgtgcggcattgtggcctccaaggcctcgctgcgggagctggccctgggcagcaacaagctgggtgatgtgggcatggcggagctgtgcccagggctgctccaccccagctccaggctcaggaccctgtggatctgggagtgtggcatcactgccaagggctgcggggatctgtgccgtgtcctcagggccaaggagagcctgaaggagctcagcctggccggcaacgagctgggggatgagggtgcccgactgctgtgtgagaccctgctggaacctggctgccagctggagtcgctgtgggtgaagtcctgcagcttcacagccgcctgctgctcccacttcagctcagtgctggcccagaacaggtttctcctggagctacagataagcaacaacaggctggaggatgcgggcgtgcgggagctgtgccagggcctgggccagcctggctctgtgctgcgggtgctctggttggccgactgcgatgtgagtgacagcagctgcagcagcctcgccgcaaccctgttggccaaccacagcctgcgtgagctggacctcagcaacaactgcctgggggacgccggcatcctgcagctggtggagagcgtccggcagccgggctgcctcctggagcagctggtcctgtacgacatttactggtctgaggagatggaggaccggctgcaggccctggagaaggacaagccatccctgagggtcatctcctgaggctcttcctgctgctgctctccctggacgaccggcctcgaggcaaccctggggcccaccagcccctgccatgctctcaccctgcatatcctaggtttgaagagaaacgctcagatccgcttatttctgccagtatattttggacactttataatcattaaagcactttcttggcagga

SEQ ID NO: 59890 - DNA, 2526 bp, Homo sapiens
gaagcgaaacaggctaggtcgaggctgggggtgaattggccgagggcacgagccggctcgaacacgcccgcgccgctgactggcgggtggggttgtcgacacgttcaacccgttctgctggctcgagaacgaagtaggccgtctcgctctgggtctccaggcccgcgaccgtccgccagtcgtcccgagtcagtagctccagcggtgcgtcagcgtctagccaggcctcgcccacgccggccttggtcgggcttcttgtagacgcgggcctggcgctattgaggccgttgctgcgcgggcgagtggcgcgctcccgtggcggggcggggtcgggcggggcaggggtccggggctatcgaggcggggccgaggttgcgctgggcagctgcgccgccgggcggacgtggcgcgccttgaggacgtcatcgcggtgcacgctcccctttggggcttgccggaagtccttgcccggggggcggggctgcgcctgcgtggttcgtcctcacgtggccgtcaagccctctagtgccttagattccagcgagctacgcaagcaatcctggcccagccgagcttgcttccccaaatcccgtaatccttgaccttattcccccaaagaagcggcctcccgggaaggagcgccctggcggagaagactcgaacggctcccacagccgggcgttgggggaaaggcatgaagaactcttgactgacagaaacggagggtgtgtccaaagttttgaggacggccgagcggcgctccaaaacccgtcctcacagcctcgccccgttcgcctcagctacaacaaatcatcgtcaacctgttccaccttctccagtctggtagcaaaaaggggtgtctcagaatctccggcctgtgaaactgtgaggggattcggccaagacgtcctcttccctctgcctcccacccaggccactcttgccactcttcacctccaccatgagcctggacatccagagcctggacatccagtgtgaggagctgagcgacgctagatgggccgagctcctccctctgctccagcagtgccaagtggtcaggctggacgactgtggcctcacggaagcacggtgcaaggacatcagctctgcacttcgagtcaaccctgcactggcagagctcaacctgcgcagcaacgagctgggcgatgtcggcgtgcattgcgtgctccagggcctgcagaccccctcctgcaagatccagaagctgagcctccagaactgctgcctgacgggggccggctgcggggtcctgtccagcacactacgcaccctgcccaccctgcaggagctgcacctcagcgacaacctcttgggggatgcgggcctgcagctgctctgcgaaggactcctggacccccagtgccgcctggaaaagctgcagctggagtattgcagcctctcggctgccagctgcgagcccctggcctccgtgctcagggccaagccggacttcaaggagctcacggttagcaacaacgacatcaatgaggctggcgtccgtgtgctgtgccagggcctgaaggactccccctgccagctggaggcgctcaagctggagagctgcggtgtgacatcagacaactgccgggacctgtgcggcattgtggcctccaaggcctcgctgcgggagctggccctgggcagcaacaagctgggtgatgtgggcatggcggagctgtgcccagggctgctccaccccagctccaggctcaggaccctgtggatctgggagtgtggcatcactgccaagggctgcggggatctgtgccgtgtcctcagggccaaggagagcctgaaggagctcagcctggccggcaacgagctgggggatgagggtgcccgactgctgtgtgagaccctgctggaacctggctgccagctggagtcgctgtgggtgaagtcctgcagcttcacagccgcctgctgctcccacttcagctcagtgctggcccagaacaggtttctcctggagctacagataagcaacaacaggctggaggatgcgggcgtgcgggagctgtgccagggcctgggccagcctggctctgtgctgcgggtgctctggttggccgactgcgatgtgagtgacagcagctgcagcagcctcgccgcaaccctgttggccaaccacagcctgcgtgagctggacctcagcaacaactgcctgggggacgccggcatcctgcagctggtggagagcgtccggcagccgggctgcctcctggagcagctggtcctgtacgacatttactggtctgaggagatggaggaccggctgcaggccctggagaaggacaagccatccctgagggtcatctcctgaggctcttcctgctgctgctctccctggacgaccggcctcgaggcaaccctggggcccaccagcccctgccatgctctcaccctgcatatcctaggtttgaagagaaacgctcagatccgcttatttctgccagtatattttggacactttataatcattaaagcactttcttggcagga

SEQ ID NO: 59891 - DNA, 1768 bp, Homo sapiens
gtagaggctgcgtggttaattcggccgaggcagcgagctacgcaagcaatcctggcccagccgagcttgcttccccaaatcccgtaatccttgaccttattcccccaaagaagcggcctcccgggaaggagcgccctggcggagaagactcgaacggctcccacagccgggcgttgggggaaaggccactcttcacctccaccatgagcctggacatccagagcctggacatccagtgtgaggagctgagcgacgctagatgggccgagctcctccctctgctccagcagtgccaagtggtcaggctggacgactgtggcctcacggaagcacggtgcaaggacatcagctctgcacttcgagtcaaccctgcactggcagagctcaacctgcgcagcaacgagctgggcgatgtcggcgtgcattgcgtgctccagggcctgcagaccccctcctgcaagatccagaagctgagcctccagaactgctgcctgacgggggccggctgcggggtcctgtccagcacactacgcaccctgcccaccctgcaggagctgcacctcagcgacaacctcttgggggatgcgggcctgcagctgctctgcgaaggactcctggacccccagtgccgcctggaaaagctgcagctggagtattgcagcctctcggctgccagctgcgagcccctggcctccgtgctcagggccaagccggacttcaaggagctcacggttagcaacaacgacatcaatgaggctggcgtccgtgtgctgtgccagggcctgaaggactccccctgccagctggaggcgctcaagctggagagctgcggtgtgacatcagacaactgccgggacctgtgcggcattgtggcctccaaggcctcgctgcgggagctggccctgggcagcaacaagctgggtgatgtgggcatggcggagctgtgcccagggctgctccaccccagctccaggctcaggaccctgtggatctgggagtgtggcatcactgccaagggctgcggggatctgtgccgtgtcctcagggccaaggagagcctgaaggagctcagcctggccggcaacgagctgggggatgagggtgcccgactgctgtgtgagaccctgctggaacctggctgccagctggagtcgctgtgggtgaagtcctgcagcttcacagccgcctgctgctcccacttcagctcagtgctggcccagaacaggtttctcctggagctacagataagcaacaacaggctggaggatgcgggcgtgcgggagctgtgccagggcctgggccagcctggctctgtgctgcgggtgctctggttggccgactgcgatgtgagtgacagcagctgcagcagcctcgccgcaaccctgttggccaaccacagcctgcgtgagctggacctcagcaacaactgcctgggggacgccggcatcctgcagctggtggagagcgtccggcagccgggctgcctcctggagcagctggtcctgtacgacatttactggtctgaggagatggaggaccggctgcaggccctggagaaggacaagccatccctgagggtcatctcctgaggctcttcctgctgctgctctccctggacgaccggcctcgaggcaaccctggggcccaccagcccctgccatgctctcaccctgcatatcctaggtttgaagagaaacgctcagatccgcttatttctgccagtatattttggacactttataatcattaaagcactttcttggcagga

SEQ ID NO: 59892 - DNA, 1946 bp, Homo sapiens
gaagcgaaacaggctaggtcgaggctgggggtgaattggccgagggcacgagccggctcgaacacgcccgcgccgctgactggcgggtggggttgtcgacacgttcaacccgttctgctggctcgagaacgaagtaggccgtctcgctctgggtctccaggcccgcgaccgtccgccagtcgtcccgaggcatgaagaactcttgactgacagaaacggagggtgtgtccaaagttttgaggacggccgagcggcgctccaaaacccgtcctcacagcctcgccccgttcgcctcagctacaacaaatcatcgtcaacctgttccaccttctccagtctggtagcaaaaaggggtgtctcaggccactcttcacctccaccatgagcctggacatccagagcctggacatccagtgtgaggagctgagcgacgctagatgggccgagctcctccctctgctccagcagtgccaagtggtcaggctggacgactgtggcctcacggaagcacggtgcaaggacatcagctctgcacttcgagtcaaccctgcactggcagagctcaacctgcgcagcaacgagctgggcgatgtcggcgtgcattgcgtgctccagggcctgcagaccccctcctgcaagatccagaagctgagcctccagaactgctgcctgacgggggccggctgcggggtcctgtccagcacactacgcaccctgcccaccctgcaggagctgcacctcagcgacaacctcttgggggatgcgggcctgcagctgctctgcgaaggactcctggacccccagtgccgcctggaaaagctgcagctggagtattgcagcctctcggctgccagctgcgagcccctggcctccgtgctcagggccaagccggacttcaaggagctcacggttagcaacaacgacatcaatgaggctggcgtccgtgtgctgtgccagggcctgaaggactccccctgccagctggaggcgctcaagctggagagctgcggtgtgacatcagacaactgccgggacctgtgcggcattgtggcctccaaggcctcgctgcgggagctggccctgggcagcaacaagctgggtgatgtgggcatggcggagctgtgcccagggctgctccaccccagctccaggctcaggaccctgtggatctgggagtgtggcatcactgccaagggctgcggggatctgtgccgtgtcctcagggccaaggagagcctgaaggagctcagcctggccggcaacgagctgggggatgagggtgcccgactgctgtgtgagaccctgctggaacctggctgccagctggagtcgctgtgggtgaagtcctgcagcttcacagccgcctgctgctcccacttcagctcagtgctggcccagaacaggtttctcctggagctacagataagcaacaacaggctggaggatgcgggcgtgcgggagctgtgccagggcctgggccagcctggctctgtgctgcgggtgctctggttggccgactgcgatgtgagtgacagcagctgcagcagcctcgccgcaaccctgttggccaaccacagcctgcgtgagctggacctcagcaacaactgcctgggggacgccggcatcctgcagctggtggagagcgtccggcagccgggctgcctcctggagcagctggtcctgtacgacatttactggtctgaggagatggaggaccggctgcaggccctggagaaggacaagccatccctgagggtcatctcctgaggctcttcctgctgctgctctccctggacgaccggcctcgaggcaaccctggggcccaccagcccctgccatgctctcaccctgcatatcctaggtttgaagagaaacgctcagatccgcttatttctgccagtatattttggacactttataatcattaaagcactttcttggcagga

SEQ ID NO: 59893 - DNA, 1810 bp, Homo sapiens
gaagcgaaacaggctaggtcgaggctgggggtgaattggccgagggcacgagccggctcgaacacgcccgcgccgctgactggcgggtggggttgtcgacacgttcaacccgttctgctggctcgagaacgaagtaggccgtctcgctctgggtctccaggcccgcgaccgtccgccagtcgtcccgagaatctccggcctgtgaaactgtgaggggattcggccaagacgtcctcttccctctgcctcccacccaggccactcttctggacatccagtgtgaggagctgagcgacgctagatgggccgagctcctccctctgctccagcagtgccaagtggtcaggctggacgactgtggcctcacggaagcacggtgcaaggacatcagctctgcacttcgagtcaaccctgcactggcagagctcaacctgcgcagcaacgagctgggcgatgtcggcgtgcattgcgtgctccagggcctgcagaccccctcctgcaagatccagaagctgagcctccagaactgctgcctgacgggggccggctgcggggtcctgtccagcacactacgcaccctgcccaccctgcaggagctgcacctcagcgacaacctcttgggggatgcgggcctgcagctgctctgcgaaggactcctggacccccagtgccgcctggaaaagctgcagctggagtattgcagcctctcggctgccagctgcgagcccctggcctccgtgctcagggccaagccggacttcaaggagctcacggttagcaacaacgacatcaatgaggctggcgtccgtgtgctgtgccagggcctgaaggactccccctgccagctggaggcgctcaagctggagagctgcggtgtgacatcagacaactgccgggacctgtgcggcattgtggcctccaaggcctcgctgcgggagctggccctgggcagcaacaagctgggtgatgtgggcatggcggagctgtgcccagggctgctccaccccagctccaggctcaggaccctgtggatctgggagtgtggcatcactgccaagggctgcggggatctgtgccgtgtcctcagggccaaggagagcctgaaggagctcagcctggccggcaacgagctgggggatgagggtgcccgactgctgtgtgagaccctgctggaacctggctgccagctggagtcgctgtgggtgaagtcctgcagcttcacagccgcctgctgctcccacttcagctcagtgctggcccagaacaggtttctcctggagctacagataagcaacaacaggctggaggatgcgggcgtgcgggagctgtgccagggcctgggccagcctggctctgtgctgcgggtgctctggttggccgactgcgatgtgagtgacagcagctgcagcagcctcgccgcaaccctgttggccaaccacagcctgcgtgagctggacctcagcaacaactgcctgggggacgccggcatcctgcagctggtggagagcgtccggcagccgggctgcctcctggagcagctggtcctgtacgacatttactggtctgaggagatggaggaccggctgcaggccctggagaaggacaagccatccctgagggtcatctcctgaggctcttcctgctgctgctctccctggacgaccggcctcgaggcaaccctggggcccaccagcccctgccatgctctcaccctgcatatcctaggtttgaagagaaacgctcagatccgcttatttctgccagtatattttggacactttataatcattaaagcactttcttggcagga

SEQ ID NO: 59894 - DNA, 2486 bp, Homo sapiens
gaagcgaaacaggctaggtcgaggctgggggtgaattggccgagggcacgagccggctcgaacacgcccgcgccgctgactggcgggtggggttgtcgacacgttcaacccgttctgctggctcgagaacgaagtaggccgtctcgctctgggtctccaggcccgcgaccgtccgccagtcgtcccgagtcagtagctccagcggtgcgtcagcgtctagccaggcctcgcccacgccggccttggtcgggcttcttgtagacgcgggcctggcgctattgaggccgttgctgcgcgggcgagtggcgcgctcccgtggcggggcggggtcgggcggggcaggggtccggggctatcgaggcggggccgaggttgcgctgggcagctgcgccgccgggcggacgtggcgcgccttgaggacgtcatcgcggtgcacgctcccctttggggcttgccggaagtccttgcccggggggcggggctgcgcctgcgtggttcgtcctcacgtggccgtcaagccctctagtgccttagattccagcgagctacgcaagcaatcctggcccagccgagcttgcttccccaaatcccgtaatccttgaccttattcccccaaagaagcggcctcccgggaaggagcgccctggcggagaagactcgaacggctcccacagccgggcgttgggggaaaggcatgaagaactcttgactgacagaaacggagggtgtgtccaaagttttgaggacggccgagcggcgctccaaaacccgtcctcacagcctcgccccgttcgcctcagctacaacaaatcatcgtcaacctgttccaccttctccagtctggtagcaaaaaggggtgtctcagaatctccggcctgtgaaactgtgaggggattcggccaagacgtcctcttccctctgcctcccacccaggccactcttctggacatccagtgtgaggagctgagcgacgctagatgggccgagctcctccctctgctccagcagtgccaagtggtcaggctggacgactgtggcctcacggaagcacggtgcaaggacatcagctctgcacttcgagtcaaccctgcactggcagagctcaacctgcgcagcaacgagctgggcgatgtcggcgtgcattgcgtgctccagggcctgcagaccccctcctgcaagatccagaagctgagcctccagaactgctgcctgacgggggccggctgcggggtcctgtccagcacactacgcaccctgcccaccctgcaggagctgcacctcagcgacaacctcttgggggatgcgggcctgcagctgctctgcgaaggactcctggacccccagtgccgcctggaaaagctgcagctggagtattgcagcctctcggctgccagctgcgagcccctggcctccgtgctcagggccaagccggacttcaaggagctcacggttagcaacaacgacatcaatgaggctggcgtccgtgtgctgtgccagggcctgaaggactccccctgccagctggaggcgctcaagctggagagctgcggtgtgacatcagacaactgccgggacctgtgcggcattgtggcctccaaggcctcgctgcgggagctggccctgggcagcaacaagctgggtgatgtgggcatggcggagctgtgcccagggctgctccaccccagctccaggctcaggaccctgtggatctgggagtgtggcatcactgccaagggctgcggggatctgtgccgtgtcctcagggccaaggagagcctgaaggagctcagcctggccggcaacgagctgggggatgagggtgcccgactgctgtgtgagaccctgctggaacctggctgccagctggagtcgctgtgggtgaagtcctgcagcttcacagccgcctgctgctcccacttcagctcagtgctggcccagaacaggtttctcctggagctacagataagcaacaacaggctggaggatgcgggcgtgcgggagctgtgccagggcctgggccagcctggctctgtgctgcgggtgctctggttggccgactgcgatgtgagtgacagcagctgcagcagcctcgccgcaaccctgttggccaaccacagcctgcgtgagctggacctcagcaacaactgcctgggggacgccggcatcctgcagctggtggagagcgtccggcagccgggctgcctcctggagcagctggtcctgtacgacatttactggtctgaggagatggaggaccggctgcaggccctggagaaggacaagccatccctgagggtcatctcctgaggctcttcctgctgctgctctccctggacgaccggcctcgaggcaaccctggggcccaccagcccctgccatgctctcaccctgcatatcctaggtttgaagagaaacgctcagatccgcttatttctgccagtatattttggacactttataatcattaaagcactttcttggcagga

SEQ ID NO: 59895 - DNA, 1934 bp, Homo sapiens
gaagcgaaacaggctaggtcgaggctgggggtgaattggccgagggcacgagccggctcgaacacgcccgcgccgctgactggcgggtggggttgtcgacacgttcaacccgttctgctggctcgagaacgaagtaggccgtctcgctctgggtctccaggcccgcgaccgtccgccagtcgtcccgagaatctccggcctgtgaaactgtgaggggattcggccaagacgtcctcttccctctgcctcccacccaggccactcttgccactcttcacctccaccatgagcctggacatccagagcctggacatccagtgtgaggagctgagcgacgctagatgggccgagctcctccctctgctccagcagtgccaagtggtcaggttgtaacctgcacgtggggtggtggtggaggctgaggccagtgctgtctgcgtggtccacatgaccctggggtctgctcacaggctggacgactgtggcctcacggaagcacggtgcaaggacatcagctctgcacttcgagtcaaccctgcactggcagagctcaacctgcgcagcaacgagctgggcgatgtcggcgtgcattgcgtgctccagggcctgcagaccccctcctgcaagatccagaagctgagcctccagaactgctgcctgacgggggccggctgcggggtcctgtccagcacactacgcaccctgcccaccctgcaggagctgcacctcagcgacaacctcttgggggatgcgggcctgcagctgctctgcgaaggactcctggacccccagtgccgcctggaaaagctgcagctggagtattgcagcctctcggctgccagctgcgagcccctggcctccgtgctcagggccaagccggacttcaaggagctcacggttagcaacaacgacatcaatgaggctggcgtccgtgtgctgtgccagggcctgaaggactccccctgccagctggaggcgctcaagctggagagctgcggtgtgacatcagacaactgccgggacctgtgcggcattgtggcctccaaggcctcgctgcgggagctggccctgggcagcaacaagctgggtgatgtgggcatggcggagctgtgcccagggctgctccaccccagctccaggctcaggaccctgtggatctgggagtgtggcatcactgccaagggctgcggggatctgtgccgtgtcctcagggccaaggagagcctgaaggagctcagcctggccggcaacgagctgggggatgagggtgcccgactgctgtgtgagaccctgctggaacctggctgccagctggagtcgctgtgggtgaagtcctgcagcttcacagccgcctgctgctcccacttcagctcagtgctggcccagaacaggtttctcctggagctacagataagcaacaacaggctggaggatgcgggcgtgcgggagctgtgccagggcctgggccagcctggctctgtgctgcgggtgctctggttggccgactgcgatgtgagtgacagcagctgcagcagcctcgccgcaaccctgttggccaaccacagcctgcgtgagctggacctcagcaacaactgcctgggggacgccggcatcctgcagctggtggagagcgtccggcagccgggctgcctcctggagcagctggtcctgtacgacatttactggtctgaggagatggaggaccggctgcaggccctggagaaggacaagccatccctgagggtcatctcctgaggctcttcctgctgctgctctccctggacgaccggcctcgaggcaaccctggggcccaccagcccctgccatgctctcaccctgcatatcctaggtttgaagagaaacgctcagatccgcttatttctgccagtatattttggacactttataatcattaaagcactttcttggcagga

SEQ ID NO: 59896 - DNA, 1972 bp, Homo sapiens
gaagcgaaacaggctaggtcgaggctgggggtgaattggccgagggcacgagccggctcgaacacgcccgcgccgctgactggcgggtggggttgtcgacacgttcaacccgttctgctggctcgagaacgaagtaggccgtctcgctctgggtctccaggcccgcgaccgtccgccagtcgtcccgaggccactcttcacctccaccatgagcctggacatccagagcctggacatccagtgtgaggagctgagcgacgctagatgggccgagctcctccctctgctccagcagtgccaagtggtcaggctggacgactgtggcctcacggaagcacggtgcaaggacatcagctctgcacttcgagtcaaccctgcactggcagagctcaacctgcgcagcaacgagctgggcgatgtcggcgtgcattgcgtgctccagggcctgcagaccccctcctgcaagatccagaagctgagcctccagaactgctgcctgacgggggccggctgcggggtcctgtccagcacactacgcaccctgcccaccctgcaggagctgcacctcagcgacaacctcttgggggatgcgggcctgcagctgctctgcgaaggactcctggacccccagtgccgcctggaaaagctgcagctggagtattgcagcctctcggctgccagctgcgagcccctggcctccgtgctcagggccaagccggacttcaaggagctcacggttagcaacaacgacatcaatgaggctggcgtccgtgtgctgtgccagggcctgaaggactccccctgccagctggaggcgctcaagctggagagctgcggtgtgacatcagacaactgccgggacctgtgcggcattgtggcctccaaggcctcgctgcgggagctggccctgggcagcaacaagctgggtgatgtgggcatggcggagctgtgcccagggctgctccaccccagctccaggctcaggaccctgtggatctgggagtgtggcatcactgccaagggctgcggggatctgtgccgtgtcctcagggccaaggagagcctgaaggagctcagcctggccggcaacgagctgggggatgagggtgcccgactgctgtgtgagaccctgctggaacctggctgccagctggagtcgctgtgggtgaagtcctgcagcttcacagccgcctgctgctcccacttcagctcagtgctggcccagaacaggtttctcctggagctacagataagcaacaacaggctggaggatgcgggcgtgcgggagctgtgccagggcctgggccagcctggctctgtgctgcgggtgctctggttggccgactgcgatgtgagtgacagcagctgcagcagcctcgccgcaaccctgttggccaaccacagcctgcgtgagctggacctcagcaacaactgcctgggggacgccggcatcctgcagctggtggagagcgtccggcagccgggctgcctcctggagcagctggtcctgtacgacatttactggtctgaggagatggaggaccggctgcaggccctggagaaggacaagccatccctgagggtcatctcctgaggctcttcctgctgctgctctccctggacgaccggcctcgaggcaaccctggggcccaccagcccctgccatgctctcaccctgcatatcctaggtttgaagagaaacgctcagatccgcttatttctgccagtatattttggacactttataatcattaaagcactttcttggcaggaaaaaaaaaaggttcctaagcctcgagggcaatgaagggtgacacgcggagttgcccacatttggccggccgcgatagtgtgacaccacgcgggtcgtccggggggtccacccccggcggacaatggcggtgaccgcggggccgaggccccaaaacctttggcgcggaagaggaaagggtcccaccgtgtacgccacagg

SEQ ID NO: 59897 - DNA, 2172 bp, Homo sapiens
gaagcgaaacaggctaggtcgaggctgggggtgaattggccgagggcacgagccggctcgaacacgcccgcgccgctgactggcgggtggggttgtcgacacgttcaacccgttctgctggctcgagaacgaagtaggccgtctcgctctgggtctccaggcccgcgaccgtccgccagtcgtcccgaggccactcttcacctccaccatgagcctggacatccagagcctggacatccagtgtgaggagctgagcgacgctagatgggccgagctcctccctctgctccagcagtgccaagtggtcaggctggacgactgtggcctcacggaagcacggtgcaaggacatcagctctgcacttcgagtcaaccctgcactggcagagctcaacctgcgcagcaacgagctgggcgatgtcggcgtgcattgcgtgctccagggcctgcagaccccctcctgcaagatccagaagctgagcctccagaactgctgcctgacgggggccggctgcggggtcctgtccagcacactacgcaccctgcccaccctgcaggagctgcacctcagcgacaacctcttgggggatgcgggcctgcagctgctctgcgaaggactcctggacccccagtgccgcctggaaaagctgcagctggagtattgcagcctctcggctgccagctgcgagcccctggcctccgtgctcagggccaagccggacttcaaggagctcacggttagcaacaacgacatcaatgaggctggcgtccgtgtgctgtgccagggcctgaaggactccccctgccagctggaggcgctcaagctggagagctgcggtgtgacatcagacaactgccgggacctgtgcggcattgtggcctccaaggcctcgctgcgggagctggccctgggcagcaacaagctgggtgatgtgggcatggcggagctgtgcccagggctgctccaccccagctccaggctcaggaccctgtggatctgggagtgtggcatcactgccaagggctgcggggatctgtgccgtgtcctcagggccaaggagagcctgaaggagctcagcctggccggcaacgagctgggggatgagggtgcccgactgctgtgtgagaccctgctggaacctggctgccagctggagtcgctgtgggtgaagtcctgcagcttcacagccgcctgctgctcccacttcagctcagtgctggcccagaacaggtttctcctggagctacagataagcaacaacaggctggaggatgcgggcgtgcgggagctgtgccagggcctgggccagcctggctctgtgctgcgggtgctctggttggccgactgcgatgtgagtgacagcagctgcagcagcctcgccgcaaccctgttggccaaccacagcctgcgtgagctggacctcagcaacaactgcctgggggacgccggcatcctgcagctggtggagagcgtccggcagccgggctgcctcctggagcagctggtcctgtacgacatttactggtctgaggagatggaggaccggctgcaggccctggagaaggacaagccatccctgagggtcatctcctgaggctcttcctgctgctgctctccctggacgaccggcctcgaggcaaccctggggcccaccagcccctgccatgctctcaccctgcatatcctaggtttgaagagaaacgctcagatccgcttatttctgccagtatattttggacactttataatcattaaagcactttcttggcaggaaaaaaaaaaaaaaaaaaaaaaaaaaaaaaaaaaaaaaaccaaaaagaaacaagacacaacaaaaaaaaacaaagagcgcgggcgcgcgcgcgcgcagcgacgaacgactcctcccgccggcgaggcggcggcccacagcgccgcgccgccgaccccccgttttcgtgcacagcgggcggctgcgccccaatgagaggcggaggcgctcttctatatatatcatacgccgctcgaggccgcgcggggcgccgcgcgctcatatatacacaaaccaaggaggcggggaagcgcggcgacaaaaaccggcccccagcgcggcgcgagcattctctgtggggacgggcggacccccctctaggcggggggggaggggaccagtcggggggggcacccccctcc

SEQ ID NO: 59898 - DNA, 2271 bp, Homo sapiens
gaagcgaaacaggctaggtcgaggctgggggtgaattggccgagggcacgagccggctcgaacacgcccgcgccgctgactggcgggtggggttgtcgacacgttcaacccgttctgctggctcgagaacgaagtaggccgtctcgctctgggtctccaggcccgcgaccgtccgccagtcgtcccgaggccactcttcacctccaccatgagcctggacatccagagcctggacatccagtgtgaggagctgagcgacgctagatgggccgagctcctccctctgctccagcagtgccaagtggtcaggctggacgactgtggcctcacggaagcacggtgcaaggacatcagctctgcacttcgagtcaaccctgcactggcagagctcaacctgcgcagcaacgagctgggcgatgtcggcgtgcattgcgtgctccagggcctgcagaccccctcctgcaagatccagaagctgagcctccagaactgctgcctgacgggggccggctgcggggtcctgtccagcacactacgcaccctgcccaccctgcaggagctgcacctcagcgacaacctcttgggggatgcgggcctgcagctgctctgcgaaggactcctggacccccagtgccgcctggaaaagctgcagctggagtattgcagcctctcggctgccagctgcgagcccctggcctccgtgctcagggccaagccggacttcaaggagctcacggttagcaacaacgacatcaatgaggctggcgtccgtgtgctgtgccagggcctgaaggactccccctgccagctggaggcgctcaagctggagagctgcggtgtgacatcagacaactgccgggacctgtgcggcattgtggcctccaaggcctcgctgcgggagctggccctgggcagcaacaagctgggtgatgtgggcatggcggagctgtgcccagggctgctccaccccagctccaggctcaggaccctgtggatctgggagtgtggcatcactgccaagggctgcggggatctgtgccgtgtcctcagggccaaggagagcctgaaggagctcagcctggccggcaacgagctgggggatgagggtgcccgactgctgtgtgagaccctgctggaacctggctgccagctggagtcgctgtgggtgaagtcctgcagcttcacagccgcctgctgctcccacttcagctcagtgctggcccagaacaggtttctcctggagctacagataagcaacaacaggctggaggatgcgggcgtgcgggagctgtgccagggcctgggccagcctggctctgtgctgcgggtgctctggttggccgactgcgatgtgagtgacagcagctgcagcagcctcgccgcaaccctgttggccaaccacagcctgcgtgagctggacctcagcaacaactgcctgggggacgccggcatcctgcagctggtggagagcgtccggcagccgggctgcctcctggagcagctggtcctgtacgacatttactggtctgaggagatggaggaccggctgcaggccctggagaaggacaagccatccctgagggtcatctcctgaggctcttcctgctgctgctctccctggacgaccggcctcgaggcaaccctggggcccaccagcccctgccatgctctcaccctgcatatcctaggtttgaagagaaacgctcagatccgcttatttctgccagtatattttggacactttataatcattaaagcactttcttggcaggaggagaggctcttgtccttcctggggtccttgcgaggcgctggcattggagacgacaccaccccacttggcttctctccctgcctaagggaccccgcaccagggaagcagcccaaggccctggctgtgctcagctgggtcccctgagctgcacccacccacactggggagcacagcccagcccagcccagcccagcccagcgcggcccagcgcggcccgggttcctgcccggagcccagtgctcgccccagctctgtgtgggatgatggggcagcccatcttgcccacgggtggacagctgaccaaggtgggccagcccggggtgccctgccctgccaagccaagagggggacgctcaccagctttcaaaggtccgatgctgagtcagcaactacaagttcattgcaaagaagctgcctggcaatccccctcttttggacagggtctctctcttgcccaggctggagtgcagtggcgcaatcttggctcactacagcct

SEQ ID NO: 59899 - DNA, 1774 bp, Homo sapiens
gaagcgaaacaggctaggtcgaggctgggggtgaattggccgagggcacgagccggctcgaacacgcccgcgccgctgactggcgggtggggttgtcgacacgttcaacccgttctgctggctcgagaacgaagtaggccgtctcgctctgggtctccaggcccgcgaccgtccgccagtcgtcccgaggccactcttcacctccaccatgagcctggacatccagagcctggacatccagtgtgaggagctgagcgacgctagatgggccgagctcctccctctgctccagcagtgccaagtggtcaggctggacgactgtggcctcacggaagcacggtgcaaggacatcagctctgcacttcgagtcaaccctgcactggcagagctcaacctgcgcagcaacgagctgggcgatgtcggcgtgcattgcgtgctccagggcctgcagaccccctcctgcaagatccagaagctgagcctccagaactgctgcctgacgggggccggctgcggggtcctgtccagcacactacgcaccctgcccaccctgcaggagctgcacctcagcgacaacctcttgggggatgcgggcctgcagctgctctgcgaaggactcctggacccccagtgccgcctggaaaagctgcagctggagtattgcagcctctcggctgccagctgcgagcccctggcctccgtgctcagggccaagccggacttcaaggagctcacggttagcaacaacgacatcaatgaggctggcgtccgtgtgctgtgccagggcctgaaggactccccctgccagctggaggcgctcaagctggagagctgcggtgtgacatcagacaactgccgggacctgtgcggcattgtggcctccaaggcctcgctgcgggagctggccctgggcagcaacaagctgggtgatgtgggcatggcggagctgtgcccagggctgctccaccccagctccaggctcaggaccctgtggatctgggagtgtggcatcactgccaagggctgcggggatctgtgccgtgtcctcagggccaaggagagcctgaaggagctcagcctggccggcaacgagctgggggatgagggtgcccgactgctgtgtgagaccctgctggaacctggctgccagctggagtcgctgtgggtgaagtcctgcagcttcacagccgcctgctgctcccacttcagctcagtgctggcccagaacaggtttctcctggagctacagataagcaacaacaggctggaggatgcgggcgtgcgggagctgtgccagggcctgggccagcctggctctgtgctgcgggtgctctggttggccgactgcgatgtgagtgacagcagctgcagcagcctcgccgcaaccctgttggccaaccacagcctgcgtgagctggacctcagcaacaactgcctgggggacgccggcatcctgcagctggtggagagcgtccggcagccgggctgcctcctggagcagctggtcctgtacgacatttactggtctgaggagatggaggaccggctgcaggccctggagaaggacaagccatccctgagggtcatctcctgaggctcttcctgctgctgctctccctggacgaccggcctcgaggcaaccctggggcccaccagcccctgccatgctctcaccctgcatatcctaggtttgaagagaaacgctcagatccgcttatttctgccagtataacctggcgcttatatcatagatcgggggggggggcggcggggt

SEQ ID NO: 59900 - DNA, 1800 bp, Homo sapiens
gaagcgaaacaggctaggtcgaggctgggggtgaattggccgagggcacgagccggctcgaacacgcccgcgccgctgactggcgggtggggttgtcgacacgttcaacccgttctgctggctcgagaacgaagtaggccgtctcgctctgggtctccaggcccgcgaccgtccgccagtcgtcccgaggccactcttcacctccaccatgagcctggacatccagagcctggacatccagtgtgaggagctgagcgacgctagatgggccgagctcctccctctgctccagcagtgccaagtggtcaggctggacgactgtggcctcacggaagcacggtgcaaggacatcagctctgcacttcgagtcaaccctgcactggcagagctcaacctgcgcagcaacgagctgggcgatgtcggcgtgcattgcgtgctccagggcctgcagaccccctcctgcaagatccagaagctgagcctccagaactgctgcctgacgggggccggctgcggggtcctgtccagcacactacgcaccctgcccaccctgcaggagctgcacctcagcgacaacctcttgggggatgcgggcctgcagctgctctgcgaaggactcctggacccccagtgccgcctggaaaagctgcagctggagtattgcagcctctcggctgccagctgcgagcccctggcctccgtgctcagggccaagccggacttcaaggagctcacggttagcaacaacgacatcaatgaggctggcgtccgtgtgctgtgccagggcctgaaggactccccctgccagctggaggcgctcaagctggagagctgcggtgtgacatcagacaactgccgggacctgtgcggcattgtggcctccaaggcctcgctgcgggagctggccctgggcagcaacaagctgggtgatgtgggcatggcggagctgtgcccagggctgctccaccccagctccaggctcaggaccctgtggatctgggagtgtggcatcactgccaagggctgcggggatctgtgccgtgtcctcagggccaaggagagcctgaaggagctcagcctggccggcaacgagctgggggatgagggtgcccgactgctgtgtgagaccctgctggaacctggctgccagctggagtcgctgtgggtgaagtcctgcagcttcacagccgcctgctgctcccacttcagctcagtgctggcccagaacaggtttctcctggagctacagataagcaacaacaggctggaggatgcgggcgtgcgggagctgtgccagggcctgggccagcctggctctgtgctgcgggtgctctggttggccgactgcgatgtgagtgacagcagctgcagcagcctcgccgcaaccctgttggccaaccacagcctgcgtgagctggacctcagcaacaactgcctgggggacgccggcatcctgcagctggtggagagcgtccggcagccgggctgcctcctggagcagctggtcctgtacgacatttactggtctgaggagatggaggaccggctgcaggccctggagaaggacaagccatccctgagggtcatctcctgaggctcttcctgctgctgctctccctggacgaccggcctcgaggcaaccctggggcccaccagcccctgccatgctctcaccctgcatatcctaggtttgaagacgaccgaccgctccccgccacatgcggacgcgcgcgttgcgacacgtgaggtgcgggtgaggggggcgcgccggcgcccaccgggctcaccgagggcggccgc

SEQ ID NO: 59901 - DNA, 1184 bp, Homo sapiens
gaagcgaaacaggctaggtcgaggctgggggtgaattggccgagggcacgagccggctcgaacacgcccgcgccgctgactggcgggtggggttgtcgacacgttcaacccgttctgctggctcgagaacgaagtaggccgtctcgctctgggtctccaggcccgcgaccgtccgccagtcgtcccgaggcatgaagaactcttgactgacagaaacggagggtgtgtccaaagttttgaggacggccgagcggcgctccaaaacccgtcctcacagcctcgccccgttcgcctcagctacaacaaatcatcgtcaacctgttccaccttctccagtctggtagcaaaaaggggtgtctcagcccagggctgctccaccccagctccaggctcaggaccctgtggatctgggagtgtggcatcactgccaagggctgcggggatctgtgccgtgtcctcagggccaaggagagcctgaaggagctcagcctggccggcaacgagctgggggatgagggtgcccgactgctgtgtgagaccctgctggaacctggctgccagctggagtcgctgtgggtgaagtcctgcagcttcacagccgcctgctgctcccacttcagctcagtgctggcccagaacaggtttctcctggagctacagataagcaacaacaggctggaggatgcgggcgtgcgggagctgtgccagggcctgggccagcctggctctgtgctgcgggtgctctggttggccgactgcgatgtgagtgacagcagctgcagcagcctcgccgcaaccctgttggccaaccacagcctgcgtgagctggacctcagcaacaactgcctgggggacgccggcatcctgcagctggtggagagcgtccggcagccgggctgcctcctggagcagctggtcctgtacgacatttactggtctgaggagatggaggaccggctgcaggccctggagaaggacaagccatccctgagggtcatctcctgaggctcttcctgctgctgctctccctggacgaccggcctcgaggcaaccctggggcccaccagcccctgccatgctctcaccctgcatatcctaggtttgaagagaaacgctcagatccgcttatttctgccagtatattttggacactttataatcattaaagcactttcttggcagga

SEQ ID NO: 59902 - DNA, 1442 bp, Homo sapiens
gaagcgaaacaggctaggtcgaggctgggggtgaattggccgagggcacgagccggctcgaacacgcccgcgccgctgactggcgggtggggttgtcgacacgttcaacccgttctgctggctcgagaacgaagtaggccgtctcgctctgggtctccaggcccgcgaccgtccgccagtcgtcccgaggccactcttcacctccaccatgagcctggacatccagagcctggacatccagtgtgaggagctgagcgacgctagatgggccgagctcctccctctgctccagcagtgccaagtggtcaggctggacgactgtggcctcacggaagcacggtgcaaggacatcagctctgcacttcgagtcaaccctgcactggcagagctcaacctgcgcagcaacgagctgggcgatgtcggcgtgcattgcgtgctccagggcctgcagaccccctcctgcaagatccagaagctgagcctccagaactgctgcctgacgggggccggctgcggggtcctgtccagcacactacgcaccctgcccaccctgcaggagctgcacctcagcgacaacctcttgggggatgcgggcctgcagctgctctgcgaaggactcctggacccccagtgccgcctggaaaagctgcagctggagtattgcagcctctcggctgccagctgcgagcccctggcctccgtgctcagggccaagccggacttcaaggagctcacggttagcaacaacgacatcaatgaggctggcgtccgtgtgctgtgccagggcctgaaggactccccctgccagctggaggcgctcaagctggagagctgcggtgtgacatcagacaactgccgggacctgtgcggcattgtggcctccaaggcctcgctgcgggagctggccctgggcagcaacaagctgggtgatgtgggcatggcggagctgtgcccagggctgctccaccccagctccaggctcaggaccctgtggatctgggagtgtggcatcactgccaagggctgcggggatctgtgccgtgtcctcagggccaaggagagcctgaaggagctcagcctggccggcaacgagctgggggatgagggtgcccgactgctgtgtgagaccctgctggaacctggctgccagctggagtcgctgtgggtgaagtcctgcagcttcacagccgcctgctgctcccacttcagctcagtgctggcccagaacaggtttctcctggagctacagataagcaacaacaggctggaggatgcgggcgtgcgggagctgtgccagggcctgggccagcctggctctgtgctgcgggtgctctggttgggcgatggatgtgagtgacagagtggagagctcgcgaacctgttggcaaacacagctggtgaatgactcagaaatgctgggggagcggcatcttgatgtgaag

SEQ ID NO: 59903 - DNA, 1504 bp, Homo sapiens
gaagcgaaacaggctaggtcgaggctgggggtgaattggccgagggcacgagccggctcgaacacgcccgcgccgctgactggcgggtggggttgtcgacacgttcaacccgttctgctggctcgagaacgaagtaggccgtctcgctctgggtctccaggcccgcgaccgtccgccagtcgtcccgaggccactcttcacctccaccatgagcctggacatccagagcctggacatccagtgtgaggagctgagcgacgctagatgggccgagctcctccctctgctccagcagtgccaagtggtcaggctggacgactgtggcctcacggaagcacggtgcaaggacatcagctctgcacttcgagtcaaccctgcactggcagagctcaacctgcgcagcaacgagctgggcgatgtcggcgtgcattgcgtgctccagggcctgcagaccccctcctgcaagatccagaagctgagcctccagaactgctgcctgacgggggccggctgcggggtcctgtccagcacactacgcaccctgcccaccctgcaggagctgcacctcagcgacaacctcttgggggatgcgggcctgcagctgctctgcgaaggactcctggacccccagtgccgcctggaaaagctgcagctggagtattgcagcctctcggctgccagctgcgagcccctggcctccgtgctcagggccaagccggacttcaaggagctcacggttagcaacaacgacatcaatgaggctggcgtccgtgtgctgtgccagggcctgaaggactccccctgccagctggaggcgctcaagctggagagctgcggtgtgacatcagacaactgccgggacctgtgcggcattgtggcctccaaggcctcgctgcgggagctggccctgggcagcaacaagctgggtgatgtgggcatggcggagctgtgcccagggctgctccaccccagctccaggctcaggaccctgtggatctgggagtgtggcatcactgccaagggctgcggggatctgtgccgtgtcctcagggccaaggagagcctgaaggagctcagcctggccggcaacgagctgggggatgagggtgcccgactgctgtgtgagaccctgctggaacctggctgccagctggagtcgctgtgggtgaagtcctgcagcttcacagccgcctgctgctcccacttcagctcagtgctggcccagaacaggtttctcctggagctacagataagcaacaacaggctggaggatgcgggcgtgcgggagctgtgccagggcctgggccagcctggctctgtgctgcgggtgctctggttggccgactgcgatgtgagtgtgacgacgaggacactgccttcccacctctgcactatgagctgtgacaaggcagccaccctgtcacctagctcaatggagccccggatcccaagccctgcattgtaagcccacagtaggcactcaataaatgcttgttaaaggaac

SEQ ID NO: 59904 - DNA, 1380 bp, Homo sapiens
gaagcgaaacaggctaggtcgaggctgggggtgaattggccgagggcacgagccggctcgaacacgcccgcgccgctgactggcgggtggggttgtcgacacgttcaacccgttctgctggctcgagaacgaagtaggccgtctcgctctgggtctccaggcccgcgaccgtccgccagtcgtcccgaggcatgaagaactcttgactgacagaaacggagggtgtgtccaaagttttgaggacggccgagcggcgctccaaaacccgtcctcacagcctcgccccgttcgcctcagctacaacaaatcatcgtcaacctgttccaccttctccagtctggtagcaaaaaggggtgtctcagaatctccggcctgtgaaactgtgaggggattcggccaagacgtcctcttccctctgcctcccacccaggccactcttgccactcttcacctccaccatgagcctggacatccagagcctggacatccagtgtgaggagctgagcgacgctagatgggccgagctcctccctctgctccagcagtgccaagtggtcaggctggacgactgtggcctcacggaagcacggtgcaaggacatcagctctgcacttcgagtcaaccctgcactggcagagctcaacctgcgcagcaacgagctgggcgatgtcggcgtgcattgcgtgctccagggcctgcagaccccctcctgcaagatccagaagctgagcctccagaactgctgcctgacgggggccggctgcggggtcctgtccagcacactacgcaccctgcccaccctgcaggagctgcacctcagcgacaacctcttgggggatgcgggcctgcagctgctctgcgaaggactcctggacccccagtgccgcctggaaaagctgcagctggagtattgcagcctctcggctgccagctgcgagcccctggcctccgtgctcagggccaagccggacttcaaggagctcacggttagcaacaacgacatcaatgaggctggcgtccgtgtgctgtgccagggcctgaaggactccccctgccagctggaggcgctcaagagagcgtccggcagccgggctgcctcctggagcagctggtcctgtacgacatttactggtctgaggagatggaggaccggctgcaggccctggagaaggacaagccatccctgagggtcatctcctgaggctcttcctgctgctgctctccctggacgaccggcctcgaggcaaccctggggcccaccagcccctgccatgctctcaccctgcatatcctaggtttgaagagaaacgctcagatccgcttatttctgccagtatattttggacactttataatcattaaagcactttcttggcagga

SEQ ID NO: 59905 - DNA, 1440 bp, Homo sapiens
gaagcgaaacaggctaggtcgaggctgggggtgaattggccgagggcacgagccggctcgaacacgcccgcgccgctgactggcgggtggggttgtcgacacgttcaacccgttctgctggctcgagaacgaagtaggccgtctcgctctgggtctccaggcccgcgaccgtccgccagtcgtcccgaggcatgaagaactcttgactgacagaaacggagggtgtgtccaaagttttgaggacggccgagcggcgctccaaaacccgtcctcacagcctcgccccgttcgcctcagctacaacaaatcatcgtcaacctgttccaccttctccagtctggtagcaaaaaggggtgtctcagaatctccggcctgtgaaactgtgaggggattcggccaagacgtcctcttccctctgcctcccacccaggccactcttgccactcttcacctccaccatgagcctggacatccagagcctggacatccagtgtgaggagctgagcgacgctagatgggccgagctcctccctctgctccagcagtgccaagtggtcaggctggacgactgtggcctcacggaagcacggtgcaaggacatcagctctgcacttcgagtcaaccctgcactggcagagctcaacctgcgcagcaacgagctgggcgatgtcggcgtgcattgcgtgctccagggcctgcagaccccctcctgcaagatccagaagctgagcctccagaactgctgcctgacgggggccggctgcggggtcctgtccagcacactacgcaccctgcccaccctgcaggagctgcacctcagcgacaacctcttgggggatgcgggcctgcagctgctctgcgaaggactcctggacccccagtgccgcctggaaaagctgcagctggagtattgcagcctctcggctgccagctgcgagcccctggcctccgtgctcagggccaagccggacttcaaggagctcacggttagcaacaacgacatcaatgaggctggcgtccgtgtgctgtgccagggcctgaaggactccccctgccagctggaggcgctcaagctggagagctgcggtgtgacatcagacaactgccgggacctgtgcggcattgtggcctccaaggcctcgctgcgggagctggccctgggcagcaacaagccctgtacgacatttactggtctgaggagatggaggaccggctgcaggccctggagaaggacaagccatccctgagggtcatctcctgaggctcttcctgctgctgctctccctggacgaccggcctcgaggcaaccctggggcccaccagcccctgccatgctctcaccctgcatatcctaggtttgaagagaaacgctcagatccgcttatttctgccagtatattttggacactttataatcattaaagcactttcttggcagga

SEQ ID NO: 59906 - DNA, 1938 bp, Homo sapiens
gaagcgaaacaggctaggtcgaggctgggggtgaattggccgagggcacgagccggctcgaacacgcccgcgccgctgactggcgggtggggttgtcgacacgttcaacccgttctgctggctcgagaacgaagtaggccgtctcgctctgggtctccaggcccgcgaccgtccgccagtcgtcccgaggcatgaagaactcttgactgacagaaacggagggtgtgtccaaagttttgaggacggccgagcggcgctccaaaacccgtcctcacagcctcgccccgttcgcctcagctacaacaaatcatcgtcaacctgttccaccttctccagtctggtagcaaaaaggggtgtctcagaatctccggcctgtgaaactgtgaggggattcggccaagacgtcctcttccctctgcctcccacccaggccactcttgccactcttcacctccaccatgagcctggacatccagagcctggacatccagtgtgaggagctgagcgacgctagatgggccgagctcctccctctgctccagcagtgccaagtggtcaggctggacgactgtggcctcacggaagcacggtgcaaggacatcagctctgcacttcgagtcaaccctgcactggcagagctcaacctgcgcagcaacgagctgggcgatgtcggcgtgcattgcgtgctccagggcctgcagaccccctcctgcaagatccagaagctgagcctccagaactgctgcctgacgggggccggctgcggggtcctgtccagcacactacgcaccctgcccaccctgcaggagctgcacctcagcgacaacctcttgggggatgcgggcctgcagctgctctgcgaaggactcctggacccccagtgccgcctggaaaagctgcagctggagtattgcagcctctcggctgccagctgcgagcccctggcctccgtgctcagggccaagccggacttcaaggagctcacggttagcaacaacgacatcaatgaggctggcgtccgtgtgctgtgccagggcctgaaggactccccctgccagctggaggcgctcaagctggagagctgcggtgtgacatcagacaactgccgggacctgtgcggcattgtggcctccaaggcctcgctgcgggagctggccctgggcagcaacaagccctgtacgacatttactggtctgaggagatggaggaccggctgcaggccctggagaaggacaagccatccctgagggtcatctcctgaggctcttcctgctgctgctctccctggacgaccggcctcgaggcaaccctggggcccaccagcccctgccatgctctcaccctgcatatcctaggtttgaagagaaacgctcagatccgcttatttctgccagtatattttggacactttataatcattaaagcactttcttggcaggaggagaggctcttgtccttcctggggtccttgcgaggcgctggcattggagacgacaccaccccacttggcttctctccctgcctaagggaccccgcaccagggaagcagcccaaggccctggctgtgctcagctgggtcccctgagctgcacccacccacactggggagcacagcccagcccagcccagcccagcccagcgcggcccagcgcggcccgggttcctgcccggagcccagtgctcgccccagctctgtgtgggatgatggggcagcccatcttgcccacgggtggacagctgaccaaggtgggccagcccggggtgccctgccctgccaagccaagagggggacgctcaccagctttcaaaggtccgatgctgagtcagcaactacaagttcattgcaaagaagctgcctggcaatccccctcttttggacagggtctctctcttgcccaggctggagtgcagtggcgcaatcttggctcactacagcct

SEQ ID NO: 59907 - DNA, 1010 bp, Homo sapiens
gaagcgaaacaggctaggtcgaggctgggggtgaattggccgagggcacgagccggctcgaacacgcccgcgccgctgactggcgggtggggttgtcgacacgttcaacccgttctgctggctcgagaacgaagtaggccgtctcgctctgggtctccaggcccgcgaccgtccgccagtcgtcccgaggccactcttcacctccaccatgagcctggacatccagagcctggacatccagtgtgaggagctgagcgacgctagatgggccgagctcctccctctgctccagcagtgccaagtggtcaggctggacgactgtggcctcacggaagcacggtgcaaggacatcagctctgcacttcgagtcaaccctgcactggcagagctcaacctgcgcagcaacgagctgggcgatgtcggcgtgcattgcgtgctccagggcctgcagaccccctcctgcaagatccagaagctgagcctccagaactgctgcctgacgggggccggctgcggggtcctgtccagcacactacgcaccctgcccaccctgcaggagctgcacctcagcgacaacctcttgggggatgcgggcctgcagctgctctgcgaaggactcctggacccccagtgccgcctggaaaagctgcagctggagtattgcagcctctcggctgccagctgcgagcccctggcctccgtgctcagggccaagccggacttcaaggagctcacggttagcaacaacgacatcaatgaggctggcgtccgtgtgctgtgccagggcctgaaggactccccctgccagctggaggcgctcaagctggagagctgcggtgtgacatcagacaactgccgggacctgtgcggcattgtggcctccaaggcctcgctgcgggagctggccctgggcagcaacaagctgggtgatgtgggcatggcggagctgtggggtgtcccccggtcaggccggccgtggctgggtgggcctgcccgggggcggcgtccgg

SEQ ID NO: 59908 - DNA, 1484 bp, Homo sapiens
  misc_feature (1484)..(1484): n is a, c, g, or t
gaagcgaaacaggctaggtcgaggctgggggtgaattggccgagggcacgagccggctcgaacacgcccgcgccgctgactggcgggtggggttgtcgacacgttcaacccgttctgctggctcgagaacgaagtaggccgtctcgctctgggtctccaggcccgcgaccgtccgccagtcgtcccgaggcatgaagaactcttgactgacagaaacggagggtgtgtccaaagttttgaggacggccgagcggcgctccaaaacccgtcctcacagcctcgccccgttcgcctcagctacaacaaatcatcgtcaacctgttccaccttctccagtctggtagcaaaaaggggtgtctcagaatctccggcctgtgaaactgtgaggggattcggccaagacgtcctcttccctctgcctcccacccaggccactcttgccactcttcacctccaccatgagcctggacatccagagcctggacatccagtgtgaggagctgagcgacgctagatgggccgagctcctccctctgctccagcagtgccaagtggtcaggctggacgactgtggcctcacggaagcacggtgcaaggacatcagctctgcacttcgagtcaaccctgcactggcagagctcaacctgcgcagcaacgagctgggcgatgtcggcgtgcattgcgtgctccagggcctgcagaccccctcctgcaagatccagaagctgagcctccagaactgctgcctgacgggggccggctgcggggtcctgtccagcacactacgcaccctgcccaccctgcaggagctgcacctcagcgacaacctcttgggggatgcgggcctgcagctgctctgcgaaggactcctggacccccagtgccgcctggaaaagctgcagctggagtattgcagcctctcggctgccagctgcgagcccctggcctccgtgctcagggccaagccggacttcaaggagctcacggttagcaacaacgacatcaatgaggctggcgtccgtgtgctgtgccagggcctgaaggactccccctgccagctggaggcgctcaagctggagagctgcggtgtgacatcagacaactgccgggacctgtgcggcattgtggcctccaaggcctcgctgcgggagctggccctgggcagcaacaagcctcaccctgcatatcctaggtttgaagagaaacgctcagatccgcttatttctgccagtatattttggacactttataatcattaaagcactttcttggcaggaaaaaaaaaaaaaaaactaataaaattacaaaatttatcaatttacctattaatttcattacactaaataatctttcttcttacatcttatattcataaaaataaattggccggggttttaacaacgtttgatttggaaacccttggttttccaaattaaaccgtttggacttcccctttggcccgttggctagcggtcccctttccn

SEQ ID NO: 59909 - DNA, 1415 bp, Homo sapiens
gaagcgaaacaggctaggtcgaggctgggggtgaattggccgagggcacgagccggctcgaacacgcccgcgccgctgactggcgggtggggttgtcgacacgttcaacccgttctgctggctcgagaacgaagtaggccgtctcgctctgggtctccaggcccgcgaccgtccgccagtcgtcccgagtcagtagctccagcggtgcgtcagcgtctagccaggcctcgcccacgccggccttggtcgggcttcttgtagacgcgggcctggcgctattgaggccgttgctgcgcgggcgagtggcgcgctcccgtggcggggcggggtcgggcggggcaggggtccggggctatcgaggcggggccgaggttgcgctgggcagctgcgccgccgggcggacgtggcgcgccttgaggacgtcatcgcggtgcacgctcccctttggggcttgccggaagtccttgcccggggggcggggctgcgcctgcgtggttcgtcctcacgtggccgtcaagccctctagtgccttagattccagcgagctacgcaagcaatcctggcccagccgagcttgcttccccaaatcccgtaatccttgaccttattcccccaaagaagcggcctcccgggaaggagcgccctggcggagaagactcgaacggctcccacagccgggcgttgggggaaaggcatgaagaactcttgactgacagaaacggagggtgtgtccaaagttttgaggacggccgagcggcgctccaaaacccgtcctcacagcctcgccccgttcgcctcagctacaacaaatcatcgtcaacctgttccaccttctccagtctggtagcaaaaaggggtgtctcaggccactcttcacctccaccatgagcctggacatccagagcctggacatccagtgtgaggagctgagcgacgctagatgggccgagctcctccctctgctccagcagtgccaagtggtcaggctggacgactgtggcctcacggaagcacggtgcaaggacatcagctctgcacttcgagtcaaccctgcactggcagagctcaacctgcgcagcaacgagctgggcgatgtcggcgtgcattgcgtgctccagggcctgcagaccccctcctgcaagatccagaagctgagcctccagaactgctgcctgacgggggccggctgcggggtcctgtccagcacactacgcaccctgcccaccctgcaggagctgcacctcagcgacaacctcttgggggatgcgggcctgcagctgctctgcgaaggactcctggacccccagtgccgcctggaaaagctgcagagtacggagccctcggtgcagtgcgagccttggtccggcagggcaagccgatcaggacccacggtagcacaagacatcagagggggg

SEQ ID NO: 59910 - DNA, 751 bp, Homo sapiens
gaagcgaaacaggctaggtcgaggctgggggtgaattggccgagggcacgagccggctcgaacacgcccgcgccgctgactggcgggtggggttgtcgacacgttcaacccgttctgctggctcgagaacgaagtaggccgtctcgctctgggtctccaggcccgcgaccgtccgccagtcgtcccgaggccactcttcacctccaccatgagcctggacatccagagcctggacatccagtgtgaggagctgagcgacgctagatgggccgagctcctccctctgctccagcagtgccaagtggtcaggctggacgactgtggcctcacggaagcacggtgcaaggacatcagctctgcacttcgagtcaaccctgcactggcagagctcaacctgcgcagcaacgagctgggcgatgtcggcgtgcattgcgtgctccagggcctgcagaccccctcctgcaagatccagaagctgagcctccagaactgctgcctgacgggggccggctgcggggtcctgtccagcacactacgcaccctgcccaccctgcaggagctgcacctcagcgacaacctcttgggggatgcgggcctgcagctgctctgcgaaggactcctggacccccagtgccgcctggaaaagctgcattgtcctttgcaaggcacagctgccccaggacccgacggtgggaacagatgcctggccgtgagtcaggttccactcaccgcctcagtgtgtgtgggggac

SEQ ID NO: 59911 - DNA, 1109 bp, Homo sapiens
gaagcgaaacaggctaggtcgaggctgggggtgaattggccgagggcacgagccggctcgaacacgcccgcgccgctgactggcgggtggggttgtcgacacgttcaacccgttctgctggctcgagaacgaagtaggccgtctcgctctgggtctccaggcccgcgaccgtccgccagtcgtcccgagtcagtagctccagcggtgcgtcagcgtctagccaggcctcgcccacgccggccttggtcgggcttcttgtagacgcgggcctggcgctattgaggccgttgctgcgcgggcgagtggcgcgctcccgtggcggggcggggtcgggcggggcaggggtccggggctatcgaggcggggccgaggttgcgctgggcagctgcgccgccgggcggacgtggcgcgccttgaggacgtcatcgcggtgcacgctcccctttggggcttgccggaagtccttgcccggggggcggggctgcgcctgcgtggttcgtcctcacgtggccgtcaagccctctagtgccttagattccagcgagctacgcaagcaatcctggcccagccgagcttgcttccccaaatcccgtaatccttgaccttattcccccaaagaagcggcctcccgggaaggagcgccctggcggagaagactcgaacggctcccacagccgggcgttgggggaaaggcatgaagaactcttgactgacagaaacggagggtgtgtccaaagttttgaggacggccgagcggcgctccaaaacccgtcctcacagcctcgccccgttcgcctcagctacaacaaatcatcgtcaacctgttccaccttctccagtctggtagcaaaaaggggtgtctcaggtttgctttattttattgtttgggcaattcctggaatccggcctgcttgtgggaggaggcaggggccggtccctcgagggtggtgggagctgccagagctggagggatggtctgggggaaggcggctgtacggtggaaaggctggttggggccagagtgggaaacgggatgcggacgtcaggcttcacccccgacccaggggggagtgggaaagctggggtagtagctgggacgaggcccgggg

SEQ ID NO: 59912 - DNA, 798 bp, Homo sapiens
gaagcgaaacaggctaggtcgaggctgggggtgaattggccgagggcacgagccggctcgaacacgcccgcgccgctgactggcgggtggggttgtcgacacgttcaacccgttctgctggctcgagaacgaagtaggccgtctcgctctgggtctccaggcccgcgaccgtccgccagtcgtcccgagtcagtagctccagcggtgcgtcagcgtctagccaggcctcgcccacgccggccttggtcgggcttcttgtagacgcgggcctggcgctattgaggccgttgctgcgcgggcgagtggcgcgctcccgtggcggggcggggtcgggcggggcaggggtccggggctatcgaggcggggccgaggttgcgctgggcagctgcgccgccgggcggacgtggcgcgccttgaggacgtcatcgcggtgcacgctcccctttggggcttgccggaagtccttgcccggggggcggggctgcgcctgcgtggttcgtcctcacgtggccgtcaagccctctagtgccttagattccagcgagctacgcaagcaatcctggcccagccgagcttgcttccccaaatcccgtaatccttgaccttattcccccaaagaagcggcctcccgggaaggagcgccctggcggagaagactcgaacggctcccacagccgggcgttgggggaaaggtgggcggtcttggtcgtgcgaggtcggggagggagggtcctccgctctccattgcggagcttcgctccgggaccaccgggggaccggacgccgggccgcgaagct

SEQ ID NO: 59913 - DNA, 362 bp, Homo sapiens
gtggtggaaagcctaaagatctgaaaacggtctcaagtgtcgtcttagcgattggctgactaaaccgaatgcaagccggagactgcacacgatgttgccgttaacagttacactgggccgggcagtcagaggcaggcggatcacctgaggtcaggagttcgagaacagcctggccaacatggtgaaaacccgtctctactaaaaatacaaaattagccgggcgtggtggcaggcgcctataatcccagctacttgggaggttgaggtaggagaatggcttgaactcaggaggcggaggttgcggtgagccgagatcgtgccactgcactccagccggctgacaagagcgaaactccttctca

SEQ ID NO: 59914 - DNA, 971 bp, Homo sapiens
aaataaggctagtacgaggcctggtgtgaatcggccgaggctggcgggtggggttgtcgacacgttcaacccgttctgctggctcgagaacgaagtaggccgtctcgctctgggtctccaggcccgcgaccgtccgccagtcgtcccgaggccactcttcacctccaccatgagcctggacatccagagcctggacatccagtgtgaggagctgagcgacgctagatgggccgagctcctccctctgctccagcagtgccaagtggtcaggctggacgactgtggcctcacggaagcacggtgcaaggacatcagctctgcacttcgagtcaaccctgcactggcagagctcaacctgcgcagcaacgagctgggcgatgtcggcgtgcattgcgtgctccagggcctgcagaccccctcctgcaagatccagaagctgagcctccagaactgctgcctgacgggggccggctgcggggtcctgtccagcacactacgcaccctgcccaccctgcaggagctgcacctcagcgacaacctcttgggggatgcgggcctgcagctgctctgcgaaggactcctggacccccagtgccgcctggaaaagctgcagctggagtattgcagcctctcggctgccagctgcgagcccctggcctccgtgctcagggccaagccggacttcaaggagctcacggttagcaacaacgacatcaatgaggctggcgtccgtgtgctgtgccagggcctgaaggactccccctgccagctggaggcgctcaagctggagagctgcggtgtgacatcagacaactgccgggacctgtgcggcattgtggcctccaaggcctcgctgcgggagctggccctgggcagcaacaagctgggtgatgtgggcatggcggagctgtggggtgtcccccggtcaggccggccgtggctgggtgggcctgcccgggggcggcgtccgg

SEQ ID NO: 59915 - DNA, 1697 bp, Homo sapiens
  misc_feature (407)..(407): n is a, c, g, or t
  misc_feature (412)..(412): n is a, c, g, or t
  misc_feature (483)..(483): n is a, c, g, or t
  misc_feature (489)..(489): n is a, c, g, or t
  misc_feature (491)..(491): n is a, c, g, or t
  misc_feature (540)..(540): n is a, c, g, or t
  misc_feature (578)..(578): n is a, c, g, or t
  misc_feature (608)..(608): n is a, c, g, or t
gccgaaccgtggctattcctggtcgctggcgcgagtccgagaaggtgtgcggatttgctaccagtggtggacgcgggggagccaggccggtcctcagagcgcagcaccgccgatcccgggaacccggagcgcgcactcggaggccggaggccagagctcggcgtgtcccgagcctatcactcgttccagcctgcgaccttgagagaatgtgaagagtgagtgagctctgacgtctcagagagtctgagccagcccccttggtgctccaatgcgaggaaacggagcggtaccatgagaaaggcggggtgcagcgggcaggcgcgcgtgcaaggcgagtcctgccgacaggagacccagggcaagctggccaaccaaccctaagaaagtagccctgtgaggcctcgaanccaanaagggcatacgtctagagagagagcaaggcggtggcctggccagagcagccccgcgtgacgaataccagancatcantngtgcacacggcacaggtagacaccgcacatggggagcaaggactcgccnagacatagagacttggtaggaaaggacgtgatacaagngatgggcaatcttgcggcaaggcgcacctngcgtccggcacggtagcgacgcaggtgcaaccattggagttgtcagacgtggttcctcggttgaaggcgaagacacgattcatttactggaggactgggagagccgtggtgtccgctgtcccgggcggcttgaaggactccccctgccagctggaggcgctcaagctggagagctgcggtgtgacatcagacaactgccgggacctgtgcggcattgtggcctccaaggcctcgctgcgggagctggccctgggcagcaacaagctgggtgatgtgggcatggcggagctgtgcccagggctgctccaccccagctccaggctcaggaccctgtggatctgggagtgtggcatcactgccaagggctgcggggatctgtgccgtgtcctcagggccaaggagagcctgaaggagctcagcctggccggcaacgagctgggggatgagggtgcccgactgctgtgtgagaccctgctggaacctggctgccagctggagtcgctgtgggtgaagtcctgcagcttcacagccgcctgctgctcccacttcagctcagtgctggcccagaacaggtttctcctggagctacagataagcaacaacaggctggaggatgcgggcgtgcgggagctgtgccagggcctgggccagcctggctctgtgctgcgggtgctctggttggccgactgcgatgtgagtgacagcagctgcagcagcctcgccgcaaccctgttggccaaccacagcctgcgtgagctggacctcagcaacaactgcctgggggacgccggcatcctgcagctggtggagagcgtccggcagccgggctgcctcctggagcagctggtcctgtacgacattactggtctgagagaatgaggacggtgaggcctggagaaggaaagccttctggaggtattccggaggactcagagggggctcctggaacggctgagaactgggcccaacctggggttactggttctaggtgagaaagcaaacggtttggcgttgattaaaatttgggggaaaagaaaaaaaaaagggttttgggcgtagagataaggcgggtgggaaattataaatcgc

SEQ ID NO: 59916 - DNA, 2449 bp, Homo sapiens
gaagcgaaacaggctaggtcgaggctgggggtgaattggccgagggcacgagccggctcgaacacgcccgcgccgctgactggcgggtggggttgtcgacacgttcaacccgttctgctggctcgagaacgaagtaggccgtctcgctctgggtctccaggcccgcgaccgtccgccagtcgtcccgagtcagtagctccagcggtgcgtcagcgtctagccaggcctcgcccacgccggccttggtcgggcttcttgtagacgcgggcctggcgctattgaggccgttgctgcgcgggcgagtggcgcgctcccgtggcggggcggggtcgggcggggcaggggtccggggctatcgaggcggggccgaggttgcgctgggcagctgcgccgccgggcggacgtggcgcgccttgaggacgtcatcgcggtgcacgctcccctttggggcttgccggaagtccttgcccggggggcggggctgcgcctgcgtggttcgtcctcacgtggccgtcaagccctctagtgccttagattccagcgagctacgcaagcaatcctggcccagccgagcttgcttccccaaatcccgtaatccttgaccttattcccccaaagaagcggcctcccgggaaggagcgccctggcggagaagactcgaacggctcccacagccgggcgttgggggaaaggcatgaagaactcttgactgacagaaacggagggtgtgtccaaagttttgaggacggccgagcggcgctccaaaacccgtcctcacagcctcgccccgttcgcctcagctacaacaaatcatcgtcaacctgttccaccttctccagtctggtagcaaaaaggggtgtctcaggccactcttcacctccaccatgagcctggacatccagagcctggacatccagtgtgaggagctgagcgacgctagatgggccgagctcctccctctgctccagcagtgccaagtggtcaggctggacgactgtggcctcacggaagcacggtgcaaggacatcagctctgcacttcgagtcaaccctgcactggcagagctcaacctgcgcagcaacgagctgggcgatgtcggcgtgcattgcgtgctccagggcctgcagaccccctcctgcaagatccagaagctgagcctccagaactgctgcctgacgggggccggctgcggggtcctgtccagcacactacgcaccctgcccaccctgcaggagctgcacctcagcgacaacctcttgggggatgcgggcctgcagctgctctgcgaaggactcctggacccccagtgccgcctggaaaagctgcagctggagtattgcagcctctcggctgccagctgcgagcccctggcctccgtgctcagggccaagccggacttcaaggagctcacggttagcaacaacgacatcaatgaggctggcgtccgtgtgctgtgccagggcctgaaggactccccctgccagctggaggcgctcaagctggagagctgcggtgtgacatcagacaactgccgggacctgtgcggcattgtggcctccaaggcctcgctgcgggagctggccctgggcagcaacaagctgggtgatgtgggcatggcggagctgtgcccagggctgctccaccccagctccaggctcaggaccctgtggatctgggagtgtggcatcactgccaagggctgcggggatctgtgccgtgtcctcagggccaaggagagcctgaaggagctcagcctggccggcaacgagctgggggatgagggtgcccgactgctgtgtgagaccctgctggaacctggctgccagctggagtcgctgtgggtgaagtcctgcagcttcacagccgcctgctgctcccacttcagctcagtgctggcccagaacaggtttctcctggagctacagataagcaacaacaggctggaggatgcgggcgtgcgggagctgtgccagggcctgggccagcctggctctgtgctgcgggtgctctggttggccgactgcgatgtgagtgacagcagctgcagcagcctcgccgcaaccctgttggccaaccacagcctgcgtgagctggacctcagcaacaactgcctgggggacgccggcatcctgcagctggtggagagcgtccggcagccgggctgcctcctggagcagctggtcctgtacgacatttactggtctgaggagatggaggaccggctgcaggccctggagaaggacaagccatccctgagggtcatctcctgaggctcttcctgctgctgctctccctggacgaccggcctcgaggcaaccctggggcccaccagcccctgccatgctctcaccctgcatatcctaggtttgaagagaaacgctcagatccgcttatttctgccagtatattttggacactttataatcattaaagcactttcttggcagga

SEQ ID NO: 59917 - DNA, 2276 bp, Homo sapiens
gaagcgaaacaggctaggtcgaggctgggggtgaattggccgagggcacgagccggctcgaacacgcccgcgccgctgactggcgggtggggttgtcgacacgttcaacccgttctgctggctcgagaacgaagtaggccgtctcgctctgggtctccaggcccgcgaccgtccgccagtcgtcccgagtcagtagctccagcggtgcgtcagcgtctagccaggcctcgcccacgccggccttggtcgggcttcttgtagacgcgggcctggcgctattgaggccgttgctgcgcgggcgagtggcgcgctcccgtggcggggcggggtcgggcggggcaggggtccggggctatcgaggcggggccgaggttgcgctgggcagctgcgccgccgggcggacgtggcgcgccttgaggacgtcatcgcggtgcacgctcccctttggggcttgccggaagtccttgcccggggggcggggctgcgcctgcgtggttcgtcctcacgtggccgtcaagccctctagtgccttagattccagcgagctacgcaagcaatcctggcccagccgagcttgcttccccaaatcccgtaatccttgaccttattcccccaaagaagcggcctcccgggaaggagcgccctggcggagaagactcgaacggctcccacagccgggcgttgggggaaaggccactcttcacctccaccatgagcctggacatccagagcctggacatccagtgtgaggagctgagcgacgctagatgggccgagctcctccctctgctccagcagtgccaagtggtcaggctggacgactgtggcctcacggaagcacggtgcaaggacatcagctctgcacttcgagtcaaccctgcactggcagagctcaacctgcgcagcaacgagctgggcgatgtcggcgtgcattgcgtgctccagggcctgcagaccccctcctgcaagatccagaagctgagcctccagaactgctgcctgacgggggccggctgcggggtcctgtccagcacactacgcaccctgcccaccctgcaggagctgcacctcagcgacaacctcttgggggatgcgggcctgcagctgctctgcgaaggactcctggacccccagtgccgcctggaaaagctgcagctggagtattgcagcctctcggctgccagctgcgagcccctggcctccgtgctcagggccaagccggacttcaaggagctcacggttagcaacaacgacatcaatgaggctggcgtccgtgtgctgtgccagggcctgaaggactccccctgccagctggaggcgctcaagctggagagctgcggtgtgacatcagacaactgccgggacctgtgcggcattgtggcctccaaggcctcgctgcgggagctggccctgggcagcaacaagctgggtgatgtgggcatggcggagctgtgcccagggctgctccaccccagctccaggctcaggaccctgtggatctgggagtgtggcatcactgccaagggctgcggggatctgtgccgtgtcctcagggccaaggagagcctgaaggagctcagcctggccggcaacgagctgggggatgagggtgcccgactgctgtgtgagaccctgctggaacctggctgccagctggagtcgctgtgggtgaagtcctgcagcttcacagccgcctgctgctcccacttcagctcagtgctggcccagaacaggtttctcctggagctacagataagcaacaacaggctggaggatgcgggcgtgcgggagctgtgccagggcctgggccagcctggctctgtgctgcgggtgctctggttggccgactgcgatgtgagtgacagcagctgcagcagcctcgccgcaaccctgttggccaaccacagcctgcgtgagctggacctcagcaacaactgcctgggggacgccggcatcctgcagctggtggagagcgtccggcagccgggctgcctcctggagcagctggtcctgtacgacatttactggtctgaggagatggaggaccggctgcaggccctggagaaggacaagccatccctgagggtcatctcctgaggctcttcctgctgctgctctccctggacgaccggcctcgaggcaaccctggggcccaccagcccctgccatgctctcaccctgcatatcctaggtttgaagagaaacgctcagatccgcttatttctgccagtatattttggacactttataatcattaaagcactttcttggcagga

SEQ ID NO: 59918 - DNA, 2353 bp, Homo sapiens
gaagcgaaacaggctaggtcgaggctgggggtgaattggccgagggcacgagccggctcgaacacgcccgcgccgctgactggcgggtggggttgtcgacacgttcaacccgttctgctggctcgagaacgaagtaggccgtctcgctctgggtctccaggcccgcgaccgtccgccagtcgtcccgagtcagtagctccagcggtgcgtcagcgtctagccaggcctcgcccacgccggccttggtcgggcttcttgtagacgcgggcctggcgctattgaggccgttgctgcgcgggcgagtggcgcgctcccgtggcggggcggggtcgggcggggcaggggtccggggctatcgaggcggggccgaggttgcgctgggcagctgcgccgccgggcggacgtggcgcgccttgaggacgtcatcgcggtgcacgctcccctttggggcttgccggaagtccttgcccggggggcggggctgcgcctgcgtggttcgtcctcacgtggccgtcaagccctctagtgccttagattccagcgagctacgcaagcaatcctggcccagccgagcttgcttccccaaatcccgtaatccttgaccttattcccccaaagaagcggcctcccgggaaggagcgccctggcggagaagactcgaacggctcccacagccgggcgttgggggaaagaatctccggcctgtgaaactgtgaggggattcggccaagacgtcctcttccctctgcctcccacccaggccactcttgccactcttcacctccaccatgagcctggacatccagagcctggacatccagtgtgaggagctgagcgacgctagatgggccgagctcctccctctgctccagcagtgccaagtggtcaggctggacgactgtggcctcacggaagcacggtgcaaggacatcagctctgcacttcgagtcaaccctgcactggcagagctcaacctgcgcagcaacgagctgggcgatgtcggcgtgcattgcgtgctccagggcctgcagaccccctcctgcaagatccagaagctgagcctccagaactgctgcctgacgggggccggctgcggggtcctgtccagcacactacgcaccctgcccaccctgcaggagctgcacctcagcgacaacctcttgggggatgcgggcctgcagctgctctgcgaaggactcctggacccccagtgccgcctggaaaagctgcagctggagtattgcagcctctcggctgccagctgcgagcccctggcctccgtgctcagggccaagccggacttcaaggagctcacggttagcaacaacgacatcaatgaggctggcgtccgtgtgctgtgccagggcctgaaggactccccctgccagctggaggcgctcaagctggagagctgcggtgtgacatcagacaactgccgggacctgtgcggcattgtggcctccaaggcctcgctgcgggagctggccctgggcagcaacaagctgggtgatgtgggcatggcggagctgtgcccagggctgctccaccccagctccaggctcaggaccctgtggatctgggagtgtggcatcactgccaagggctgcggggatctgtgccgtgtcctcagggccaaggagagcctgaaggagctcagcctggccggcaacgagctgggggatgagggtgcccgactgctgtgtgagaccctgctggaacctggctgccagctggagtcgctgtgggtgaagtcctgcagcttcacagccgcctgctgctcccacttcagctcagtgctggcccagaacaggtttctcctggagctacagataagcaacaacaggctggaggatgcgggcgtgcgggagctgtgccagggcctgggccagcctggctctgtgctgcgggtgctctggttggccgactgcgatgtgagtgacagcagctgcagcagcctcgccgcaaccctgttggccaaccacagcctgcgtgagctggacctcagcaacaactgcctgggggacgccggcatcctgcagctggtggagagcgtccggcagccgggctgcctcctggagcagctggtcctgtacgacatttactggtctgaggagatggaggaccggctgcaggccctggagaaggacaagccatccctgagggtcatctcctgaggctcttcctgctgctgctctccctggacgaccggcctcgaggcaaccctggggcccaccagcccctgccatgctctcaccctgcatatcctaggtttgaagagaaacgctcagatccgcttatttctgccagtatattttggacactttataatcattaaagcactttcttggcagga

SEQ ID NO: 59919 - DNA, 2425 bp, Homo sapiens
gaagcgaaacaggctaggtcgaggctgggggtgaattggccgagggcacgagccggctcgaacacgcccgcgccgctgactggcgggtggggttgtcgacacgttcaacccgttctgctggctcgagaacgaagtaggccgtctcgctctgggtctccaggcccgcgaccgtccgccagtcgtcccgagtcagtagctccagcggtgcgtcagcgtctagccaggcctcgcccacgccggccttggtcgggcttcttgtagacgcgggcctggcgctattgaggccgttgctgcgcgggcgagtggcgcgctcccgtggcggggcggggtcgggcggggcaggggtccggggctatcgaggcggggccgaggttgcgctgggcagctgcgccgccgggcggacgtggcgcgccttgaggacgtcatcgcggtgcacgctcccctttggggcttgccggaagtccttgcccggggggcggggctgcgcctgcgtggttcgtcctcacgtggccgtcaagccctctagtgccttagattccagcgagctacgcaagcaatcctggcccagccgagcttgcttccccaaatcccgtaatccttgaccttattcccccaaagaagcggcctcccgggaaggagcgccctggcggagaagactcgaacggctcccacagccgggcgttgggggaaagaaacggagggtgtgtccaaagttttgaggacggccgagcggcgctccaaaacccgtcctcacagcctcgccccgttcgcctcagctacaacaaatcatcgtcaacctgttccaccttctccagtctggtagcaaaaaggggtgtctcaggccactcttcacctccaccatgagcctggacatccagagcctggacatccagtgtgaggagctgagcgacgctagatgggccgagctcctccctctgctccagcagtgccaagtggtcaggctggacgactgtggcctcacggaagcacggtgcaaggacatcagctctgcacttcgagtcaaccctgcactggcagagctcaacctgcgcagcaacgagctgggcgatgtcggcgtgcattgcgtgctccagggcctgcagaccccctcctgcaagatccagaagctgagcctccagaactgctgcctgacgggggccggctgcggggtcctgtccagcacactacgcaccctgcccaccctgcaggagctgcacctcagcgacaacctcttgggggatgcgggcctgcagctgctctgcgaaggactcctggacccccagtgccgcctggaaaagctgcagctggagtattgcagcctctcggctgccagctgcgagcccctggcctccgtgctcagggccaagccggacttcaaggagctcacggttagcaacaacgacatcaatgaggctggcgtccgtgtgctgtgccagggcctgaaggactccccctgccagctggaggcgctcaagctggagagctgcggtgtgacatcagacaactgccgggacctgtgcggcattgtggcctccaaggcctcgctgcgggagctggccctgggcagcaacaagctgggtgatgtgggcatggcggagctgtgcccagggctgctccaccccagctccaggctcaggaccctgtggatctgggagtgtggcatcactgccaagggctgcggggatctgtgccgtgtcctcagggccaaggagagcctgaaggagctcagcctggccggcaacgagctgggggatgagggtgcccgactgctgtgtgagaccctgctggaacctggctgccagctggagtcgctgtgggtgaagtcctgcagcttcacagccgcctgctgctcccacttcagctcagtgctggcccagaacaggtttctcctggagctacagataagcaacaacaggctggaggatgcgggcgtgcgggagctgtgccagggcctgggccagcctggctctgtgctgcgggtgctctggttggccgactgcgatgtgagtgacagcagctgcagcagcctcgccgcaaccctgttggccaaccacagcctgcgtgagctggacctcagcaacaactgcctgggggacgccggcatcctgcagctggtggagagcgtccggcagccgggctgcctcctggagcagctggtcctgtacgacatttactggtctgaggagatggaggaccggctgcaggccctggagaaggacaagccatccctgagggtcatctcctgaggctcttcctgctgctgctctccctggacgaccggcctcgaggcaaccctggggcccaccagcccctgccatgctctcaccctgcatatcctaggtttgaagagaaacgctcagatccgcttatttctgccagtatattttggacactttataatcattaaagcactttcttggcagga

SEQ ID NO: 59920 - DNA, 1983 bp, Homo sapiens
gaagcgaaacaggctaggtcgaggctgggggtgaattggccgagggcacgagccggctcgaacacgcccgcgccgctgactggcgggtggggttgtcgacacgttcaacccgttctgctggctcgagaacgaagtaggccgtctcgctctgggtctccaggcccgcgaccgtccgccagtcgtcccgaggcatgaagaactcttgactgacagaaacggagggtgtgtccaaagttttgaggacggccgagcggcgctccaaaacccgtcctcacagcctcgccccgttcgcctcagctacaacaaatcatcgtcaacctgttccaccttctccagtctggtagcaaaaaggggtgtctcagaatctccggcctgtgaaactgtgaggggattcggccaagacgtcctcttccctctgcctcccacccaggccactcttctggacatccagtgtgaggagctgagcgacgctagatgggccgagctcctccctctgctccagcagtgccaagtggtcaggctggacgactgtggcctcacggaagcacggtgcaaggacatcagctctgcacttcgagtcaaccctgcactggcagagctcaacctgcgcagcaacgagctgggcgatgtcggcgtgcattgcgtgctccagggcctgcagaccccctcctgcaagatccagaagctgagcctccagaactgctgcctgacgggggccggctgcggggtcctgtccagcacactacgcaccctgcccaccctgcaggagctgcacctcagcgacaacctcttgggggatgcgggcctgcagctgctctgcgaaggactcctggacccccagtgccgcctggaaaagctgcagctggagtattgcagcctctcggctgccagctgcgagcccctggcctccgtgctcagggccaagccggacttcaaggagctcacggttagcaacaacgacatcaatgaggctggcgtccgtgtgctgtgccagggcctgaaggactccccctgccagctggaggcgctcaagctggagagctgcggtgtgacatcagacaactgccgggacctgtgcggcattgtggcctccaaggcctcgctgcgggagctggccctgggcagcaacaagctgggtgatgtgggcatggcggagctgtgcccagggctgctccaccccagctccaggctcaggaccctgtggatctgggagtgtggcatcactgccaagggctgcggggatctgtgccgtgtcctcagggccaaggagagcctgaaggagctcagcctggccggcaacgagctgggggatgagggtgcccgactgctgtgtgagaccctgctggaacctggctgccagctggagtcgctgtgggtgaagtcctgcagcttcacagccgcctgctgctcccacttcagctcagtgctggcccagaacaggtttctcctggagctacagataagcaacaacaggctggaggatgcgggcgtgcgggagctgtgccagggcctgggccagcctggctctgtgctgcgggtgctctggttggccgactgcgatgtgagtgacagcagctgcagcagcctcgccgcaaccctgttggccaaccacagcctgcgtgagctggacctcagcaacaactgcctgggggacgccggcatcctgcagctggtggagagcgtccggcagccgggctgcctcctggagcagctggtcctgtacgacatttactggtctgaggagatggaggaccggctgcaggccctggagaaggacaagccatccctgagggtcatctcctgaggctcttcctgctgctgctctccctggacgaccggcctcgaggcaaccctggggcccaccagcccctgccatgctctcaccctgcatatcctaggtttgaagagaaacgctcagatccgcttatttctgccagtatattttggacactttataatcattaaagcactttcttggcagga

SEQ ID NO: 59921 - DNA, 1793 bp, Homo sapiens
gaagcgaaacaggctaggtcgaggctgggggtgaattggccgagggcacgagccggctcgaacacgcccgcgccgctgactggcgggtggggttgtcgacacgttcaacccgttctgctggctcgagaacgaagtaggccgtctcgctctgggtctccaggcccgcgaccgtccgccagtcgtcccgaggccactcttcacctccaccatgagcctggacatccagagcctggacatccagtgtgaggagctgagcgacgctagatgggccgagctcctccctctgctccagcagtgccaagtggtcaggctggacgactgtggcctcacggaagcacggtgcaaggacatcagctctgcacttcgagtcaaccctgcactggcagagctcaacctgcgcagcaacgagctgggcgatgtcggcgtgcattgcgtgctccagggcctgcagaccccctcctgcaagatccagaagctgagcctccagaactgctgcctgacgggggccggctgcggggtcctgtccagcacactacgcaccctgcccaccctgcaggagctgcacctcagcgacaacctcttgggggatgcgggcctgcagctgctctgcgaaggactcctggacccccagtgccgcctggaaaagctgcagctggagtattgcagcctctcggctgccagctgcgagcccctggcctccgtgctcagggccaagccggacttcaaggagctcacggttagcaacaacgacatcaatgaggctggcgtccgtgtgctgtgccagggcctgaaggactccccctgccagctggaggcgctcaagctggagagctgcggtgtgacatcagacaactgccgggacctgtgcggcattgtggcctccaaggcctcgctgcgggagctggccctgggcagcaacaagctgggtgatgtgggcatggcggagctgtgcccagggctgctccaccccagctccaggctcaggaccctgtggatctgggagtgtggcatcactgccaagggctgcggggatctgtgccgtgtcctcagggccaaggagagcctgaaggagctcagcctggccggcaacgagctgggggatgagggtgcccgactgctgtgtgagaccctgctggaacctggctgccagctggagtcgctgtgggtgaagtcctgcagcttcacagccgcctgctgctcccacttcagctcagtgctggcccagaacaggtttctcctggagctacagataagcaacaacaggctggaggatgcgggcgtgcgggagctgtgccagggcctgggccagcctggctctgtgctgcgggtgctctggttggccgactgcgatgtgagtgacagcagctgcagcagcctcgccgcaaccctgttggccaaccacagcctgcgtgagctggacctcagcaacaactgcctgggggacgccggcatcctgcagctggtggagagcgtccggcagccgggctgcctcctggagcagctggtcctgtacgacatttactggtctgaggagatggaggaccggctgcaggccctggagaaggacaagccatccctgagggtcatctcctgaggctcttcctgctgctgctctccctggacgaccggcctcgaggcaaccctggggcccaccagcccctgccatgctctcaccctgcatatcctaggtttgaagagaaacgctcagatccgcttatttctgccagtatattttggacactttataatcattaaagcactttcttggcaggaaaaaaaccccctaaaaaaaa

SEQ ID NO: 59922 - DNA, 1857 bp, Homo sapiens
gaagcgaaacaggctaggtcgaggctgggggtgaattggccgagggcacgagccggctcgaacacgcccgcgccgctgactggcgggtggggttgtcgacacgttcaacccgttctgctggctcgagaacgaagtaggccgtctcgctctgggtctccaggcccgcgaccgtccgccagtcgtcccgaggccactcttcacctccaccatgagcctggacatccagagcctggacatccagtgtgaggagctgagcgacgctagatgggccgagctcctccctctgctccagcagtgccaagtggtcaggttgtaacctgcacgtggggtggtggtggaggctgaggccagtgctgtctgcgtggtccacatgaccctggggtctgctcacaggctggacgactgtggcctcacggaagcacggtgcaaggacatcagctctgcacttcgagtcaaccctgcactggcagagctcaacctgcgcagcaacgagctgggcgatgtcggcgtgcattgcgtgctccagggcctgcagaccccctcctgcaagatccagaagctgagcctccagaactgctgcctgacgggggccggctgcggggtcctgtccagcacactacgcaccctgcccaccctgcaggagctgcacctcagcgacaacctcttgggggatgcgggcctgcagctgctctgcgaaggactcctggacccccagtgccgcctggaaaagctgcagctggagtattgcagcctctcggctgccagctgcgagcccctggcctccgtgctcagggccaagccggacttcaaggagctcacggttagcaacaacgacatcaatgaggctggcgtccgtgtgctgtgccagggcctgaaggactccccctgccagctggaggcgctcaagctggagagctgcggtgtgacatcagacaactgccgggacctgtgcggcattgtggcctccaaggcctcgctgcgggagctggccctgggcagcaacaagctgggtgatgtgggcatggcggagctgtgcccagggctgctccaccccagctccaggctcaggaccctgtggatctgggagtgtggcatcactgccaagggctgcggggatctgtgccgtgtcctcagggccaaggagagcctgaaggagctcagcctggccggcaacgagctgggggatgagggtgcccgactgctgtgtgagaccctgctggaacctggctgccagctggagtcgctgtgggtgaagtcctgcagcttcacagccgcctgctgctcccacttcagctcagtgctggcccagaacaggtttctcctggagctacagataagcaacaacaggctggaggatgcgggcgtgcgggagctgtgccagggcctgggccagcctggctctgtgctgcgggtgctctggttggccgactgcgatgtgagtgacagcagctgcagcagcctcgccgcaaccctgttggccaaccacagcctgcgtgagctggacctcagcaacaactgcctgggggacgccggcatcctgcagctggtggagagcgtccggcagccgggctgcctcctggagcagctggtcctgtacgacatttactggtctgaggagatggaggaccggctgcaggccctggagaaggacaagccatccctgagggtcatctcctgaggctcttcctgctgctgctctccctggacgaccggcctcgaggcaaccctggggcccaccagcccctgccatgctctcaccctgcatatcctaggtttgaagagaaacgctcagatccgcttatttctgccagtatattttggacactttataatcattaaagcactttcttggcagga

SEQ ID NO: 59923 - DNA, 1826 bp, Homo sapiens
gaagcgaaacaggctaggtcgaggctgggggtgaattggccgagggcacgagccggctcgaacacgcccgcgccgctgactggcgggtggggttgtcgacacgttcaacccgttctgctggctcgagaacgaagtaggccgtctcgctctgggtctccaggcccgcgaccgtccgccagtcgtcccgagttccacctccacgcagtgatgccgtggcactactcgcatgagtcctaggaacaatcgcagctgtcgatgtgagcatgatgcggaacggcgtacgaatgaggctcgacgtgctccatccacgtcttagtctctcagcctaggttgccagagttgggttctaggtgctaggcacgaactggtagtgcgcgtcgacgggaagcacggtgcaaggacatcagctctgcacttcgagtcaaccctgcactggcagagctcaacctgcgcagcaacgagctgggcgatgtcggcgtgcattgcgtgctccagggcctgcagaccccctcctgcaagatccagaagctgagcctccagaactgctgcctgacgggggccggctgcggggtcctgtccagcacactacgcaccctgcccaccctgcaggagctgcacctcagcgacaacctcttgggggatgcgggcctgcagctgctctgcgaaggactcctggacccccagtgccgcctggaaaagctgcagctggagtattgcagcctctcggctgccagctgcgagcccctggcctccgtgctcagggccaagccggacttcaaggagctcacggttagcaacaacgacatcaatgaggctggcgtccgtgtgctgtgccagggcctgaaggactccccctgccagctggaggcgctcaagctggagagctgcggtgtgacatcagacaactgccgggacctgtgcggcattgtggcctccaaggcctcgctgcgggagctggccctgggcagcaacaagctgggtgatgtgggcatggcggagctgtgcccagggctgctccaccccagctccaggctcaggaccctgtggatctgggagtgtggcatcactgccaagggctgcggggatctgtgccgtgtcctcagggccaaggagagcctgaaggagctcagcctggccggcaacgagctgggggatgagggtgcccgactgctgtgtgagaccctgctggaacctggctgccagctggagtcgctgtgggtgaagtcctgcagcttcacagccgcctgctgctcccacttcagctcagtgctggcccagaacaggtttctcctggagctacagataagcaacaacaggctggaggatgcgggcgtgcgggagctgtgccagggcctgggccagcctggctctgtgctgcgggtgctctggttggccgactgcgatgtgagtgacagcagctgcagcagcctcgccgcaaccctgttggccaaccacagcctgcgtgagctggacctcagcaacaactgcctgggggacgccggcatcctgcagctggtggagagcgtccggcagccgggctgcctcctggagcagctggtcctgtacgacatttactggtctgaggagatggaggaccggctgcaggccctggagaaggacaagccatccctgagggtcatctcctgaggctcttcctgctgctgctctccctggacgaccggcctcgaggcaaccctggggcccaccagcccctgccatgctctcaccctgcatatcctaggtttgaagagaaacgctcagatccgcttatttctgccagtatattttggacactttataatcattaaagcactttcttggcagga

SEQ ID NO: 59924 - DNA, 1980 bp, Homo sapiens
  misc_feature (1980)..(1980): n is a, c, g, or t
gaagcgaaacaggctaggtcgaggctgggggtgaattggccgagggcacgagccggctcgaacacgcccgcgccgctgactggcgggtggggttgtcgacacgttcaacccgttctgctggctcgagaacgaagtaggccgtctcgctctgggtctccaggcccgcgaccgtccgccagtcgtcccgaggccactcttcacctccaccatgagcctggacatccagagcctggacatccagtgtgaggagctgagcgacgctagatgggccgagctcctccctctgctccagcagtgccaagtggtcaggctggacgactgtggcctcacggaagcacggtgcaaggacatcagctctgcacttcgagtcaaccctgcactggcagagctcaacctgcgcagcaacgagctgggcgatgtcggcgtgcattgcgtgctccagggcctgcagaccccctcctgcaagatccagaagctgagcctccagaactgctgcctgacgggggccggctgcggggtcctgtccagcacactacgcaccctgcccaccctgcaggagctgcacctcagcgacaacctcttgggggatgcgggcctgcagctgctctgcgaaggactcctggacccccagtgccgcctggaaaagctgcagctggagtattgcagcctctcggctgccagctgcgagcccctggcctccgtgctcagggccaagccggacttcaaggagctcacggttagcaacaacgacatcaatgaggctggcgtccgtgtgctgtgccagggcctgaaggactccccctgccagctggaggcgctcaagctggagagctgcggtgtgacatcagacaactgccgggacctgtgcggcattgtggcctccaaggcctcgctgcgggagctggccctgggcagcaacaagctgggtgatgtgggcatggcggagctgtgcccagggctgctccaccccagctccaggctcaggaccctgtggatctgggagtgtggcatcactgccaagggctgcggggatctgtgccgtgtcctcagggccaaggagagcctgaaggagctcagcctggccggcaacgagctgggggatgagggtgcccgactgctgtgtgagaccctgctggaacctggctgccagctggagtcgctgtgggtgaagtcctgcagcttcacagccgcctgctgctcccacttcagctcagtgctggcccagaacaggtttctcctggagctacagataagcaacaacaggctggaggatgcgggcgtgcgggagctgtgccagggcctgggccagcctggctctgtgctgcgggtgctctggttggccgactgcgatgtgagtgacagcagctgcagcagcctcgccgcaaccctgttggccaaccacagcctgcgtgagctggacctcagcaacaactgcctgggggacgccggcatcctgcagctggtggagagcgtccggcagccgggctgcctcctggagcagctggtcctgtacgacatttactggtctgaggagatggaggaccggctgcaggccctggagaaggacaagccatccctgagggtcatctcctgaggctcttcctgctgctgctctccctggacgaccggcctcgaggcaaccctggggcccaccagcccctgccatgctctcaccctgcatatcctaggtttgaagagaaacgctcagatccgcttatttctgccagtatattttggacactttataatcattaaagcactttcttggcaggaaaaaaaaaaaaaaaactaataaaattacaaaatttatcaatttacctattaatttcattacactaaataatctttcttcttacatcttatattcataaaaataaattggccggggttttaacaacgtttgatttggaaacccttggttttccaaattaaaccgtttggacttcccctttggcccgttggctagcggtcccctttccn

SEQ ID NO: 59925 - DNA, 2376 bp, Homo sapiens
gaagcgaaacaggctaggtcgaggctgggggtgaattggccgagggcacgagccggctcgaacacgcccgcgccgctgactggcgggtggggttgtcgacacgttcaacccgttctgctggctcgagaacgaagtaggccgtctcgctctgggtctccaggcccgcgaccgtccgccagtcgtcccgagtcagtagctccagcggtgcgtcagcgtctagccaggcctcgcccacgccggccttggtcgggcttcttgtagacgcgggcctggcgctattgaggccgttgctgcgcgggcgagtggcgcgctcccgtggcggggcggggtcgggcggggcaggggtccggggctatcgaggcggggccgaggttgcgctgggcagctgcgccgccgggcggacgtggcgcgccttgaggacgtcatcgcggtgcacgctcccctttggggcttgccggaagtccttgcccggggggcggggctgcgcctgcgtggttcgtcctcacgtggccgtcaagccctctagtgccttagattccagcgagctacgcaagcaatcctggcccagccgagcttgcttccccaaatcccgtaatccttgaccttattcccccaaagaagcggcctcccgggaaggagcgccctggcggagaagactcgaacggctcccacagccgggcgttgggggaaaggcatgaagaactcttgactgacagaaacggagggtgtgtccaaagttttgaggacggccgagcggcgctccaaaacccgtcctcacagcctcgccccgttcgcctcagctacaacaaatcatcgtcaacctgttccaccttctccagtctggtagcaaaaaggggtgtctcaggccactcttcacctccaccatgagcctggacatccagagcctggacatccagtgtgaggagctgagcgacgctagatgggccgagctcctccctctgctccagcagtgccaagtggtcaggctggacgactgtggcctcacggaagcacggtgcaaggacatcagctctgcacttcgagtcaaccctgcactggcagagctcaacctgcgcagcaacgagctgggcgatgtcggcgtgcattgcgtgctccagggcctgcagaccccctcctgcaagatccagaagctgagcaggagctgcacctcagcgacaacctcttgggggatgcgggcctgcagctgctctgcgaaggactcctggacccccagtgccgcctggaaaagctgcagctggagtattgcagcctctcggctgccagctgcgagcccctggcctccgtgctcagggccaagccggacttcaaggagctcacggttagcaacaacgacatcaatgaggctggcgtccgtgtgctgtgccagggcctgaaggactccccctgccagctggaggcgctcaagctggagagctgcggtgtgacatcagacaactgccgggacctgtgcggcattgtggcctccaaggcctcgctgcgggagctggccctgggcagcaacaagctgggtgatgtgggcatggcggagctgtgcccagggctgctccaccccagctccaggctcaggaccctgtggatctgggagtgtggcatcactgccaagggctgcggggatctgtgccgtgtcctcagggccaaggagagcctgaaggagctcagcctggccggcaacgagctgggggatgagggtgcccgactgctgtgtgagaccctgctggaacctggctgccagctggagtcgctgtgggtgaagtcctgcagcttcacagccgcctgctgctcccacttcagctcagtgctggcccagaacaggtttctcctggagctacagataagcaacaacaggctggaggatgcgggcgtgcgggagctgtgccagggcctgggccagcctggctctgtgctgcgggtgctctggttggccgactgcgatgtgagtgacagcagctgcagcagcctcgccgcaaccctgttggccaaccacagcctgcgtgagctggacctcagcaacaactgcctgggggacgccggcatcctgcagctggtggagagcgtccggcagccgggctgcctcctggagcagctggtcctgtacgacatttactggtctgaggagatggaggaccggctgcaggccctggagaaggacaagccatccctgagggtcatctcctgaggctcttcctgctgctgctctccctggacgaccggcctcgaggcaaccctggggcccaccagcccctgccatgctctcaccctgcatatcctaggtttgaagagaaacgctcagatccgcttatttctgccagtatattttggacactttataatcattaaagcactttcttggcagga

SEQ ID NO: 59926 - DNA, 1260 bp, Homo sapiens
tcggactgtatctcgggccctactctcgtggccctgtggccaggagctgcacctcagcgacaacctcttgggggatgcgggcctgcagctgctctgcgaaggactcctggacccccagtgccgcctggaaaagctgcagctggagtattgcagcctctcggctgccagctgcgagcccctggcctccgtgctcagggccaagccggacttcaaggagctcacggttagcaacaacgacatcaatgaggctggcgtccgtgtgctgtgccagggcctgaaggactccccctgccagctggaggcgctcaagctggagagctgcggtgtgacatcagacaactgccgggacctgtgcggcattgtggcctccaaggcctcgctgcgggagctggccctgggcagcaacaagctgggtgatgtgggcatggcggagctgtgcccagggctgctccaccccagctccaggctcaggaccctgtggatctgggagtgtggcatcactgccaagggctgcggggatctgtgccgtgtcctcagggccaaggagagcctgaaggagctcagcctggccggcaacgagctgggggatgagggtgcccgactgctgtgtgagaccctgctggaacctggctgccagctggagtcgctgtgggtgaagtcctgcagcttcacagccgcctgctgctcccacttcagctcagtgctggcccagaacaggtttctcctggagctacagataagcaacaacaggctggaggatgcgggcgtgcgggagctgtgccagggcctgggccagcctggctctgtgctgcgggtgctctggttggccgactgcgatgtgagtgacagcagctgcagcagcctcgccgcaaccctgttggccaaccacagcctgcgtgagctggacctcagcaacaactgcctgggggacgccggcatcctgcagctggtggagagcgtccggcagccgggctgcctcctggagcagctggtcctgtacgacatttactggtctgaggagatggaggaccggctgcaggccctggagaaggacaagccatccctgagggtcatctcctgaggctcttcctgctgctgctctccctggacgaccggcctcgaggcaaccctggggcccaccagcccctgccatgctctcaccctgcatatcctaggtttgaagagaaacgctcagatccgcttatttctgccagtatattttggacactttataatcattaaagcactttcttggcagga

SEQ ID NO: 59927 - DNA, 1540 bp, Homo sapiens
gaagcgaaacaggctaggtcgaggctgggggtgaattggccgagggcacgagccggctcgaacacgcccgcgccgctgactggcgggtggggttgtcgacacgttcaacccgttctgctggctcgagaacgaagtaggccgtctcgctctgggtctccaggcccgcgaccgtccgccagtcgtcccgaggccactcttcacctccaccatgagcctggacatccagagcctggacatccagtgtgaggagctgagcgacgctagatgggccgagctcctccctctgctccagcagtgccaagtggtcaggctggacgactgtggcctcacggaagcacggtgcaaggacatcagctctgcacttcgagtcaaccctgcactggcagagctcaacctgcgcagcaacgagctgggcgatgtcggcgtgcattgcgtgctccagggcctgcagaccccctcctgcaagatccagaagctgagcctccagaactgctgcctgacgggggccggctgcggggtcctgtccagcacactacgcaccctgcccaccctgcaggagctgcacctcagcgacaacctcttgggggatgcgggcctgcagctgctctgcgaaggactcctggacccccagtgccgcctggaaaagctgcagctggagtattgcagcctctcggctgccagctgcgagcccctggcctccgtgctcagggccaagccggacttcaaggagctcacggttagcaacaacgacatcaatgaggctggcgtccgtgtgctgtgccagggcctgaaggactccccctgccagctggaggcgctcaagctggagagctgcggtgtgacatcagacaactgccgggacctgtgcggcattgtggcctccaaggcctcgctgcgggagctggccctgggcagcaacaagctgggtgatgtgggcatggcggagctgtgcccagggctgctccaccccagctccaggctcaggaccctgtggatctgggagtgtggcatcactgccaagggctgcggggatctgtgccgtgtcctcagggccaaggagagcctgaaggagctcagcctggccggcaacgagctgggggatgagggtgcccgactgctgtgtgagaccctgctggaacctggctgccagctggagtcgctgtgggtgaagtcctgcagcttcacagccgcctgctgctcccacttcagctcagtgctggcccagaacaggtttctcctggagctacagataagcaacaacaggctggaggatgcgggcgtgcgggagctgtgccagggcctgggccagcctggctctgtgctgcgggtgctctggttggccgactgcgatgtgagtgacagcagctgcagcagcctcgccgcaaccctgttggccaaccacagcctgcgtgagctggacctcagcaacaactgcctgggggacgccggcatcctgcagctggtggagagcgtccggcagccgggctgcctcctggagcagctggtgtatgtgcacgcgctgggcgggtggtgcggccag

SEQ ID NO: 59928 - DNA, 426 bp, Homo sapiens
aaaggagaagtgagttgtagactgtgttggcagacacaaagtaaaataataatccagacaaatcaaccaaacccccttgtaatgcacttaccatcctctactttatatggttattttgaggattaaaagattgaggattaaaagagagattacgtataaagtgcctagtatctgcgctcagtaaacatatgcttacattcctcttccccttgtctgtatacatgtaaaggcgagcttagctaaacgttctaacttctcaaagatctcttgcacacggcccacgttaggacagtgacataaaaatatgaacgaagaagggccaggaagacagtgccttcctctacccaactagatatttctttctttagaaagaacaatacgttgtgaaccacagtttacctgctagtggaactgaaatgctgaggg

SEQ ID NO: 59929 - DNA, 192 bp, Homo sapiens
caagcaattggagacttttttcctgttatttttctaccatttatttctcatttcattatattatggtcagagaatatattttgaatgatttcatttattaatttttaaaaataacattaaaaaattttttaaaatgtgaatataccacatacagtataaagattgtacattctgtttttggacagttttcta

SEQ ID NO: 59930 - DNA, 570 bp, Homo sapiens
ttcaaaaatagaatttaaatagtgaatttgccttttatttaaaagttgacaagttttgtatatttataaaattaacaaaattgacatcatactatccatatcacaagactcttgtgttgtattttaaaggaaaacacacacacagcatacatacatttggattggggccagatttagactccaggggcacagtgttctgtaccttaaattacaatcagatgtattttagcacagatcaaattttcagtctgaagttggtgagaagcctaattatttgaccaggttactatttatgtagaccattctgtggctggctgtggttaatccacagctggcagaatgctagctatgggaggtttttatttgatgctggaacagtttggggagaaatagagggggaaagctttaaaatcttctcattaaatgaaagactaaaaagcaagacagtacatccatattactatggagacaagatgctgtataaactgttcgttttaattctccaagtgacagaaatagcaaagcagcagcttggatgctcatagtttgcaagtgataggatacttggtt

SEQ ID NO: 59931 - DNA, 618 bp, Homo sapiens
acgaggtgggctagagggaggcagacatggggaccatgaagacccaaagggatggccactccctggggcggtggtcactggtgctcctgctgctgggcctggtgatgcctctggccatcattgcccaggtcctcagctacaaggaagctgtgcttcgtgctatagatggcatcaaccagcggtcctcggatgctaacctctaccgcctcctggacctggaccccaggcccacgatggatggggacccagacacgccaaagcctgtgagcttcacagtgaaggagacagtgtgccccaggacgacacagcagtcaccagaggattgtgacttcaagaaggacgggctggtgaagcggtgtatggggacagtgaccctcaaccaggccaggggctcctttgacatcagttgtgataaggataacaagagatttgccctgctgggtgatttcttccggaaatctaaagagaagattggcaaagagtttaaaagaattgtccagagaatcaaggattttttgcggaatcttgtacccaggacagagtcctagtgtgtgccctaccctggctcaggcttctgggctctgagaaataaactatgagagcaatttcatcaggctt

SEQ ID NO: 59932 - DNA, 591 bp, Homo sapiens
gttgtagtgatctagaggatcccgaattcggctctctggggcggtggtcactggtgctcctgctgctgggcctggtgatgcctctggccatcattgcccaggtcctcagctacaaggaagctgtgcttcgtgctatagatggcatcaaccagcggtcctcggatgctaacctctaccgcctcctggacctggaccccaggcccacgatggatggggacccagacacgccaaagcctgtgagcttcacagtgaaggagacagtgtgccccaggacgacacagcagtcaccagaggattgtgacttcaagaaggacgggctggtgaagcggtgtatggggacagtgaccctcaaccaggccaggggctcctttgacatcagttgtgataaggataacaagagatttgccctgctgggtgatttcttccggaaatctaaagagaagattggcaaagagtttaaaagaattgtccagagaatcaaggattttttgcggaatcttgtacccaggacagagtcctagtgtgtgccctaccctggctcaggcttctgggctctgagaaataaactatgagagcaatttcatcaggctt

SEQ ID NO: 59933 - DNA, 467 bp, Homo sapiens
ctgaaggctgcgtgccaagaattcacacagtactcctgaaacaggatattactgaagcatttttctcaaacagaaacagatgtagttccctgttactgtcgccagtgttagtagatccttaaaattacctgacagcagtgtgcccctaaatgtactccccgctcctacacacatacacaagtgttttattttattttattttttggcaaagcctccttccttgatttgagggaagttagcctgggattcctgatgacagtaatagattctcagtgggtttgcagacggcagaggtggtgactgacaattctttattactcagaagaggatcttctctggtgaaaaatgattcaggattctgcagttggagattggatacaaaacctcagagaagggacacaaatagagatctttctcagcctcccctttcttgctaccctttgtagaggagagggaatgtctcatat

SEQ ID NO: 59934 - DNA, 309 bp, Homo sapiens
taatctcctcaataaccatcagtttttctgtatatatgtaaaagatcgtttatagatgagatcacgaagtaaccttttgcctttagtgatgctgatagttattaatagagcgctaaatttacttgagtaatatgtcaagcagtatattcagcaattcacatatattttttcatttaatcatgacaatagccttgtgaagttcttattgttcctttcaaagaagtgaaatgaaagcacacagaaatcatcaattgcctaaagtcaagtagtggagctggaactagaacctgtatctctttgatttcatta

SEQ ID NO: 59935 - DNA, 227 bp, Homo sapiens
ataatatattttattgagtctgatgatccaaagtattaccattttaacatacaatcaatgtcaaaattactaatgaaatattttacatttttcatactaaattttgaaatctagccacatttcaagtgctcaagagcctcaatgatgatttcctcataagagatgaatattagagttcttcttattagcccttgttggttgaacatggatttcttcttacatgcttg

SEQ ID NO: 59936 - DNA, 5156 bp, Homo sapiens
  misc_feature (1877)..(1877): n is a, c, g, or t
ctctcacacacacacacccctcccctgccatccctccccggactccggctccggctccgattgcaatttgcaacctccgctgccgtcgccgcagcagccaccaattcgccagcggttcaggtggctcttgcctcgatgtcctagcctaggggcccccgggccggacttggctgggctcccttcaccctctgcggagtcatgagggcgaacgacgctctgcaggtgctgggcttgcttttcagcctggcccggggctccgaggtgggcaactctcaggcagtgtgtcctgggactctgaatggcctgagtgtgaccggcgatgctgagaaccaataccagacactgtacaagctctacgagaggtgtgaggtggtgatggggaaccttgagattgtgctcacgggacacaatgccgacctctccttcctgcagtggattcgagaagtgacaggctatgtcctcgtggccatgaatgaattctctactctaccattgcccaacctccgcgtggtgcgagggacccaggtctacgatgggaagtttgccatcttcgtcatgttgaactataacaccaactccagccacgctctgcgccagctccgcttgactcagctcaccgagattctgtcagggggtgtttatattgagaagaacgataagctttgtcacatggacacaattgactggagggacatcgtgagggaccgagatgctgagatagtggtgaaggacaatggcagaagctgtcccccctgtcatgaggtttgcaaggggcgatgctggggtcctggatcagaagactgccagacattgaccaagaccatctgtgctcctcagtgtaatggtcactgctttgggcccaaccccaaccagtgctgccatgatgagtgtgccgggggctgctcaggccctcaggacacagactgctttgcctgccggcacttcaatgacagtggagcctgtgtacctcgctgtccacagcctcttgtctacaacaagctaactttccagctggaacccaatccccacaccaagtatcagtatggaggagtttgtgtagccagctgtccccataactttgtggtggatcaaacatcctgtgtcagggcctgtcctcctgacaagatggaagtagataaaaatgggctcaagatgtgtgagccttgtgggggactatgtcccaaagcctgtgagggaacaggctctgggagccgcttccagactgtggactcgagcaacattgatggatttgtgaactgcaccaagatcctgggcaacctggactttctgatcaccggcctcaatggagacccctggcacaagatccctgccctggacccagagaagctcaatgtcttccggacagtacgggagatcacaggttacctgaacatccagtcctggccgccccacatgcacaacttcagtgttttttccaatttgacaaccattggaggcagaagcctctacaaccggggcttctcattgttgatcatgaagaacttgaatgtcacatctctgggcttccgatccctgaaggaaattagtgctgggcgtatctatataagtgccaataggcagctctgctaccaccactctttgaactggaccaaggtgcttcgggggcctacggaagagcgactagacatcaagcataatcggccgcgcagagactgcgtggcagagggcaaagtgtgtgacccactgtgctcctctgggggatgctggggcccaggccctggtcagtgcttgtcctgtcgaaattatagccgaggaggtgtctgtgtgacccactgcaactttctgaatggggagcctcgagaatttgcccatgaggccgaatgcttctcctgccacccggaatgccaacccatggngggcactgccacatgcaatggctcgggctctgatacttgtgctcaatgtgcccattttcgagatgggccccactgtgtgagcagctgcccccatggagtcctaggtgccaagggcccaatctacaagtacccagatgttcagaatgaatgtcggccctgccatgagaactgcacccaggggtgtaaaggaccagagcttcaagactgtttaggacaaacactggtgctgatcggcaaaacccatctgacaatggctttgacagtgatagcaggattggtagtgattttcatgatgctgggcggcacttttctctactggcgtgggcgccggattcagaataaaagggctatgaggcgatacttggaacggggtgagagcatagagcctctggaccccagtgagaaggctaacaaagtcttggccagaatcttcaaagagacagagctaaggaagcttaaagtgcttggctcgggtgtctttggaactgtgcacaaaggagtgtggatccctgagggtgaatcaatcaagattccagtctgcattaaagtcattgaggacaagagtggacggcagagttttcaagctgtgacagatcatatgctggccattggcagcctggaccatgcccacattgtaaggctgctgggactatgcccagggtcatctctgcagcttgtcactcaatatttgcctctgggttctctgctggatcatgtgagacaacaccggggggcactggggccacagctgctgctcaactggggagtacaaattgccaagggaatgtactaccttgaggaacatggtatggtgcatagaaacctggctgcccgaaacgtgctactcaagtcacccagtcaggttcaggtggcagattttggtgtggctgacctgctgcctcctgatgataagcagctgctatacagtgaggccaagactccaattaagtggatggcccttgagagtatccactttgggaaatacacacaccagagtgatgtctggagctatggtgtgacagtttgggagttgatgaccttcggggcagagccctatgcagggctacgattggctgaagtaccagacctgctagagaagggggagcggttggcacagccccagatctgcacaattgatgtctacatggtgatggtcaagtgttggatgattgatgagaacattcgcccaacctttaaagaactagccaatgagttcaccaggatggcccgagacccaccacggtatctggtcataaagagagagagtgggcctggaatagcccctgggccagagccccatggtctgacaaacaagaagctagaggaagtagagctggagccagaactagacctagacctagacttggaagcagaggaggacaacctggcaaccaccacactgggctccgccctcagcctaccagttggaacacttaatcggccacgtgggagccagagccttttaagtccatcatctggatacatgcccatgaaccagggtaatcttggggagtcttgccaggagtctgcagtttctgggagcagtgaacggtgcccccgtccagtctctctacacccaatgccacggggatgcctggcatcagagtcatcagaggggcatgtaacaggctctgaggctgagctccaggagaaagtgtcaatgtgtaggagccggagcaggagccggagcccacggccacgcggagatagcgcctaccattcccagcgccacagtctgctgactcctgttaccccactctccccacccgggttagaggaagaggatgtcaacggttatgtcatgccagatacacacctcaaaggtactccctcctcccgggaaggcaccctttcttcagtgggtctcagttctgtcctgggtactgaagaagaagatgaagatgaggagtatgaatacatgaaccggaggagaaggcacagtccacctcatccccctaggccaagttcccttgaggagctgggttatgagtacatggatgtggggtcagacctcagtgcctctctgggcagcacacagagttgcccactccaccctgtacccatcatgcccactgcaggcacaactccagatgaagactatgaatatatgaatcggcaacgagatggaggtggtcctgggggtgattatgcagccatgggggcctgcccagcatctgagcaagggtatgaagagatgagagcttttcaggggcctggacatcaggccccccatgtccattatgcccgcctaaaaactctacgtagcttagaggctacagactctgcctttgataaccctgattactggcatagcaggcttttccccaaggctaatgcccagagaacgtaactcctgctccctgtggcactcagggagcatttaatggcagctagtgcctttagagggtaccgtcttctccctattccctctctctcccaggtcccagccccttttccccagtcccagacaattccattcaatctttggaggcttttaaacattttgacacaaaattcttatggtatgtagccagctgtgcactttcttctctttcccaaccccaggaaaggttttccttattttgtgtgctttcccagtcccattcctcagcttcttcacaggcactcctggagatatgaaggattactctccatatcccttcctctcaggctcttgactacttggaactaggctcttatgtgtgcctttgtttcccatcagactgtcaagaagaggaaagggaggaaacctagcagaggaaagtgtaattttggtttatgactcttaaccccctagaaagacagaagcttaaaatctgtgaagaaagaggttaggagtagatattgattactatcataattcagcacttaactatgagccaggcatcatactaaacttcacctacattatctcacttagtcctttatcatccttaaaacaattctgtgacatacatattatctcattttacacaaagggaagtcgggcatggtggctcatgcctgtaatctcagcactttgggaggctgaggcagaaggattacctgaggcaaggagtttgagaccagcttagccaacatagtaagacccccatctctttaaaaaaaaaaaaaaaaaaaaaaaaaaaactttagaactgggtgcagtggctcatgcctgtaatcccagccagcactttgggaggctgagatgggaagatcacttgagcccagaattagagataagcctatggaaacatagcaagacactgtctctacaggggaaaaaaaaaaaagaaa

SEQ ID NO: 59937 - DNA, 3015 bp, Homo sapiens
ctctcacacacacacacccctcccctgccatccctccccggactccggctccggctccgattgcaatttgcaacctccgctgccgtcgccgcagcagccaccaattcgccagcggttcaggtggctcttgcctcgatgtcctagcctaggggcccccgggccggacttggctgggctcccttcaccctctgcggagtcatgagggcgaacgacgctctgcaggtgctgggcttgcttttcagcctggcccggggctccgaggtgggcaactctcaggcagtgtgtcctgggactctgaatggcctgagtgtgaccggcgatgctgagaaccaataccagacactgtacaagctctacgagaggtgtgaggtggtgatggggaaccttgagattgtgctcacgggacacaatgccgacctctccttcctgcagtggattcgagaagtgacaggctatgtcctcgtggccatgaatgaattctctactctaccattgcccaacctccgcgtggtgcgagggacccaggtctacgatgggaagtttgccatcttcgtcatgttgaactataacaccaactccagccacgctctgcgccagctccgcttgactcagctcaccgagattctgtcagggggtgtttatattgagaagaacgataagctttgtcacatggacacaattgactggagggacatcgtgagggaccgagatgctgagatagtggtgaaggacaatggcagaagctgtcccccctgtcatgaggtttgcaaggggcgatgctggggtcctggatcagaagactgccagacattgaccaagaccatctgtgctcctcagtgtaatggtcactgctttgggcccaaccccaaccagtgctgccatgatgagtgtgccgggggctgctcaggccctcaggacacagactgctttgcctgccggcacttcaatgacagtggagcctgtgtacctcgctgtccacagcctcttgtctacaacaagctaactttccagctggaacccaatccccacaccaagtatcagtatggaggagtttgtgtagccagctgtccccataactttgtggtggatcaaacatcctgtgtcagggcctgtcctcctgacaagatggaagtagataaaaatgggctcaagatgtgtgagccttgtgggggactatgtcccaaagagccagagccttttaagtccatcatctggatacatgcccatgaaccagggtaatcttggggagtcttgccaggagtctgcagtttctgggagcagtgaacggtgcccccgtccagtctctctacacccaatgccacggggatgcctggcatcagagtcatcagaggggcatgtaacaggctctgaggctgagctccaggagaaagtgtcaatgtgtaggagccggagcaggagccggagcccacggccacgcggagatagcgcctaccattcccagcgccacagtctgctgactcctgttaccccactctccccacccgggttagaggaagaggatgtcaacggttatgtcatgccagatacacacctcaaaggtactccctcctcccgggaaggcaccctttcttcagtgggtctcagttctgtcctgggtactgaagaagaagatgaagatgaggagtatgaatacatgaaccggaggagaaggcacagtccacctcatccccctaggccaagttcccttgaggagctgggttatgagtacatggatgtggggtcagacctcagtgcctctctgggcagcacacagagttgcccactccaccctgtacccatcatgcccactgcaggcacaactccagatgaagactatgaatatatgaatcggcaacgagatggaggtggtcctgggggtgattatgcagccatgggggcctgcccagcatctgagcaagggtatgaagagatgagagcttttcaggggcctggacatcaggccccccatgtccattatgcccgcctaaaaactctacgtagcttagaggctacagactctgcctttgataaccctgattactggcatagcaggcttttccccaaggctaatgcccagagaacgtaactcctgctccctgtggcactcagggagcatttaatggcagctagtgcctttagagggtaccgtcttctccctattccctctctctcccaggtcccagccccttttccccagtcccagacaattccattcaatctttggaggcttttaaacattttgacacaaaattcttatggtatgtagccagctgtgcactttcttctctttcccaaccccaggaaaggttttccttattttgtgtgctttcccagtcccattcctcagcttcttcacaggcactcctggagatatgaaggattactctccatatcccttcctctcaggctcttgactacttggaactaggctcttatgtgtgcctttgtttcccatcagactgtcaagaagaggaaagggaggaaacctagcagaggaaagtgtaattttggtttatgactcttaaccccctagaaagacagaagcttaaaatctgtgaagaaagaggttaggagtagatattgattactatcataattcagcacttaactatgagccaggcatcatactaaacttcacctacattatctcacttagtcctttatcatccttaaaacaattctgtgacatacatattatctcattttacacaaagggaagtcgggcatggtggctcatgcctgtaatctcagcactttgggaggctgaggcagaaggattacctgaggcaaggagtttgagaccagcttagccaacatagtaagacccccatctctttaaaaaaaaaaaaaaaaaaaaaaaaaaaactttagaactgggtgcagtggctcatgcctgtaatcccagccagcactttgggaggctgagatgggaagatcacttgagcccagaattagagataagcctatggaaacatagcaagacactgtctctacaggggaaaaaaaaaaaagaaa

SEQ ID NO: 59938 - DNA, 5170 bp, Homo sapiens
  misc_feature (1891)..(1891): n is a, c, g, or t
cagagcgagactccaaaaaaaaaaaaaaaaaaaaaaaccaaagtacagtatacctggatgtccctccttccctaggaattctacctttactctcctaaaccaaacccctatgagctggaggaatataggggttaaaaaccacctgtccatcttctgcttctccatgtcccagtcagttggaaaacatatgggcagggcttgggggagggaatgttgagtcagaaatctctccctctctcccttcccctcccccactagctaaaccggatctggacaggtgactgaggaggcaggagtttcttttggcctgactcctcatcttataaagggagtcttctctgcagcttagatttaattggacctatctgtctgcctcattctcccactcctgagtctcaggtgtccttttggatgggtggagaggtaaggaagaggcgttccgctgcggcccttaaccctgtcacttctttccctacctcagagattctgtcagggggtgtttatattgagaagaacgataagctttgtcacatggacacaattgactggagggacatcgtgagggaccgagatgctgagatagtggtgaaggacaatggcagaagctgtcccccctgtcatgaggtttgcaaggggcgatgctggggtcctggatcagaagactgccagacatgtgggtttgaaattccctccaaaaacttcactcatacgctttcatatcccttcctccccaagcctgggtcaacactgtgggggaggcatgagcagtggcctcagaattcagtcctaggagccctaacagccatgctttctctccttccatagtgaccaagaccatctgtgctcctcagtgtaatggtcactgctttgggcccaaccccaaccagtgctgccatgatgagtgtgccgggggctgctcaggccctcaggacacagactgctttgcctgccggcacttcaatgacagtggagcctgtgtacctcgctgtccacagcctcttgtctacaacaagctaactttccagctggaacccaatccccacaccaagtatcagtatggaggagtttgtgtagccagctgtccccataactttgtggtggatcaaacatcctgtgtcagggcctgtcctcctgacaagatggaagtagataaaaatgggctcaagatgtgtgagccttgtgggggactatgtcccaaagcctgtgagggaacaggctctgggagccgcttccagactgtggactcgagcaacattgatggatttgtgaactgcaccaagatcctgggcaacctggactttctgatcaccggcctcaatggagacccctggcacaagatccctgccctggacccagagaagctcaatgtcttccggacagtacgggagatcacaggttacctgaacatccagtcctggccgccccacatgcacaacttcagtgttttttccaatttgacaaccattggaggcagaagcctctacaaccggggcttctcattgttgatcatgaagaacttgaatgtcacatctctgggcttccgatccctgaaggaaattagtgctgggcgtatctatataagtgccaataggcagctctgctaccaccactctttgaactggaccaaggtgcttcgggggcctacggaagagcgactagacatcaagcataatcggccgcgcagagactgcgtggcagagggcaaagtgtgtgacccactgtgctcctctgggggatgctggggcccaggccctggtcagtgcttgtcctgtcgaaattatagccgaggaggtgtctgtgtgacccactgcaactttctgaatggggagcctcgagaatttgcccatgaggccgaatgcttctcctgccacccggaatgccaacccatggngggcactgccacatgcaatggctcgggctctgatacttgtgctcaatgtgcccattttcgagatgggccccactgtgtgagcagctgcccccatggagtcctaggtgccaagggcccaatctacaagtacccagatgttcagaatgaatgtcggccctgccatgagaactgcacccaggggtgtaaaggaccagagcttcaagactgtttaggacaaacactggtgctgatcggcaaaacccatctgacaatggctttgacagtgatagcaggattggtagtgattttcatgatgctgggcggcacttttctctactggcgtgggcgccggattcagaataaaagggctatgaggcgatacttggaacggggtgagagcatagagcctctggaccccagtgagaaggctaacaaagtcttggccagaatcttcaaagagacagagctaaggaagcttaaagtgcttggctcgggtgtctttggaactgtgcacaaaggagtgtggatccctgagggtgaatcaatcaagattccagtctgcattaaagtcattgaggacaagagtggacggcagagttttcaagctgtgacagatcatatgctggccattggcagcctggaccatgcccacattgtaaggctgctgggactatgcccagggtcatctctgcagcttgtcactcaatatttgcctctgggttctctgctggatcatgtgagacaacaccggggggcactggggccacagctgctgctcaactggggagtacaaattgccaagggaatgtactaccttgaggaacatggtatggtgcatagaaacctggctgcccgaaacgtgctactcaagtcacccagtcaggttcaggtggcagattttggtgtggctgacctgctgcctcctgatgataagcagctgctatacagtgaggccaagactccaattaagtggatggcccttgagagtatccactttgggaaatacacacaccagagtgatgtctggagctatggtgtgacagtttgggagttgatgaccttcggggcagagccctatgcagggctacgattggctgaagtaccagacctgctagagaagggggagcggttggcacagccccagatctgcacaattgatgtctacatggtgatggtcaagtgttggatgattgatgagaacattcgcccaacctttaaagaactagccaatgagttcaccaggatggcccgagacccaccacggtatctggtcataaagagagagagtgggcctggaatagcccctgggccagagccccatggtctgacaaacaagaagctagaggaagtagagctggagccagaactagacctagacctagacttggaagcagaggaggacaacctggcaaccaccacactgggctccgccctcagcctaccagttggaacacttaatcggccacgtgggagccagagccttttaagtccatcatctggatacatgcccatgaaccagggtaatcttggggagtcttgccaggagtctgcagtttctgggagcagtgaacggtgcccccgtccagtctctctacacccaatgccacggggatgcctggcatcagagtcatcagaggggcatgtaacaggctctgaggctgagctccaggagaaagtgtcaatgtgtaggagccggagcaggagccggagcccacggccacgcggagatagcgcctaccattcccagcgccacagtctgctgactcctgttaccccactctccccacccgggttagaggaagaggatgtcaacggttatgtcatgccagatacacacctcaaaggtactccctcctcccgggaaggcaccctttcttcagtgggtctcagttctgtcctgggtactgaagaagaagatgaagatgaggagtatgaatacatgaaccggaggagaaggcacagtccacctcatccccctaggccaagttcccttgaggagctgggttatgagtacatggatgtggggtcagacctcagtgcctctctgggcagcacacagagttgcccactccaccctgtacccatcatgcccactgcaggcacaactccagatgaagactatgaatatatgaatcggcaacgagatggaggtggtcctgggggtgattatgcagccatgggggcctgcccagcatctgagcaagggtatgaagagatgagagcttttcaggggcctggacatcaggccccccatgtccattatgcccgcctaaaaactctacgtagcttagaggctacagactctgcctttgataaccctgattactggcatagcaggcttttccccaaggctaatgcccagagaacgtaactcctgctccctgtggcactcagggagcatttaatggcagctagtgcctttagagggtaccgtcttctccctattccctctctctcccaggtcccagccccttttccccagtcccagacaattccattcaatctttggaggcttttaaacattttgacacaaaattcttatggtatgtagccagctgtgcactttcttctctttcccaaccccaggaaaggttttccttattttgtgtgctttcccagtcccattcctcagcttcttcacaggcactcctggagatatgaaggattactctccatatcccttcctctcaggctcttgactacttggaactaggctcttatgtgtgcctttgtttcccatcagactgtcaagaagaggaaagggaggaaacctagcagaggaaagtgtaattttggtttatgactcttaaccccctagaaagacagaagcttaaaatctgtgaagaaagaggttaggagtagatattgattactatcataattcagcacttaactatgagccaggcatcatactaaacttcacctacattatctcacttagtcctttatcatccttaaaacaattctgtgacatacatattatctcattttacacaaagggaagtcgggcatggtggctcatgcctgtaatctcagcactttgggaggctgaggcagaaggattacctgaggcaaggagtttgagaccagcttagccaacatagtaagacccccatctctttaaaaaaaaaaaaaaaaaaaaaaaaaaaactttagaactgggtgcagtggctcatgcctgtaatcccagccagcactttgggaggctgagatgggaagatcacttgagcccagaattagagataagcctatggaaacatagcaagacactgtctctacaggggaaaaaaaaaaaagaaa

SEQ ID NO: 59939 - DNA, 4543 bp, Homo sapiens
  misc_feature (1264)..(1264): n is a, c, g, or t
tgttgctcgagtccacagtctggaagcggatccaagattttagacaaaattgtggaagggaaaaagaatccagttggtgataaatagggagattggtgaatggttatgatcatctaaccactccagtgagtgacccttacgtccagtcctcccatgacttcagctatcacccttacttctgctccttgtagcaacaaatagtgaagagacttttgaatctagagggcagcacttaagggatctagggtggcagatggggacaaatccagtgcagagctggagggagcctaggcccagagcaagggttccattggtagctggtgatgttcctccctcatctctaatggtgtcctcctcctcttccctagataactttgtggtggatcaaacatcctgtgtcagggcctgtcctcctgacaagatggaagtagataaaaatgggctcaagatgtgtgagccttgtgggggactatgtcccaaaggtgggtaggagatggtaagaagttgtaaagagacagcctttcctctgagcctgcgcagaccacccccactgaacctctcttacatttgcagcctgtgagggaacaggctctgggagccgcttccagactgtggactcgagcaacattgatggatttgtgaactgcaccaagatcctgggcaacctggactttctgatcaccggcctcaatggagacccctggcacaagatccctgccctggacccagagaagctcaatgtcttccggacagtacgggagatcacaggttacctgaacatccagtcctggccgccccacatgcacaacttcagtgttttttccaatttgacaaccattggaggcagaagcctctacaaccggggcttctcattgttgatcatgaagaacttgaatgtcacatctctgggcttccgatccctgaaggaaattagtgctgggcgtatctatataagtgccaataggcagctctgctaccaccactctttgaactggaccaaggtgcttcgggggcctacggaagagcgactagacatcaagcataatcggccgcgcagagactgcgtggcagagggcaaagtgtgtgacccactgtgctcctctgggggatgctggggcccaggccctggtcagtgcttgtcctgtcgaaattatagccgaggaggtgtctgtgtgacccactgcaactttctgaatggggagcctcgagaatttgcccatgaggccgaatgcttctcctgccacccggaatgccaacccatggngggcactgccacatgcaatggctcgggctctgatacttgtgctcaatgtgcccattttcgagatgggccccactgtgtgagcagctgcccccatggagtcctaggtgccaagggcccaatctacaagtacccagatgttcagaatgaatgtcggccctgccatgagaactgcacccaggggtgtaaaggaccagagcttcaagactgtttaggacaaacactggtgctgatcggcaaaacccatctgacaatggctttgacagtgatagcaggattggtagtgattttcatgatgctgggcggcacttttctctactggcgtgggcgccggattcagaataaaagggctatgaggcgatacttggaacggggtgagagcatagagcctctggaccccagtgagaaggctaacaaagtcttggccagaatcttcaaagagacagagctaaggaagcttaaagtgcttggctcgggtgtctttggaactgtgcacaaaggagtgtggatccctgagggtgaatcaatcaagattccagtctgcattaaagtcattgaggacaagagtggacggcagagttttcaagctgtgacagatcatatgctggccattggcagcctggaccatgcccacattgtaaggctgctgggactatgcccagggtcatctctgcagcttgtcactcaatatttgcctctgggttctctgctggatcatgtgagacaacaccggggggcactggggccacagctgctgctcaactggggagtacaaattgccaagggaatgtactaccttgaggaacatggtatggtgcatagaaacctggctgcccgaaacgtgctactcaagtcacccagtcaggttcaggtggcagattttggtgtggctgacctgctgcctcctgatgataagcagctgctatacagtgaggccaagactccaattaagtggatggcccttgagagtatccactttgggaaatacacacaccagagtgatgtctggagctatggtgtgacagtttgggagttgatgaccttcggggcagagccctatgcagggctacgattggctgaagtaccagacctgctagagaagggggagcggttggcacagccccagatctgcacaattgatgtctacatggtgatggtcaagtgttggatgattgatgagaacattcgcccaacctttaaagaactagccaatgagttcaccaggatggcccgagacccaccacggtatctggtcataaagagagagagtgggcctggaatagcccctgggccagagccccatggtctgacaaacaagaagctagaggaagtagagctggagccagaactagacctagacctagacttggaagcagaggaggacaacctggcaaccaccacactgggctccgccctcagcctaccagttggaacacttaatcggccacgtgggagccagagccttttaagtccatcatctggatacatgcccatgaaccagggtaatcttggggagtcttgccaggagtctgcagtttctgggagcagtgaacggtgcccccgtccagtctctctacacccaatgccacggggatgcctggcatcagagtcatcagaggggcatgtaacaggctctgaggctgagctccaggagaaagtgtcaatgtgtaggagccggagcaggagccggagcccacggccacgcggagatagcgcctaccattcccagcgccacagtctgctgactcctgttaccccactctccccacccgggttagaggaagaggatgtcaacggttatgtcatgccagatacacacctcaaaggtactccctcctcccgggaaggcaccctttcttcagtgggtctcagttctgtcctgggtactgaagaagaagatgaagatgaggagtatgaatacatgaaccggaggagaaggcacagtccacctcatccccctaggccaagttcccttgaggagctgggttatgagtacatggatgtggggtcagacctcagtgcctctctgggcagcacacagagttgcccactccaccctgtacccatcatgcccactgcaggcacaactccagatgaagactatgaatatatgaatcggcaacgagatggaggtggtcctgggggtgattatgcagccatgggggcctgcccagcatctgagcaagggtatgaagagatgagagcttttcaggggcctggacatcaggccccccatgtccattatgcccgcctaaaaactctacgtagcttagaggctacagactctgcctttgataaccctgattactggcatagcaggcttttccccaaggctaatgcccagagaacgtaactcctgctccctgtggcactcagggagcatttaatggcagctagtgcctttagagggtaccgtcttctccctattccctctctctcccaggtcccagccccttttccccagtcccagacaattccattcaatctttggaggcttttaaacattttgacacaaaattcttatggtatgtagccagctgtgcactttcttctctttcccaaccccaggaaaggttttccttattttgtgtgctttcccagtcccattcctcagcttcttcacaggcactcctggagatatgaaggattactctccatatcccttcctctcaggctcttgactacttggaactaggctcttatgtgtgcctttgtttcccatcagactgtcaagaagaggaaagggaggaaacctagcagaggaaagtgtaattttggtttatgactcttaaccccctagaaagacagaagcttaaaatctgtgaagaaagaggttaggagtagatattgattactatcataattcagcacttaactatgagccaggcatcatactaaacttcacctacattatctcacttagtcctttatcatccttaaaacaattctgtgacatacatattatctcattttacacaaagggaagtcgggcatggtggctcatgcctgtaatctcagcactttgggaggctgaggcagaaggattacctgaggcaaggagtttgagaccagcttagccaacatagtaagacccccatctctttaaaaaaaaaaaaaaaaaaaaaaaaaaaactttagaactgggtgcagtggctcatgcctgtaatcccagccagcactttgggaggctgagatgggaagatcacttgagcccagaattagagataagcctatggaaacatagcaagacactgtctctacaggggaaaaaaaaaaaagaaa

SEQ ID NO: 59940 - DNA, 1528 bp, Homo sapiens
ctctcacacacacacacccctcccctgccatccctccccggactccggctccggctccgattgcaatttgcaacctccgctgccgtcgccgcagcagccaccaattcgccagcggttcaggtggctcttgcctcgatgtcctagcctaggggcccccgggccggacttggctgggctcccttcaccctctgcggagtcatgagggcgaacgacgctctgcaggtgctgggcttgcttttcagcctggcccggggctccgaggtgggcaactctcaggcagtgtgtcctgggactctgaatggcctgagtgtgaccggcgatgctgagaaccaataccagacactgtacaagctctacgagaggtgtgaggtggtgatggggaaccttgagattgtgctcacgggacacaatgccgacctctccttcctgcagtggattcgagaagtgacaggctatgtcctcgtggccatgaatgaattctctactctaccattgcccaacctccgcgtggtgcgagggacccaggtctacgatgggaagtttgccatcttcgtcatgttgaactataacaccaactccagccacgctctgcgccagctccgcttgactcagctcaccgagattctgtcagggggtgtttatattgagaagaacgataagctttgtcacatggacacaattgactggagggacatcgtgagggaccgagatgctgagatagtggtgaaggacaatggcagaagctgtcccccctgtcatgaggtttgcaaggggcgatgctggggtcctggatcagaagactgccagacattgaccaagaccatctgtgctcctcagtgtaatggtcactgctttgggcccaaccccaaccagtgctgccatgatgagtgtgccgggggctgctcaggccctcaggacacagactgctttgcctgccggcacttcaatgacagtggagcctgtgtacctcgctgtccacagcctcttgtctacaacaagctaactttccagctggaacccaatccccacaccaagtatcagtatggaggagtttgtgtagccagctgtccccataactttgtggtggatcaaacatcctgtgtcagggcctgtcctcctgacaagatggaagtagataaaaatgggctcaagatgtgtgagccttgtgggggactatgtcccaaaggtgggtaggagatggtaagaagttgtaaagagacagcctttcctctgagcctgcgcagaccacccccactgaacctctcttacatttgcagcctgtgagggaacaggctctgggagccgcttccagactgtggactcgagcaacattgatggatttgtgaactgcaccaagatcctgggcaacctggactttctgatcaccggcctcaatgggttagagatcctgccttccctccttagaccccagcccacgcacccctcacagttcatttcattggccaaaactttcctatgtggagctgactaggaatcaaagtcataaaattctagcctgttacaaagg

SEQ ID NO: 59941 - DNA, 790 bp, Homo sapiens
ctctcacacacacacacccctcccctgccatccctccccggactccggctccggctccgattgcaatttgcaacctccgctgccgtcgccgcagcagccaccaattcgccagcggttcaggtggctcttgcctcgatgtcctagcctaggggcccccgggccggacttggctgggctcccttcaccctctgcggagtcatgagggcgaacgacgctctgcaggtgctgggcttgcttttcagcctggcccggggctccgaggtgggcaactctcaggcagtgtgtcctgggactctgaatggcctgagtgtgaccggcgatgctgagaaccaataccagacactgtacaagctctacgagaggtgtgaggtggtgatggggaaccttgagattgtgctcacgggacacaatgccgacctctccttcctgcagtggattcgagaagtgacaggctatgtcctcgtggccatgaatgaattctctactctaccattgcccaacctccgcgtggtgcgagggacccaggtctacgatgggaagtttgccatcttcgtcatgttgaactataacaccaactccagccacgctctgcgccagctccgcttgactcagctcaccgagattctgtcagggggtgtttatattgagaagaacgataagctttgtcacatggacacaattgactggagggacatcgtgagggaccgagatgctgagatagtggtgaaggacaatggcagaagctgtaagtggccgtgatcaagattgctccccagtcccaccaaaccag

SEQ ID NO: 59942 - DNA, 1060 bp, Homo sapiens
ctctcacacacacacacccctcccctgccatccctccccggactccggctccggctccgattgcaatttgcaacctccgctgccgtcgccgcagcagccaccaattcgccagcggttcaggtggctcttgcctcgatgtcctagcctaggggcccccgggccggacttggctgggctcccttcaccctctgcggagtcatgagggcgaacgacgctctgcaggtgctgggcttgcttttcagcctggcccggggctccgaggtgggcaactctcaggcagtgtgtcctgggactctgaatggcctgagtgtgaccggcgatgctgagaaccaataccagacactgtacaagctctacgagaggtgtgaggtggtgatggggaaccttgagattgtgctcacgggacacaatgccgacctctccttcctgcagtggattcgagaagtgacaggctatgtcctcgtggccatgaatgaattctctactctaccattgcccaacctccgcgtggtgcgagggacccaggtctacgatgggaagtttgccatcttcgtcatgttgaactataacaccaactccagccacgctctgcgccagctccgcttgactcagctcaccggtcagttcccgatggttccttctggcctcacccctcagccagcccaagactggtacctccttgatgatgacccaagactgctcactctaagtgcctcttccaaggtgcctgtcaccttggccgctgtctaaaggtccattgctccctaagcaatagagggcccccagtagggggagctaggggcatctgctccagggaaaggaaccctgtgtccttgtggggctggagtcagagctggatctgttaaccgtttttctaatttcaaagtacagtgtaccggaggccaggcctgatggcttacacctgtaatcccagcattttgggaggccaaggagggcagatcacttgagatcaggagtttgagaccagcctggccaacatggcgaaaccctgtctctactaaaaatacaaaaaaataaaataaaataaaaaattagctgg

SEQ ID NO: 59943 - DNA, 5214 bp, Homo sapiens
  misc_feature (1935)..(1935): n is a, c, g, or t
cctctggatgcaagtgtctgtgtactattatgctatagagtgactttgtctgttctacctgcctggagatacaggaaaatgctcatgcttcacacccagaaccctcaggagagccgcatggactcctcagagcctccaggtttccaaccaggtaggaggagactcagacatcttttgtgagtgagggtacccgatggaggggaggaaggcctagagagggatgcaatcatcctcatcattcccagttttctgccagagcctggggacacaggaaggcaggaagactcggggctatctaaatccaagttcaaatcctgactcagttactcactaactggtgatggatacattagttccctgatctggacactttgcatccagagctctggatgcaaagtgtcaatgtgtaggagccggtgcgagggacccaggtctacgatgggaagtttgccatcttcgtcatgttgaactataacaccaactccagccacgctctgcgccagctccgcttgactcagctcaccgagattctgtcagggggtgtttatattgagaagaacgataagctttgtcacatggacacaattgactggagggacatcgtgagggaccgagatgctgagatagtggtgaaggacaatggcagaagctgtcccccctgtcatgaggtttgcaaggggcgatgctggggtcctggatcagaagactgccagacatgtgggtttgaaattccctccaaaaacttcactcatacgctttcatatcccttcctccccaagcctgggtcaacactgtgggggaggcatgagcagtggcctcagaattcagtcctaggagccctaacagccatgctttctctccttccatagtgaccaagaccatctgtgctcctcagtgtaatggtcactgctttgggcccaaccccaaccagtgctgccatgatgagtgtgccgggggctgctcaggccctcaggacacagactgctttgcctgccggcacttcaatgacagtggagcctgtgtacctcgctgtccacagcctcttgtctacaacaagctaactttccagctggaacccaatccccacaccaagtatcagtatggaggagtttgtgtagccagctgtccccataactttgtggtggatcaaacatcctgtgtcagggcctgtcctcctgacaagatggaagtagataaaaatgggctcaagatgtgtgagccttgtgggggactatgtcccaaagcctgtgagggaacaggctctgggagccgcttccagactgtggactcgagcaacattgatggatttgtgaactgcaccaagatcctgggcaacctggactttctgatcaccggcctcaatggagacccctggcacaagatccctgccctggacccagagaagctcaatgtcttccggacagtacgggagatcacaggttacctgaacatccagtcctggccgccccacatgcacaacttcagtgttttttccaatttgacaaccattggaggcagaagcctctacaaccggggcttctcattgttgatcatgaagaacttgaatgtcacatctctgggcttccgatccctgaaggaaattagtgctgggcgtatctatataagtgccaataggcagctctgctaccaccactctttgaactggaccaaggtgcttcgggggcctacggaagagcgactagacatcaagcataatcggccgcgcagagactgcgtggcagagggcaaagtgtgtgacccactgtgctcctctgggggatgctggggcccaggccctggtcagtgcttgtcctgtcgaaattatagccgaggaggtgtctgtgtgacccactgcaactttctgaatggggagcctcgagaatttgcccatgaggccgaatgcttctcctgccacccggaatgccaacccatggngggcactgccacatgcaatggctcgggctctgatacttgtgctcaatgtgcccattttcgagatgggccccactgtgtgagcagctgcccccatggagtcctaggtgccaagggcccaatctacaagtacccagatgttcagaatgaatgtcggccctgccatgagaactgcacccaggggtgtaaaggaccagagcttcaagactgtttaggacaaacactggtgctgatcggcaaaacccatctgacaatggctttgacagtgatagcaggattggtagtgattttcatgatgctgggcggcacttttctctactggcgtgggcgccggattcagaataaaagggctatgaggcgatacttggaacggggtgagagcatagagcctctggaccccagtgagaaggctaacaaagtcttggccagaatcttcaaagagacagagctaaggaagcttaaagtgcttggctcgggtgtctttggaactgtgcacaaaggagtgtggatccctgagggtgaatcaatcaagattccagtctgcattaaagtcattgaggacaagagtggacggcagagttttcaagctgtgacagatcatatgctggccattggcagcctggaccatgcccacattgtaaggctgctgggactatgcccagggtcatctctgcagcttgtcactcaatatttgcctctgggttctctgctggatcatgtgagacaacaccggggggcactggggccacagctgctgctcaactggggagtacaaattgccaagggaatgtactaccttgaggaacatggtatggtgcatagaaacctggctgcccgaaacgtgctactcaagtcacccagtcaggttcaggtggcagattttggtgtggctgacctgctgcctcctgatgataagcagctgctatacagtgaggccaagactccaattaagtggatggcccttgagagtatccactttgggaaatacacacaccagagtgatgtctggagctatggtgtgacagtttgggagttgatgaccttcggggcagagccctatgcagggctacgattggctgaagtaccagacctgctagagaagggggagcggttggcacagccccagatctgcacaattgatgtctacatggtgatggtcaagtgttggatgattgatgagaacattcgcccaacctttaaagaactagccaatgagttcaccaggatggcccgagacccaccacggtatctggtcataaagagagagagtgggcctggaatagcccctgggccagagccccatggtctgacaaacaagaagctagaggaagtagagctggagccagaactagacctagacctagacttggaagcagaggaggacaacctggcaaccaccacactgggctccgccctcagcctaccagttggaacacttaatcggccacgtgggagccagagccttttaagtccatcatctggatacatgcccatgaaccagggtaatcttggggagtcttgccaggagtctgcagtttctgggagcagtgaacggtgcccccgtccagtctctctacacccaatgccacggggatgcctggcatcagagtcatcagaggggcatgtaacaggctctgaggctgagctccaggagaaagtgtcaatgtgtaggagccggagcaggagccggagcccacggccacgcggagatagcgcctaccattcccagcgccacagtctgctgactcctgttaccccactctccccacccgggttagaggaagaggatgtcaacggttatgtcatgccagatacacacctcaaaggtactccctcctcccgggaaggcaccctttcttcagtgggtctcagttctgtcctgggtactgaagaagaagatgaagatgaggagtatgaatacatgaaccggaggagaaggcacagtccacctcatccccctaggccaagttcccttgaggagctgggttatgagtacatggatgtggggtcagacctcagtgcctctctgggcagcacacagagttgcccactccaccctgtacccatcatgcccactgcaggcacaactccagatgaagactatgaatatatgaatcggcaacgagatggaggtggtcctgggggtgattatgcagccatgggggcctgcccagcatctgagcaagggtatgaagagatgagagcttttcaggggcctggacatcaggccccccatgtccattatgcccgcctaaaaactctacgtagcttagaggctacagactctgcctttgataaccctgattactggcatagcaggcttttccccaaggctaatgcccagagaacgtaactcctgctccctgtggcactcagggagcatttaatggcagctagtgcctttagagggtaccgtcttctccctattccctctctctcccaggtcccagccccttttccccagtcccagacaattccattcaatctttggaggcttttaaacattttgacacaaaattcttatggtatgtagccagctgtgcactttcttctctttcccaaccccaggaaaggttttccttattttgtgtgctttcccagtcccattcctcagcttcttcacaggcactcctggagatatgaaggattactctccatatcccttcctctcaggctcttgactacttggaactaggctcttatgtgtgcctttgtttcccatcagactgtcaagaagaggaaagggaggaaacctagcagaggaaagtgtaattttggtttatgactcttaaccccctagaaagacagaagcttaaaatctgtgaagaaagaggttaggagtagatattgattactatcataattcagcacttaactatgagccaggcatcatactaaacttcacctacattatctcacttagtcctttatcatccttaaaacaattctgtgacatacatattatctcattttacacaaagggaagtcgggcatggtggctcatgcctgtaatctcagcactttgggaggctgaggcagaaggattacctgaggcaaggagtttgagaccagcttagccaacatagtaagacccccatctctttaaaaaaaaaaaaaaaaaaaaaaaaaaaactttagaactgggtgcagtggctcatgcctgtaatcccagccagcactttgggaggctgagatgggaagatcacttgagcccagaattagagataagcctatggaaacatagcaagacactgtctctacaggggaaaaaaaaaaaagaaa

SEQ ID NO: 59944 - DNA, 1437 bp, Homo sapiens
ctctcacacacacacacccctcccctgccatccctccccggactccggctccggctccgattgcaatttgcaacctccgctgccgtcgccgcagcagccaccaattcgccagcggttcaggtggctcttgcctcgatgtcctagcctaggggcccccgggccggacttggctgggctcccttcaccctctgcggagtcatgagggcgaacgacgctctgcaggtgctgggcttgcttttcagcctggcccggggctccgaggtgggcaactctcaggcagtgtgtcctgggactctgaatggcctgagtgtgaccggcgatgctgagaaccaataccagacactgtacaagctctacgagaggtgtgaggtggtgatggggaaccttgagattgtgctcacgggacacaatgccgacctctccttcctgcagtggattcgagaagtgacaggctatgtcctcgtggccatgaatgaattctctactctaccattgcccaacctccgcgtggtgcgagggacccaggtctacgatgggaagtttgccatcttcgtcatgttgaactataacaccaactccagccacgctctgcgccagctccgcttgactcagctcaccgagattctgtcagggggtgtttatattgagaagaacgataagctttgtcacatggacacaattgactggagggacatcgtgagggaccgagatgctgagatagtggtgaaggacaatggcagaagctgtcccccctgtcatgaggtttgcaaggggcgatgctggggtcctggatcagaagactgccagacattgaccaagaccatctgtgctcctcagtgtaatggtcactgctttgggcccaaccccaaccagtgctgccatgatgagtgtgccgggggctgctcaggccctcaggacacagactgctttgcctgccggcacttcaatgacagtggagcctgtgtacctcgctgtccacagcctcttgtctacaacaagctaactttccagctggaacccaatccccacaccaagtatcagtatggaggagtttgtgtagccagctgtccccataactttgtggtggatcaaacatcctgtgtcagggcctgtcctcctgacaagatggaagtagataaaaatgggctcaagatgtgtgagccttgtgggggactatgtcccaaagcctgtgagggaacaggctctgggagccgcttccagactgtggactcgagcaacattgatggatttgtgaactgcaccaagatcctgggcaacctggactttctgatcaccggcctcaatgggttagagatcctgccttccctccttagaccccagcccacgcacccctcacagttcatttcattggccaaaactttcctatgtggagctgactaggaatcaaagtcataaaattctagcctgttacaaagg

SEQ ID NO: 59945 - DNA, 226 bp, Homo sapiens
gcatatatccaaggaaatggaatcatgggttcaggttttagagcaagcaatttctgctctccctgcctagtttccacacccttaacacaggggcaatgatgtcacatcaaaacatatcatacaaatttgtgatgatgtttcaacaactaaacaccagaaaaatgcttagggcagggccgggtaggaggggcagaagccaatagtaacttaacatcactgctaaccc

SEQ ID NO: 59946 - DNA, 419 bp, Homo sapiens
taaagttaaatgtacacttaactttttgatccagcaattccactccaagatattttccaatagaaatgaaaacatatgtctacataaagtcttgcatgtgaatgacaactttattcataatagacaaaatcaggaaacaacttatattagtccattctcacactgctatgaagaaatacccaaggctgggtaattgataaatgaaagcggtttaattgactcacagttcagcatggctggggaggcctcaggaaacttatagtcatggcagaaggcacctcctcacagggcagcaggagagagaatgagtgcagagcgaagggggaagccctatacttataaaaccacctgatctcatgagaacttcctcactatcacgagaacagtatggaggaaaaccagccccatgattcaattac

SEQ ID NO: 59947 - DNA, 197 bp, Homo sapiens
agagtgctatatatgtatttactgtgaaaattaagcggctccaattccatttcgatgtgtaggctataggtgttacggcaagagctgcctggtacatctgaaggccgctacgcccaccttcagtgccagtttccttatcagaggagctcgtagagcctcacagaacacaaagtaagatatctgaggtgtttcaggct

SEQ ID NO: 59948 - DNA, 1266 bp, Homo sapiens
attgaacatgagactggtgagtcatgcataggaatggacagaggattgtgaaatccatcttcaactacagcttcagagcatgccattgagtcacttcaccttaattaaatctcaactcccactcctccattggaaccacaaactgaccttccaatctgtaggactcttcttgtcaaaattctgtttcttaatacagttcaatcattgtgagtagctggatcaatctttgcagaattgtatatcaagaagcggtagtaatatatgttcacatcctggacagcattaatagtcataaaagcaaattaaatagaaattctccttttatcttaattgaagccagacattgtacaatgtcagatattgtacaacatcatatatcatacaagtcagatattataatcgtaatatctaagtcagatactatttaatatttatacaatatcaaaatgatatggattaatatttctttagtttctaagcatgtgcagtattttctctggagtgaggtaatcccagcacatatttttcaagcattgaaggctgcaaaaagtaataatgtgagtaaagtcgaagtagttttcatttgaccctcataggacaagttttcctttccaatgagagttttaaattagcttatggaaaaaagaagaaaatggacaaataagttagagataaacttaatctgagaataagtttaaaacatacaggaaccagtcataccactaagatgtgcagacttgtcttgacattcatagctgcagcctctgcagacacaggaatgcgctaagactcctttcataacaacctgtgagagtacaccagtgcccagaggcacatacacgaaaagaagggagaaatggcttacatctcttctatggatacagggttggttttttaagtttctatcaagatttttagaaaatcactatgaattattttttaacatgtttgttggaaattttgctaaatatgagtacataccttcatactttattaaatatcaggcacagaatataattcaatgcattcttgataactcagagccactaccataaaagttaatgaacatattgggcttcgtgacattctgcatattttctgtttcttttcttattcacaggtagtcactgaggctaccagttccacttcttggcatttgctacttttgctcgaagttgatgtgagaatactgatttataagactactagatttgtacaatatttatgattcaataaactctaaatagaaaacacaacaaaacataa

SEQ ID NO: 59949 - DNA, 530 bp, Homo sapiens
tggactgcctatgccctaaggggaacacggccaaacatgtatttatctagaagatgtcagaaaaagtgattgatctgaaaaacttctgtctgagagattattaaagtaacttggaaagttgttttggaaataggaagaaagaccccaaggaagatattttcacagtttttctttatctgaagagctgttgccaactcatcacaaaagggtagaacaaggagtacagattaatttgaaaaatatttctgattctgaattcaaagtctaattgtaaaaaagaagatagcaatgagagagtatagtcccatacctagctaagtaaatgaaactgttaggtgtttatggaataggaaatatgactcttctagtcatcatggacccaaccttaaagaaagttacagttcactgggtgcggtagctcacgcctataatcccagcactttgggaggctgaagcgggtgaatcacgaggtcagtagctcgagaccagcctggccaacatggtaaaaccttgtctctactaaaaataca

SEQ ID NO: 59950 - DNA, 209 bp, Homo sapiens
tgaaaaatatttggaactctttagtacagaacagtttcaatatgagttaagaattatgcgatgactaccaaaaaagctaatgcgatcccaggctgcggtaacagaagcagagcagctcagctggggaacgtgatagtgataactactttgtactaggttagactgtaccgagagacctatgttcagttctgggagtgaaagtattttat

SEQ ID NO: 59951 - DNA, 443 bp, Homo sapiens
cattgtgcccggtcaggaaatgaggagttcttaaaggaccctgggaatgttgctagtgggcccatgtccagatatcttctcggcactggcaagaacagtgcctgagtgggtccttgtctacagaaatcatcactaaggatgaaatctcttaaaagggtgatccagatacaaacattatattaaatatttaatttctatatagagttggaggacatagactgtttcctagggaaactgaagggaggtataccaatgttgtatattaatctagatcacaaacatcttacactcaagtttaagtaaaaatccaaattaacagccacaaacagtggaccaaaatagagtaaactctgaaaaaacattatttgttattatttttgagtcttaagcgggaaatatcagagaagaaagttatgaaaatatgtaagtggactttattttgt

SEQ ID NO: 59952 - DNA, 491 bp, Homo sapiens
aaatacctaatacagtgtaaatggtatgtaaataattataccataaattttctattgtttttattgttgtattattattttacatatttttattttttcccaaatattctccatccattgttagttgaatccatggatgaggaacctgcagatatggaggtgcaacaacatggatggtagcataatctcaaaaaaattatgctaagtgaggctgggtaaggtggctcacacctgtaatcctaacactttgggaggccgaggtgggcggatcacttgaggtcaggagttcgaaaccagtctggccaacatggtgaaacttcgtctccactaaaagtacaaaaatttgctgggcgtggtggcacacgcctgtaatcccagctacttgggaggctgaggcaggagaattgcttgaacctgggaggtggaggttgcagtgagctgaggtcacgccgctgcactgcagcctgggtgacagtgagactccatcttat

SEQ ID NO: 59953 - DNA, 396 bp, Homo sapiens
gcaagattcccaccgcactgccagccagtgcttagggtggggatggcctgagctgacaggaagccctccaggtctggcgataagacgactgggtggaaatcccaaagggagcaaaaagaggaacggagacctgctttagataaaggaactgaaagggagtgtgggttgtcttcctgctctataggggaaggaaagggatgggcctaagtcatgctgagaccttataagggggcagcacactgggttcacctcctggctccattctgacctctgaccccgaggaatcgtctccctatttttcttagctttttcttggggctttttccctgacacaactcatcctacggcacctgaagcagggaatagaccttccttaggtcctcctctctgatcttt

SEQ ID NO: 59954 - DNA, 914 bp, Homo sapiens
taaaatgaagaaggtataggtaactataatatgaagaatgcattggaagtgtaaattttaaaggagtttgctgattaataactcttttgttgtaacttttgttcaatgatgtttgacaaatactttttttttttttaatttgaggcagagtctcactctgttgcccaaactggaatgcagtggcatgatctcagctcactgcaacctccgcctgttgggctcagagatcttcccgccccagcctcccgaggagctggaactacagccttgtgccaccacgcccagcaaatttttgtattttattgcagagatggcatttcaccatgttgcccaggctggtcttgaactactggacttaagcaatccgcccacctgggcctcccaaagtgctgagattacaggcatgagccaccgcgcctggctgacaaatactttttaaaaatatccaagtttctggattttattcacctctacaaaaatgatttaagtcctgtagaaacatgtgcccacaaatgacacagtaatctccagcaatgtgttcaacagcacgttgagcataattgagcataacagacatttttaaatttgttgtctcaaattccatttagatttggctattgatgcaaaattagggaggtcatttttcactagattactttcaatgctggaatccatacttaaaaaaaaaaaaagaagaaactagatttagtatatctttctttgccacttcaggcttccaaaggagaaaaattcatggataagtcattaactgttacaaatgcattatgtcttcagttgtgatggttatgataaaacatgtttattttatatttgtaatttagtaaaattagttgattcaaggagctctatcataaatgggaagtaataaaatgataataattaaagcaggttat

SEQ ID NO: 59955 - DNA, 820 bp, Homo sapiens
ttttgagcatttatgaaatggctgtgaacttcttctaacttctaactttccaagttgtctccttttggccctaggagtagaatttttctttaattctcagctcactgcaacctccgcctgttgggctcagagatcttcccgccccagcctcccgaggagctggaactacagccttgtgccaccacgcccagcaaatttttgtattttattgcagagatggcatttcaccatgttgcccaggctggtcttgaactactggacttaagcaatccgcccacctgggcctcccaaagtgctgagattacaggcatgagccaccgcgcctggctgacaaatactttttaaaaatatccaagtttctggattttattcacctctacaaaaatgatttaagtcctgtagaaacatgtgcccacaaatgacacagtaatctccagcaatgtgttcaacagcacgttgagcataattgagcataacagacatttttaaatttgttgtctcaaattccatttagatttggctattgatgcaaaattagggaggtcatttttcactagattactttcaatgctggaatccatacttaaaaaaaaaaaaagaagaaactagatttagtatatctttctttgccacttcaggcttccaaaggagaaaaattcatggataagtcattaactgttacaaatgcattatgtcttcagttgtgatggttatgataaaacatgtttattttatatttgtaatttagtaaaattagttgattcaaggagctctatcataaatgggaagtaataaaatgataataattaaagcaggttat

SEQ ID NO: 59956 - DNA, 491 bp, Homo sapiens
gacattgaaggaaatccgaggaatggacaagtgatgcaagagccagttgagttaccaaattagttctagaaagatctgaaaaagctcggtccgggttcctagctctatattcttgtagatgaatttcaggaacctttatggcagcttcggcgccgtggcttagttggttaaagcgcctgtctagtaaacaggagatcctgggttcgaatcccagcggtgcctttattcaattgaaacagcgtgattttgcggctaaatccacatcctttcatgtattgtttttatatcagaacgcgtaagagtttctgttctgcactcatagcacccacatttcctgcagagtcaagctgccactcccatgagatcgccactctaaaaggtggttctctaacttaggggcagaaatgttgcataggcctaagggtcctttgcttaactgatgccacaccccactggtgcaggtggactgggtcaggcggccgccccaccct

SEQ ID NO: 59957 - DNA, 321 bp, Homo sapiens
ctcgctctgtcacccaggctggagtgcagtggtgcaatcatggctcactgtagccttcaactcctaggctcaagcaatcctcctgccttgacctcccaaagtgctgggatgacaggcattagtcaccatgtacaaccagaactatgtatcttaaacaataatcataagttcatttaaaaaaatgtacagttctgctccatcacttccaaatcaatactattataagttgtctcattgctagacaatggaataggaaaaaaaaatcaacacaacagaaaatcctatgttctttaacaataagccctgatatttaggtaaaac

SEQ ID NO: 59958 - DNA, 5071 bp, Homo sapiens
gttagatctaaaccacagagatgcagcatctgcgaagttacactaacagctggtgggggaaagaatctgatgctttgaaacatatatttttaatccataggaaaataagattctattttaaaagacccttctttaaaaccaaagtttgatagctgttataatggcagatctgtcattccaaaagaaagctagctaccctagtgaggctggagattgatgggctcaatcacatggtctgctctgaagtatacttctgatttcctcatttgctgtgtgttcttaagaggaatggaatctgcagacaggttttcagatatactctcttaaatttgatcctctcccatagtatccatggacaaaatccatatcatcttcatatgtaatcaatttgattacatatcatgcccaaactgaagggccgagttagaaggcagcattttatactgtgtgtttatgtcttctgtaatggacctctcttttgaaagtctttgaaatgtttggaaagcaatttaatgatccaaaattacataatgtaaaacagcatttttcatgacaggaagggatgtgattgttgatatgaccataaagcgatccatcaggccaaggtttgggtgagtgttgggcagtgttgccacatagctcaagccaagaacagaagggcagacagattgaaagatgtagcaaataaagtgactttttaccaagatcactgtaacgtgcactgaatgtttcctggtactgagtgtacaaaaggctaatgctataaggtttattttgactataaaagagtttatagatttgaatataaggtgcctcatgtaaatatgcttcctagttacaggtacacaaactctaatttgaaagaatccacaaatggctagctgagaagttaacagatctctatcattcgtctgtgtgtctttcttccctcacctatttttacatgaaattattatttcaaatgaaaatcatgatcatgtgccttttgggagacatggtttctctagaggtatatagtttgtaattacccgccttggtaataaccttcctgtggaactgaataaaaatttttgttttatttgtagagattatgatttgaggtatacagtaactttaatgttctattcttggaatctactctatctcccatgtttaaacattcttagagccatttgtgggattcattgacaaatttatagtctcaagggagagtttcaagaagtatctatatgtatactcatggttggggttctagaggcattacatctaaatatttatgacttttcatccaccgaggtaggtagcattaaatatacaagcacagcattatttctctttaaatatctattttggagagaaactttgaggccgtatcacagtttatatcatgcaactaatatttatatttcccaatccactacaaaatcattgctaagcagaagagagcagttatttggcctttatgttccattgtatgcctttttcccctcttccagttttatgcattgataagactacagattggcaccctgctgcctgagaagttccatttatccatagtcattgcagtgcagtaaaccctgatttaaaggaacatttaagtctctccagtaagtgtgaacaggaaggcatgggatagaagagagtccttatggagtggactggccacatgaactgtcctccagccactctttatttagatgggaagtggcatggtcctctgaacgctgcaggctggaaatgatccccagggcacatgcaatctgtggaaaggaatacatcggacagtgcaacatggtgagggctttcaatttgctgtggttgctgtatttttaacaagacacccggagcttcgattaggaataacctatcattagagttgttcctttaaaaaatgttgatgaataaagcaaatgtgggtttaaaatgccaacttatttttcactttgatattggtgctttattaagtgataccatagtttctctctcttttccctgttactttaaaaagaattttaaaattgtgtttgtatataaggtcagtctggcatagaatttctgaaagtaacattaataggatttctaaagaagttgtcagaaagacaaaattggatattctctgcactttcagagaaggactatttatgtttgaatttcataacaggcttacatttcttttctattgattcccttgcatatctacataatttaatcctgtctattgtcccagatctcttgtggctactttacctgttaccttttttgggattttgttctttatgttttacagttaccttcggaccagaagatatatggtatttttattcacttttttcagtgttttaaaataaggtttgttcatttattcattttatccattcatttcctattgtcgtatagttctaaccatatatatagtactttaaatattttcttatgttattatttaacacaataataaattcttatctaaagaaaagattattttactttattttacttaaaggaaagagaatttattggcaggatattgagtagcttgtagagtatatggaaggggagagccaagttaggaactggcaggagcgaggagggacaagacagctgcctgcacagtctgataggacacatctggctgctgccactggatgcccacatgggcagcgtgttgtaaatatcaccctaccagttggtaagttggcatgaattttccatgaaacacttgactgccatttgcagcatcatatctactttttatgcacctaattatatttttcctttcacttttatgtttttttctaaaactgccacctaaatacctttccactccgttaaatgtatggagtcaagataaatttctcattcttgctctacagtttaagatgtataagaagtaaacacttccgtggaatagggcttaatttggggctcaaatgttttgttttcctcctgagatgtttttgaatggataagactactctggttttggatgcagcaacttttctcctggcatggaagaactaaggactttgataaacagtttcccattgatagtataatataatgaggggcccagtctgctcttgtgaaaattggctgagcggcagcagcccatcccagctgtgtgtgagtagccccgctgttaaaagtacacctgctgggaattgttggcacatgctcatagcatatgctctgtgggggaggtgcttttaattccaagaggagcttttctcccacatctgcggatgcagaacaaagatgcagcaggactttagaaaacaggagtgtttctactgacattttattcattgctttgttagtcccgcaaatggagcaacttctggttgtttgtaagcagaaaaacaaaacattcaaaaccaaaaacctaattagtacttttgtcctttatatccctaggatgctctagggagtagaggtggcaggcatctttatcttcacccactggcacattagcagcttatgcaacttaggaagtcactgggagatgagtcctaaaagcctgaatttcaggatggggaggagataagaagcagagaactttgggagaccatggggcatttagtcctggcatagacacagaatggatattcacaggaagattcctgaggccagatatgcaggagagcacacattgtcacaaggggtgtggtgggaagagaggtgctggatgcctaagacagacttctgtgcttggcagattgactgagtgttgactctgaatactttgtggtccagtccataataggccagtcactcctgcctgatgcatccctgttgcactgttcataaaacctgtatcatatggggaagcttcaaggctggcaggcttttcatcaagtaatcatcattccatgttcctacgtatccttgaaatcaaaaccaggcaatatgtgtgtttttggttttgttttacaaaaaggcatacaatgagacgaattcttaagataatgcacatacagaatcatcaataaagtttcaaagagtttatgaagaaaaggtattttcctttcttgtaaaaaatgttatatatatataatattctgatctgcattcaccttagggcttagcctcttattttatgaattttcaggctgtgatttgtgttggatggctaagctctaaaataatgcaaatagccccaatctttaaatatagcggtgctaagttgaacaagtaacacaatacagaaaatgctgatatgaatacttagtaataatacaaaagttcctgctaaattatatatgtgtatcactgcctgactagaaaccccacttttcttttctaatccagcacaaaatcaaactctgattctacaaccagtctttttaaagggcaaaaatgactcaacacctttgttttgtatggaaaacttttttttttacactaactgcaaaactgctttaaaaaaaggcttattcaggatagataagcatgtactccttttttaacttgctggaagacttgcccctccaaactagcacccccaaaagacaacttctttcagaaacggggtgttttacctaaacatagtagcttacatgttagccagcagtaggtcggcactagtgttttccacggttatcacctttgacaggtgatgtgcatctatagatagtggaagccaccccatgaggaggtgttaatagcagcatggtttcacttttggtaatcaggtaatcatgtgtatatacttagattcgcattattttaacatttctctgctactctgcacttcaggttcgttaagctattttaataattactggggttatggcaaacaccaatggaaatgtatatggcaactgctttcctgagcaagtgtgatttgttttatggctgttcaagttataaaattgttcttacattgtaggtaaacaaaatcttgatgtttttaaaggtcactgtaacttaaggttcaaatttctggcacagttttattagtattcacttcggaagctaataagataccatggttttctatgttactcccattgtaacattagtaaagtgactttcaataaaagatttatgttattttgaaacacgactc

SEQ ID NO: 59959 - DNA, 6809 bp, Homo sapiens
  misc_feature (1490)..(1490): n is a, c, g, or t
gaattccaaaattgtgatgtttcttgtatttttgatgaaggagaaatactgtaatgatcactgtttacactatgtacactttaggccagccctttgtagcgttatacaaactgaaagcacaccggaccgcaggctcccggggcagggccggggccagagctcgcgtgtcggcgggacatgcgctgcgtcgcctctaacctcgggctgtgctctttttccaggtggcccgccggtttctgagccttctgccctgcggggacacggtctgcaccctgcccgcggccacggaccatgaccatgaccctccacaccaaagcatctgggatggccctactgcatcagatccaagggaacgagctggagcccctgaaccgtccgcagctcaagatccccctggagcggcccctgggcgaggtgtacctggacagcagcaagcccgccgtgtacaactaccccgagggcgccgcctacgagttcaacgccgcggccgccgccaacgcgcaggtctacggtcagaccggcctcccctacggccccgggtctgaggctgcggcgttcggctccaacggcctggggggtttccccccactcaacagcgtgtctccgagcccgctgatgctactgcacccgccgccgcagctgtcgcctttcctgcagccccacggccagcaggtgccctactacctggagaacgagcccagcggctacacggtgcgcgaggccggcccgccggcattctacaggccaaattcagataatcgacgccagggtggcagagaaagattggccagtaccaatgacaagggaagtatggctatggaatctgccaaggagactcgctactgtgcagtgtgcaatgactatgcttcaggctaccattatggagtctggtcctgtgagggctgcaaggccttcttcaagagaagtattcaaggacataacgactatatgtgtccagccaccaaccagtgcaccattgataaaaacaggaggaagagctgccaggcctgccggctccgcaaatgctacgaagtgggaatgatgaaaggtgggatacgaaaagaccgaagaggagggagaatgttgaaacacaagcgccagagagatgatggggagggcaggggtgaagtggggtctgctggagacatgagagctgccaacctttggccaagcccgctcatgatcaaacgctctaagaagaacagcctggccttgtccctgacggccgaccagatggtcagtgccttgttggatgctgagccccccatactctattccgagtatgatcctaccagacccttcagtgaagcttcgatgatgggcttactgaccaacctggcagacagggagctggttcacatgatcaactgggcgaagagggtgccaggctttgtggatttgaccctccatgatcaggtccaccttctagaatgtgcctggctagagatcctgatgattggtctcgtctggcgctccatggagcacccagngaagctactgtttgctcctaacttgctcttggacaggaaccagggaaaatgtgtagagggcatggtggagatcttcgacatgctgctggctacatcatctcggttccgcatgatgaatctgcagggagaggagtttgtgtgcctcaaatctattattttgcttaattctggagtgtacacatttctgtccagcaccctgaagtctctggaagagaaggaccatatccaccgagtcctggacaagatcacagacactttgatccacctgatggccaaggcaggcctgaccctgcagcagcagcaccagcggctggcccagctcctcctcatcctctcccacatcaggcacatgagtaacaaaggcatggagcatctgtacagcatgaagtgcaagaacgtggtgcccctctatgacctgctgctggagatgctggacgcccaccgcctacatgcgcccactagccgtggaggggcatccgtggaggagacggaccaaagccacttggccactgcgggctctacttcatcgcattccttgcaaaagtattacatcacgggggaggcagagggtttccctgccacagtctgagagctccctggctcccacacggttcagataatccctgctgcattttaccctcatcatgcaccactttagccaaattctgtctcctgcatacactccggcatgcatccaacaccaatggctttctagatgagtggccattcatttgcttgctcagttcttagtggcacatcttctgtcttctgttgggaacagccaaagggattccaaggctaaatctttgtaacagctctctttcccccttgctatgttactaagcgtgaggattcccgtagctcttcacagctgaactcagtctatgggttggggctcagataactctgtgcatttaagctacttgtagagacccaggcctggagagtagacattttgcctctgataagcactttttaaatggctctaagaataagccacagcaaagaatttaaagtggctcctttaattggtgacttggagaaagctaggtcaagggtttattatagcaccctcttgtattcctatggcaatgcatccttttatgaaagtggtacaccttaaagcttttatatgactgtagcagagtatctggtgattgtcaattcacttccccctataggaatacaaggggccacacagggaaggcagatcccctagttggccaagacttattttaacttgatacactgcagattcagagtgtcctgaagctctgcctctggctttccggtcatgggttccagttaattcatgcctcccatggacctatggagagcaacaagttgatcttagttaagtctccctatatgagggataagttcctgatttttgtttttatttttgtgttacaaaagaaagccctccctccctgaacttgcagtaaggtcagcttcaggacctgttccagtgggcactgtacttggatcttcccggcgtgtgtgtgccttacacaggggtgaactgttcactgtggtgatgcatgatgagggtaaatggtagttgaaaggagcaggggccctggtgttgcatttagccctggggcatggagctgaacagtacttgtgcaggattgttgtggctactagagaacaagagggaaagtagggcagaaactggatacagttctgagcacagccagacttgctcaggtggccctgcacaggctgcagctacctaggaacattccttgcagaccccgcattgccctttgggggtgccctgggatccctggggtagtccagctcttattcatttcccagcgtggccctggttggaagaagcagctgtcacagctgtgtagacagctgtgttcctacaattggcccagcaccctggggcacgggagaagggtggggaccgttgctgtcactactcaggctgactggggcctggtcagattacgtatgcccttggtggtttagagataatccaaaatcagggtttggtttggggaagaaaatcctcccccttcctcccccgccccgttccctaccgcctccactcctgccagctcatttccttcaatttcctttgacctataggctaaaaaagaaaggctcattccagccacagggcagccttccctgggcctttgcttctctagcacaattatgggttacttcctttttcttaacaaaaaagaatgtttgatttcctctgggtgaccttattgtctgtaattgaaaccctattgagaggtgatgtctgtgttagccaatgacccaggtgagctgctcgggcttctcttggtatgtcttgtttggaaaagtggatttcattcatttctgattgtccagttaagtgatcaccaaaggactgagaatctgggagggcaaaaaaaaaaaaaaaagtttttatgtgcacttaaatttggggacaattttatgtatctgtgttaaggatatgcttaagaacataattcttttgttgctgtttgtttaagaagcaccttagtttgtttaagaagcaccttatatagtataatatatatttttttgaaattacattgcttgtttatcagacaattgaatgtagtaattctgttctggatttaatttgactgggttaacatgcaaaaaccaaggaaaaatatttagtttttttttttttttttgtatacttttcaagctaccttgtcatgtatacagtcatttatgcctaaagcctggtgattattcatttaaatgaagatcacatttcatatcaacttttgtatccacagtagacaaaatagcactaatccagatgcctattgttggatattgaatgacagacaatcttatgtagcaaagattatgcctgaaaaggaaaattattcagggcagctaattttgcttttaccaaaatatcagtagtaatatttttggacagtagctaatgggtcagtgggttctttttaatgtttatacttagattttcttttaaaaaaattaaaataaaacaaaaaaaatttctaggactagacgatgtaataccagctaaagccaaacaattatacagtggaaggttttacattattcatccaatgtgtttctattcatgttaagatactactacatttgaagtgggcagagaacatcagatgattgaaatgttcgcccaggggtctccagcaactttggaaatctctttgtatttttacttgaagtgccactaatggacagcagatattttctggctgatgttggtattgggtgtaggaacatgatttaaaaaaaaaactcttgcctctgctttcccccactctgaggcaagttaaaatgtaaaagatgtgatttatctggggggctcaggtatggtggggaagtggattcaggaatctggggaatggcaaatatattaagaagagtattgaaagtatttggaggaaaatggttaattctgggtgtgcaccagggttcagtagagtccacttctgccctggagaccacaaatcaactagctccatttacagccatttctaaaatggcagcttcagttctagagaagaaagaacaacatcagcagtaaagtccatggaatagctagtggtctgtgtttcttttcgccattgcctagcttgccgtaatgattctataatgccatcatgcagcaattatgagaggctaggtcatccaaagagaagaccctatcaatgtaggttgcaaaatctaacccctaaggaagtgcagtctttgatttgatttccctagtaaccttgcagatatgtttaaccaagccatagcccatgccttttgagggctgaacaaataagggacttactgataatttacttttgatcacattaaggtgttctcaccttgaaatcttatacactgaaatggccattgatttaggccactggcttagagtactccttcccctgcatgacactgattacaaatactttcctattcatactttccaattatgagatggactgtgggtactgggagtgatcactaacaccatagtaatgtctaatattcacaggcagatctgcttggggaagctagttatgtgaaaggcaaatagagtcatacagtagctcaaaaggcaaccataattctctttggtgcaggtcttgggagcgtgatctagattacactgcaccattcccaagttaatcccctgaaaacttactctcaactggagcaaatgaactttggtcccaaatatccatcttttcagtagcgttaattatgctctgtttccaactgcatttcctttccaattgaattaaagtgtggcctcgtttttagtcatttaaaattgttttctaagtaattgctgcctctattatggcacttcaattttgcactgtcttttgagattcaagaaaaatttctattcttttttttgcatccaattgtgcctgaacttttaaaatatgtaaatgctgccatgttccaaacccatcgtcagtgtgtgtgtttagagctgtgcaccctagaaacaacatattgtcccatgagcaggtgcctgagacacagacccctttgcattcacagagaggtcattggttatagagacttgaattaataagtgacattatgccagtttctgttctctcacaggtgataaacaatgctttttgtgcactacatactcttcagtgtagagctcttgttttatgggaaaaggctcaaatgccaaattgtgtttgatggattaatatgcccttttgccgatgcatactattactgatgtgactcggttttgtcgcagctttgctttgtttaatgaaacacacttgtaaacctcttttgcactttgaaaaagaatccagcgggatgctcgagcacctgtaaacaattttctcaacctatttgatgttcaaataaagaattaaactaaagacaacgagtttgttttttgtaagctccacttcttgctagcagttcaccactgatcctctaaaatcaaagtggttaaacgatctgtcacacacagtgagtctgaatgctaaagcctctcctcacctcactccctctgcccaacacccccaggtgtatcaggaagtgtgtggacactgtggtcaggcagaactggcctcaattcttggcttcaccacttacaaattttatgatcattggcagttgatttttcagagtttcggcttccttatcaacaatatgatgataagtaataacacctaattcacacgatggtggtgaggactaactgaggtgctcattaaacatagttgctgttttttaatgcctggcccaaatccttccctgtgagggagaagaaggatgcttgagagtggttattta

SEQ ID NO: 59960 - DNA, 6212 bp, Homo sapiens
gagttgtgcctggagtgatgtttaagccaatgtcagggcaaggcaacagtccctggccgtcctccagcacctttgtaatgcatatgagctcgggagaccagtacttaaagttggaggcccgggagcccaggagctggcggagggcgttcgtcctgggagctgcacttgctccgtcgggtcgccggcttcaccggaccgcaggctcccggggcagggccggggccagagctcgcgtgtcggcgggacatgcgctgcgtcgcctctaacctcgggctgtgctctttttccaggtggcccgccggtttctgagccttctgccctgcggggacacggtctgcaccctgcccgcggccacggaccatgaccatgaccctccacaccaaagcatctgggatggccctactgcatcagatccaagggaacgagctggagcccctgaaccgtccgcagctcaagatccccctggagcggcccctgggcgaggtgtacctggacagcagcaagcccgccgtgtacaactaccccgagggcgccgcctacgagttcaacgccgcggccgccgccaacgcgcaggtctacggtcagaccggcctcccctacggccccgggtctgaggctgcggcgttcggctccaacggcctggggggtttccccccactcaacagcgtgtctccgagcccgctgatgctactgcacccgccgccgcagctgtcgcctttcctgcagccccacggccagcaggtgccctactacctggagaacgagcccagcggctacacggtgcgcgaggccggcccgccggcattctacaggacataacgactatatgtgtccagccaccaaccagtgcaccattgataaaaacaggaggaagagctgccaggcctgccggctccgcaaatgctacgaagtgggaatgatgaaaggtggaaccagggaaaatgtgtagagggcatggtggagatcttcgacatgctgctggctacatcatctcggttccgcatgatgaatctgcagggagaggagtttgtgtgcctcaaatctattattttgcttaattctggagtgtacacatttctgtccagcaccctgaagtctctggaagagaaggaccatatccaccgagtcctggacaagatcacagacactttgatccacctgatggccaaggcaggcctgaccctgcagcagcagcaccagcggctggcccagctcctcctcatcctctcccacatcaggcacatgagtaacaaaggcatggagcatctgtacagcatgaagtgcaagaacgtggtgcccctctatgacctgctgctggagatgctggacgcccaccgcctacatgcgcccactagccgtggaggggcatccgtggaggagacggaccaaagccacttggccactgcgggctctacttcatcgcattccttgcaaaagtattacatcacgggggaggcagagggtttccctgccacagtctgagagctccctggctcccacacggttcagataatccctgctgcattttaccctcatcatgcaccactttagccaaattctgtctcctgcatacactccggcatgcatccaacaccaatggctttctagatgagtggccattcatttgcttgctcagttcttagtggcacatcttctgtcttctgttgggaacagccaaagggattccaaggctaaatctttgtaacagctctctttcccccttgctatgttactaagcgtgaggattcccgtagctcttcacagctgaactcagtctatgggttggggctcagataactctgtgcatttaagctacttgtagagacccaggcctggagagtagacattttgcctctgataagcactttttaaatggctctaagaataagccacagcaaagaatttaaagtggctcctttaattggtgacttggagaaagctaggtcaagggtttattatagcaccctcttgtattcctatggcaatgcatccttttatgaaagtggtacaccttaaagcttttatatgactgtagcagagtatctggtgattgtcaattcacttccccctataggaatacaaggggccacacagggaaggcagatcccctagttggccaagacttattttaacttgatacactgcagattcagagtgtcctgaagctctgcctctggctttccggtcatgggttccagttaattcatgcctcccatggacctatggagagcaacaagttgatcttagttaagtctccctatatgagggataagttcctgatttttgtttttatttttgtgttacaaaagaaagccctccctccctgaacttgcagtaaggtcagcttcaggacctgttccagtgggcactgtacttggatcttcccggcgtgtgtgtgccttacacaggggtgaactgttcactgtggtgatgcatgatgagggtaaatggtagttgaaaggagcaggggccctggtgttgcatttagccctggggcatggagctgaacagtacttgtgcaggattgttgtggctactagagaacaagagggaaagtagggcagaaactggatacagttctgagcacagccagacttgctcaggtggccctgcacaggctgcagctacctaggaacattccttgcagaccccgcattgccctttgggggtgccctgggatccctggggtagtccagctcttattcatttcccagcgtggccctggttggaagaagcagctgtcacagctgtgtagacagctgtgttcctacaattggcccagcaccctggggcacgggagaagggtggggaccgttgctgtcactactcaggctgactggggcctggtcagattacgtatgcccttggtggtttagagataatccaaaatcagggtttggtttggggaagaaaatcctcccccttcctcccccgccccgttccctaccgcctccactcctgccagctcatttccttcaatttcctttgacctataggctaaaaaagaaaggctcattccagccacagggcagccttccctgggcctttgcttctctagcacaattatgggttacttcctttttcttaacaaaaaagaatgtttgatttcctctgggtgaccttattgtctgtaattgaaaccctattgagaggtgatgtctgtgttagccaatgacccaggtgagctgctcgggcttctcttggtatgtcttgtttggaaaagtggatttcattcatttctgattgtccagttaagtgatcaccaaaggactgagaatctgggagggcaaaaaaaaaaaaaaaagtttttatgtgcacttaaatttggggacaattttatgtatctgtgttaaggatatgcttaagaacataattcttttgttgctgtttgtttaagaagcaccttagtttgtttaagaagcaccttatatagtataatatatatttttttgaaattacattgcttgtttatcagacaattgaatgtagtaattctgttctggatttaatttgactgggttaacatgcaaaaaccaaggaaaaatatttagtttttttttttttttttgtatacttttcaagctaccttgtcatgtatacagtcatttatgcctaaagcctggtgattattcatttaaatgaagatcacatttcatatcaacttttgtatccacagtagacaaaatagcactaatccagatgcctattgttggatattgaatgacagacaatcttatgtagcaaagattatgcctgaaaaggaaaattattcagggcagctaattttgcttttaccaaaatatcagtagtaatatttttggacagtagctaatgggtcagtgggttctttttaatgtttatacttagattttcttttaaaaaaattaaaataaaacaaaaaaaatttctaggactagacgatgtaataccagctaaagccaaacaattatacagtggaaggttttacattattcatccaatgtgtttctattcatgttaagatactactacatttgaagtgggcagagaacatcagatgattgaaatgttcgcccaggggtctccagcaactttggaaatctctttgtatttttacttgaagtgccactaatggacagcagatattttctggctgatgttggtattgggtgtaggaacatgatttaaaaaaaaaactcttgcctctgctttcccccactctgaggcaagttaaaatgtaaaagatgtgatttatctggggggctcaggtatggtggggaagtggattcaggaatctggggaatggcaaatatattaagaagagtattgaaagtatttggaggaaaatggttaattctgggtgtgcaccagggttcagtagagtccacttctgccctggagaccacaaatcaactagctccatttacagccatttctaaaatggcagcttcagttctagagaagaaagaacaacatcagcagtaaagtccatggaatagctagtggtctgtgtttcttttcgccattgcctagcttgccgtaatgattctataatgccatcatgcagcaattatgagaggctaggtcatccaaagagaagaccctatcaatgtaggttgcaaaatctaacccctaaggaagtgcagtctttgatttgatttccctagtaaccttgcagatatgtttaaccaagccatagcccatgccttttgagggctgaacaaataagggacttactgataatttacttttgatcacattaaggtgttctcaccttgaaatcttatacactgaaatggccattgatttaggccactggcttagagtactccttcccctgcatgacactgattacaaatactttcctattcatactttccaattatgagatggactgtgggtactgggagtgatcactaacaccatagtaatgtctaatattcacaggcagatctgcttggggaagctagttatgtgaaaggcaaatagagtcatacagtagctcaaaaggcaaccataattctctttggtgcaggtcttgggagcgtgatctagattacactgcaccattcccaagttaatcccctgaaaacttactctcaactggagcaaatgaactttggtcccaaatatccatcttttcagtagcgttaattatgctctgtttccaactgcatttcctttccaattgaattaaagtgtggcctcgtttttagtcatttaaaattgttttctaagtaattgctgcctctattatggcacttcaattttgcactgtcttttgagattcaagaaaaatttctattcttttttttgcatccaattgtgcctgaacttttaaaatatgtaaatgctgccatgttccaaacccatcgtcagtgtgtgtgtttagagctgtgcaccctagaaacaacatattgtcccatgagcaggtgcctgagacacagacccctttgcattcacagagaggtcattggttatagagacttgaattaataagtgacattatgccagtttctgttctctcacaggtgataaacaatgctttttgtgcactacatactcttcagtgtagagctcttgttttatgggaaaaggctcaaatgccaaattgtgtttgatggattaatatgcccttttgccgatgcatactattactgatgtgactcggttttgtcgcagctttgctttgtttaatgaaacacacttgtaaacctcttttgcactttgaaaaagaatccagcgggatgctcgagcacctgtaaacaattttctcaacctatttgatgttcaaataaagaattaaactaaagacaacgagtttgttttttgtaagctccacttcttgctagcagttcaccactgatcctctaaaatcaaagtggttaaacgatctgtcacacacagtgagtctgaatgctaaagcctctcctcacctcactccctctgcccaacacccccaggtgtatcaggaagtgtgtggacactgtggtcaggcagaactggcctcaattcttggcttcaccacttacaaattttatgatcattggcagttgatttttcagagtttcggcttccttatcaacaatatgatgataagtaataacacctaattcacacgatggtggtgaggactaactgaggtgctcattaaacatagttgctgttttttaatgcctggcccaaatccttccctgtgagggagaagaaggatgcttgagagtggttattta

SEQ ID NO: 59961 - DNA, 5974 bp, Homo sapiens
  misc_feature (655)..(655): n is a, c, g, or t
gagttgtgcctggagtgatgtttaagccaatgtcagggcaaggcaacagtccctggccgtcctccagcacctttgtaatgcatatgagctcgggagaccagtacttaaagttggaggcccgggagcccaggagctggcggagggcgttcgtcctgggagctgcacttgctccgtcgggtcgccggcttcaccggaccgcaggctcccggggcagggccggggccagagctcgcgtgtcggcgggacatgcgctgcgtcgcctctaacctcgggctgtgctctttttccaggtggcccgccggtttctgagccttctgccctgcggggacacggtctgcaccctgcccgcggccacggaccatgaccatgaccctccacaccaaagcatctgggatggccctactgcatcagatccaagggaacgagctggagcccctgaaccgtccaccttctagaatgtgcctggctagagatcctgatgattggtctcgtctggcgctccatggagcacccagtgaagctactgtttgctcctaacttgctcttggacaggctttgtggatttgaccctccatgatcaggtccaccttctagaatgtgcctggctagagatcctgatgattggtctcgtctggcgctccatggagcacccagngaagctactgtttgctcctaacttgctcttggacaggaaccagggaaaatgtgtagagggcatggtggagatcttcgacatgctgctggctacatcatctcggttccgcatgatgaatctgcagggagaggagtttgtgtgcctcaaatctattattttgcttaattctggagtgtacacatttctgtccagcaccctgaagtctctggaagagaaggaccatatccaccgagtcctggacaagatcacagacactttgatccacctgatggccaaggcaggcctgaccctgcagcagcagcaccagcggctggcccagctcctcctcatcctctcccacatcaggcacatgagtaacaaaggcatggagcatctgtacagcatgaagtgcaagaacgtggtgcccctctatgacctgctgctggagatgctggacgcccaccgcctacatgcgcccactagccgtggaggggcatccgtggaggagacggaccaaagccacttggccactgcgggctctacttcatcgcattccttgcaaaagtattacatcacgggggaggcagagggtttccctgccacagtctgagagctccctggctcccacacggttcagataatccctgctgcattttaccctcatcatgcaccactttagccaaattctgtctcctgcatacactccggcatgcatccaacaccaatggctttctagatgagtggccattcatttgcttgctcagttcttagtggcacatcttctgtcttctgttgggaacagccaaagggattccaaggctaaatctttgtaacagctctctttcccccttgctatgttactaagcgtgaggattcccgtagctcttcacagctgaactcagtctatgggttggggctcagataactctgtgcatttaagctacttgtagagacccaggcctggagagtagacattttgcctctgataagcactttttaaatggctctaagaataagccacagcaaagaatttaaagtggctcctttaattggtgacttggagaaagctaggtcaagggtttattatagcaccctcttgtattcctatggcaatgcatccttttatgaaagtggtacaccttaaagcttttatatgactgtagcagagtatctggtgattgtcaattcacttccccctataggaatacaaggggccacacagggaaggcagatcccctagttggccaagacttattttaacttgatacactgcagattcagagtgtcctgaagctctgcctctggctttccggtcatgggttccagttaattcatgcctcccatggacctatggagagcaacaagttgatcttagttaagtctccctatatgagggataagttcctgatttttgtttttatttttgtgttacaaaagaaagccctccctccctgaacttgcagtaaggtcagcttcaggacctgttccagtgggcactgtacttggatcttcccggcgtgtgtgtgccttacacaggggtgaactgttcactgtggtgatgcatgatgagggtaaatggtagttgaaaggagcaggggccctggtgttgcatttagccctggggcatggagctgaacagtacttgtgcaggattgttgtggctactagagaacaagagggaaagtagggcagaaactggatacagttctgagcacagccagacttgctcaggtggccctgcacaggctgcagctacctaggaacattccttgcagaccccgcattgccctttgggggtgccctgggatccctggggtagtccagctcttattcatttcccagcgtggccctggttggaagaagcagctgtcacagctgtgtagacagctgtgttcctacaattggcccagcaccctggggcacgggagaagggtggggaccgttgctgtcactactcaggctgactggggcctggtcagattacgtatgcccttggtggtttagagataatccaaaatcagggtttggtttggggaagaaaatcctcccccttcctcccccgccccgttccctaccgcctccactcctgccagctcatttccttcaatttcctttgacctataggctaaaaaagaaaggctcattccagccacagggcagccttccctgggcctttgcttctctagcacaattatgggttacttcctttttcttaacaaaaaagaatgtttgatttcctctgggtgaccttattgtctgtaattgaaaccctattgagaggtgatgtctgtgttagccaatgacccaggtgagctgctcgggcttctcttggtatgtcttgtttggaaaagtggatttcattcatttctgattgtccagttaagtgatcaccaaaggactgagaatctgggagggcaaaaaaaaaaaaaaaagtttttatgtgcacttaaatttggggacaattttatgtatctgtgttaaggatatgcttaagaacataattcttttgttgctgtttgtttaagaagcaccttagtttgtttaagaagcaccttatatagtataatatatatttttttgaaattacattgcttgtttatcagacaattgaatgtagtaattctgttctggatttaatttgactgggttaacatgcaaaaaccaaggaaaaatatttagtttttttttttttttttgtatacttttcaagctaccttgtcatgtatacagtcatttatgcctaaagcctggtgattattcatttaaatgaagatcacatttcatatcaacttttgtatccacagtagacaaaatagcactaatccagatgcctattgttggatattgaatgacagacaatcttatgtagcaaagattatgcctgaaaaggaaaattattcagggcagctaattttgcttttaccaaaatatcagtagtaatatttttggacagtagctaatgggtcagtgggttctttttaatgtttatacttagattttcttttaaaaaaattaaaataaaacaaaaaaaatttctaggactagacgatgtaataccagctaaagccaaacaattatacagtggaaggttttacattattcatccaatgtgtttctattcatgttaagatactactacatttgaagtgggcagagaacatcagatgattgaaatgttcgcccaggggtctccagcaactttggaaatctctttgtatttttacttgaagtgccactaatggacagcagatattttctggctgatgttggtattgggtgtaggaacatgatttaaaaaaaaaactcttgcctctgctttcccccactctgaggcaagttaaaatgtaaaagatgtgatttatctggggggctcaggtatggtggggaagtggattcaggaatctggggaatggcaaatatattaagaagagtattgaaagtatttggaggaaaatggttaattctgggtgtgcaccagggttcagtagagtccacttctgccctggagaccacaaatcaactagctccatttacagccatttctaaaatggcagcttcagttctagagaagaaagaacaacatcagcagtaaagtccatggaatagctagtggtctgtgtttcttttcgccattgcctagcttgccgtaatgattctataatgccatcatgcagcaattatgagaggctaggtcatccaaagagaagaccctatcaatgtaggttgcaaaatctaacccctaaggaagtgcagtctttgatttgatttccctagtaaccttgcagatatgtttaaccaagccatagcccatgccttttgagggctgaacaaataagggacttactgataatttacttttgatcacattaaggtgttctcaccttgaaatcttatacactgaaatggccattgatttaggccactggcttagagtactccttcccctgcatgacactgattacaaatactttcctattcatactttccaattatgagatggactgtgggtactgggagtgatcactaacaccatagtaatgtctaatattcacaggcagatctgcttggggaagctagttatgtgaaaggcaaatagagtcatacagtagctcaaaaggcaaccataattctctttggtgcaggtcttgggagcgtgatctagattacactgcaccattcccaagttaatcccctgaaaacttactctcaactggagcaaatgaactttggtcccaaatatccatcttttcagtagcgttaattatgctctgtttccaactgcatttcctttccaattgaattaaagtgtggcctcgtttttagtcatttaaaattgttttctaagtaattgctgcctctattatggcacttcaattttgcactgtcttttgagattcaagaaaaatttctattcttttttttgcatccaattgtgcctgaacttttaaaatatgtaaatgctgccatgttccaaacccatcgtcagtgtgtgtgtttagagctgtgcaccctagaaacaacatattgtcccatgagcaggtgcctgagacacagacccctttgcattcacagagaggtcattggttatagagacttgaattaataagtgacattatgccagtttctgttctctcacaggtgataaacaatgctttttgtgcactacatactcttcagtgtagagctcttgttttatgggaaaaggctcaaatgccaaattgtgtttgatggattaatatgcccttttgccgatgcatactattactgatgtgactcggttttgtcgcagctttgctttgtttaatgaaacacacttgtaaacctcttttgcactttgaaaaagaatccagcgggatgctcgagcacctgtaaacaattttctcaacctatttgatgttcaaataaagaattaaactaaagacaacgagtttgttttttgtaagctccacttcttgctagcagttcaccactgatcctctaaaatcaaagtggttaaacgatctgtcacacacagtgagtctgaatgctaaagcctctcctcacctcactccctctgcccaacacccccaggtgtatcaggaagtgtgtggacactgtggtcaggcagaactggcctcaattcttggcttcaccacttacaaattttatgatcattggcagttgatttttcagagtttcggcttccttatcaacaatatgatgataagtaataacacctaattcacacgatggtggtgaggactaactgaggtgctcattaaacatagttgctgttttttaatgcctggcccaaatccttccctgtgagggagaagaaggatgcttgagagtggttattta

SEQ ID NO: 59962 - DNA, 2435 bp, Homo sapiens
gagttgtgcctggagtgatgtttaagccaatgtcagggcaaggcaacagtccctggccgtcctccagcacctttgtaatgcatatgagctcgggagaccagtacttaaagttggaggcccgggagcccaggagctggcggagggcgttcgtcctgggagctgcacttgctccgtcgggtcgccggcttcaccggaccgcaggctcccggggcagggccggggccagagctcgcgtgtcggcgggacatgcgctgcgtcgcctctaacctcgggctgtgctctttttccaggtggcccgccggtttctgagccttctgccctgcggggacacggtctgcaccctgcccgcggccacggaccatgaccatgaccctccacaccaaagcatctgggatggccctactgcatcagatccaagggaacgagctggagcccctgaaccgtccgcagctcaagatccccctggagcggcccctgggcgaggtgtacctggacagcagcaagcccgccgtgtacaactaccccgagggcgccgcctacgagttcaacgccgcggccgccgccaacgcgcaggtctacggtcagaccggcctcccctacggccccgggtctgaggctgcggcgttcggctccaacggcctggggggtttccccccactcaacagcgtgtctccgagcccgctgatgctactgcacccgccgccgcagctgtcgcctttcctgcagccccacggccagcaggtgccctactacctggagaacgagcccagcggctacacggtgcgcgaggccggcccgccggcattctacaggccaaattcagataatcgacgccagggtggcagagaaagattggccagtaccaatgacaagggaagtatggctatggaatctgccaaggagactcgctactgtgcagtgtgcaatgactatgcttcaggctaccattatggagtctggtcctgtgagggctgcaaggccttcttcaagagaagtattcaagaacttccaacactatgttgaataggatggtactggtaccaaaacagagatatagaccaatggaacagaacagagccctcagaaataataccacacatctacaaccatctgatctttgacaaacgtgacaaaaacaagaaatggggaaaggattccctatttaataaatagtgctgggaaaactggctagccatatgtagaaagctgaaactggatcacttccttacaccttatacaaaaattaattcaagatggattaaagacttaaatgttagaactaaaaccataaaaaccctagaagaaaacctaggcaataccattcaggacataggcatgggcaaggacttcatgtctaaaacaccaaaagcaatggcaacaaaagccaaaattgacaaatgggatctaattaaactaaagagcttctgttctttgctggggtatctgaagactgaaaacacagcaaaagaaactaccatcagactgaacaggcaacctacagaatgggagaaaatttttgcaatctactcatctgacaaagggctaatatccagaatctacaaagaactcaaacaaatttacaagaaaaaaggaaccccatcaacaagtgggtgaaggatatgaacagacacttctcaaaagaagacatttatgcagccaacagacacatgaaaaaatgctcatcatcattggccatcagagaaatgcaaatcaaaaccacaatgagataccatctcacaccagttagaatggtgatcattagaaagtcaggaaacgacaggtgctggagaggatgtggagaaataggaacacttttacactgttggtgggactgtaaactggttcaaccattgtggaagacagtgtggcgattcctcagggatctacaactagaaataccatttgacccagccatcccattactgggtatatacccaaaggattataaatcatgctgctataaagacacatgcacacgtatgtttattgcggcactattcacaatagcaaagacttggaaccaacctaaatatccaacaacaataggctagattaagaaaatgtggcacatatacaccatggaatactatgcagccataaaaaaggatgagttcatatacttgtagggacatggatgaagctggaaaccatcattctcagcaaactattgcaaggacaaaaaaccaaacatgcatgttctcactcataggtgggaattgaacaataagaacacttggacacagggtggggaacattacacactggggcctgttgtggggtggggggaggggggagggatagcattaggagatataactaatgtaaatgatgagttaatgggtgcagcacaccaacatggcacatgtatacatatgtaacaaacctgcacattgtgcacatgtaccctagaacttaaagtataataaaaaatattt

SEQ ID NO: 59963 - DNA, 7119 bp, Homo sapiens
  misc_feature (1485)..(1485): n is a, c, g, or t
aacaggctcgaaaggtccatgctcctttctcctgcccattctatagcataagaagacagtctctgagtgataatcttctcttcaagaagaagaaaactaggaaggagtaagcacaaagatctcttcacattctccgggactgcggtaccaaatatcagcacagcacttcttgaaaaaggatgtagattttaatctgaactttgaaccatcactgaggtggcccgccggtttctgagccttctgccctgcggggacacggtctgcaccctgcccgcggccacggaccatgaccatgaccctccacaccaaagcatctgggatggccctactgcatcagatccaagggaacgagctggagcccctgaaccgtccgcagctcaagatccccctggagcggcccctgggcgaggtgtacctggacagcagcaagcccgccgtgtacaactaccccgagggcgccgcctacgagttcaacgccgcggccgccgccaacgcgcaggtctacggtcagaccggcctcccctacggccccgggtctgaggctgcggcgttcggctccaacggcctggggggtttccccccactcaacagcgtgtctccgagcccgctgatgctactgcacccgccgccgcagctgtcgcctttcctgcagccccacggccagcaggtgccctactacctggagaacgagcccagcggctacacggtgcgcgaggccggcccgccggcattctacaggccaaattcagataatcgacgccagggtggcagagaaagattggccagtaccaatgacaagggaagtatggctatggaatctgccaaggagactcgctactgtgcagtgtgcaatgactatgcttcaggctaccattatggagtctggtcctgtgagggctgcaaggccttcttcaagagaagtattcaaggacataacgactatatgtgtccagccaccaaccagtgcaccattgataaaaacaggaggaagagctgccaggcctgccggctccgcaaatgctacgaagtgggaatgatgaaaggtgggatacgaaaagaccgaagaggagggagaatgttgaaacacaagcgccagagagatgatggggagggcaggggtgaagtggggtctgctggagacatgagagctgccaacctttggccaagcccgctcatgatcaaacgctctaagaagaacagcctggccttgtccctgacggccgaccagatggtcagtgccttgttggatgctgagccccccatactctattccgagtatgatcctaccagacccttcagtgaagcttcgatgatgggcttactgaccaacctggcagacagggagctggttcacatgatcaactgggcgaagagggtgccaggctttgtggatttgaccctccatgatcaggtccaccttctagaatgtgcctggctagagatcctgatgattggtctcgtctggcgctccatggagcacccagngaagctactgtttgctcctaacttgctcttggacaggaaccagggaaaatgtgtagagggcatggtggagatcttcgacatgctgctggctacatcatctcggttccgcatgatgaatctgcagggagaggagtttgtgtgcctcaaatctattattttgcttaattctggagtgtacacatttctgtccagcaccctgaagtctctggaagagaaggaccatatccaccgagtcctggacaagatcacagacactttgatccacctgatggccaaggcaggcctgaccctgcagcagcagcaccagcggctggcccagctcctcctcatcctctcccacatcaggcacatgagaaccagggaaaatgtgtagagggcatggtggagatcttcgacatgctgctggctacatcatctcggttccgcatgatgaatctgcagggagaggagtttgtgtgcctcaaatctattattttgcttaattctggagtgtacacatttctgtccagcaccctgaagtctctggaagagaaggaccatatccaccgagtcctggacaagatcacagacactttgatccacctgatggccaaggcaggcctgaccctgcagcagcagcaccagcggctggcccagctcctcctcatcctctcccacatcaggcacatgtaacaaaggcatggagcatctgtacagcatgaagtgcaagaacgtggtgcccctctatgacctgctgctggagatgctggacgcccaccgcctacatgcgcccactagccgtggaggggcatccgtggaggagacggaccaaagccacttggccactgcgggctctacttcatcgcattccttgcaaaagtattacatcacgggggaggcagagggtttccctgccacagtctgagagctccctggctcccacacggttcagataatccctgctgcattttaccctcatcatgcaccactttagccaaattctgtctcctgcatacactccggcatgcatccaacaccaatggctttctagatgagtggccattcatttgcttgctcagttcttagtggcacatcttctgtcttctgttgggaacagccaaagggattccaaggctaaatctttgtaacagctctctttcccccttgctatgttactaagcgtgaggattcccgtagctcttcacagctgaactcagtctatgggttggggctcagataactctgtgcatttaagctacttgtagagacccaggcctggagagtagacattttgcctctgataagcactttttaaatggctctaagaataagccacagcaaagaatttaaagtggctcctttaattggtgacttggagaaagctaggtcaagggtttattatagcaccctcttgtattcctatggcaatgcatccttttatgaaagtggtacaccttaaagcttttatatgactgtagcagagtatctggtgattgtcaattcacttccccctataggaatacaaggggccacacagggaaggcagatcccctagttggccaagacttattttaacttgatacactgcagattcagagtgtcctgaagctctgcctctggctttccggtcatgggttccagttaattcatgcctcccatggacctatggagagcaacaagttgatcttagttaagtctccctatatgagggataagttcctgatttttgtttttatttttgtgttacaaaagaaagccctccctccctgaacttgcagtaaggtcagcttcaggacctgttccagtgggcactgtacttggatcttcccggcgtgtgtgtgccttacacaggggtgaactgttcactgtggtgatgcatgatgagggtaaatggtagttgaaaggagcaggggccctggtgttgcatttagccctggggcatggagctgaacagtacttgtgcaggattgttgtggctactagagaacaagagggaaagtagggcagaaactggatacagttctgagcacagccagacttgctcaggtggccctgcacaggctgcagctacctaggaacattccttgcagaccccgcattgccctttgggggtgccctgggatccctggggtagtccagctcttattcatttcccagcgtggccctggttggaagaagcagctgtcacagctgtgtagacagctgtgttcctacaattggcccagcaccctggggcacgggagaagggtggggaccgttgctgtcactactcaggctgactggggcctggtcagattacgtatgcccttggtggtttagagataatccaaaatcagggtttggtttggggaagaaaatcctcccccttcctcccccgccccgttccctaccgcctccactcctgccagctcatttccttcaatttcctttgacctataggctaaaaaagaaaggctcattccagccacagggcagccttccctgggcctttgcttctctagcacaattatgggttacttcctttttcttaacaaaaaagaatgtttgatttcctctgggtgaccttattgtctgtaattgaaaccctattgagaggtgatgtctgtgttagccaatgacccaggtgagctgctcgggcttctcttggtatgtcttgtttggaaaagtggatttcattcatttctgattgtccagttaagtgatcaccaaaggactgagaatctgggagggcaaaaaaaaaaaaaaaagtttttatgtgcacttaaatttggggacaattttatgtatctgtgttaaggatatgcttaagaacataattcttttgttgctgtttgtttaagaagcaccttagtttgtttaagaagcaccttatatagtataatatatatttttttgaaattacattgcttgtttatcagacaattgaatgtagtaattctgttctggatttaatttgactgggttaacatgcaaaaaccaaggaaaaatatttagtttttttttttttttttgtatacttttcaagctaccttgtcatgtatacagtcatttatgcctaaagcctggtgattattcatttaaatgaagatcacatttcatatcaacttttgtatccacagtagacaaaatagcactaatccagatgcctattgttggatattgaatgacagacaatcttatgtagcaaagattatgcctgaaaaggaaaattattcagggcagctaattttgcttttaccaaaatatcagtagtaatatttttggacagtagctaatgggtcagtgggttctttttaatgtttatacttagattttcttttaaaaaaattaaaataaaacaaaaaaaatttctaggactagacgatgtaataccagctaaagccaaacaattatacagtggaaggttttacattattcatccaatgtgtttctattcatgttaagatactactacatttgaagtgggcagagaacatcagatgattgaaatgttcgcccaggggtctccagcaactttggaaatctctttgtatttttacttgaagtgccactaatggacagcagatattttctggctgatgttggtattgggtgtaggaacatgatttaaaaaaaaaactcttgcctctgctttcccccactctgaggcaagttaaaatgtaaaagatgtgatttatctggggggctcaggtatggtggggaagtggattcaggaatctggggaatggcaaatatattaagaagagtattgaaagtatttggaggaaaatggttaattctgggtgtgcaccagggttcagtagagtccacttctgccctggagaccacaaatcaactagctccatttacagccatttctaaaatggcagcttcagttctagagaagaaagaacaacatcagcagtaaagtccatggaatagctagtggtctgtgtttcttttcgccattgcctagcttgccgtaatgattctataatgccatcatgcagcaattatgagaggctaggtcatccaaagagaagaccctatcaatgtaggttgcaaaatctaacccctaaggaagtgcagtctttgatttgatttccctagtaaccttgcagatatgtttaaccaagccatagcccatgccttttgagggctgaacaaataagggacttactgataatttacttttgatcacattaaggtgttctcaccttgaaatcttatacactgaaatggccattgatttaggccactggcttagagtactccttcccctgcatgacactgattacaaatactttcctattcatactttccaattatgagatggactgtgggtactgggagtgatcactaacaccatagtaatgtctaatattcacaggcagatctgcttggggaagctagttatgtgaaaggcaaatagagtcatacagtagctcaaaaggcaaccataattctctttggtgcaggtcttgggagcgtgatctagattacactgcaccattcccaagttaatcccctgaaaacttactctcaactggagcaaatgaactttggtcccaaatatccatcttttcagtagcgttaattatgctctgtttccaactgcatttcctttccaattgaattaaagtgtggcctcgtttttagtcatttaaaattgttttctaagtaattgctgcctctattatggcacttcaattttgcactgtcttttgagattcaagaaaaatttctattcttttttttgcatccaattgtgcctgaacttttaaaatatgtaaatgctgccatgttccaaacccatcgtcagtgtgtgtgtttagagctgtgcaccctagaaacaacatattgtcccatgagcaggtgcctgagacacagacccctttgcattcacagagaggtcattggttatagagacttgaattaataagtgacattatgccagtttctgttctctcacaggtgataaacaatgctttttgtgcactacatactcttcagtgtagagctcttgttttatgggaaaaggctcaaatgccaaattgtgtttgatggattaatatgcccttttgccgatgcatactattactgatgtgactcggttttgtcgcagctttgctttgtttaatgaaacacacttgtaaacctcttttgcactttgaaaaagaatccagcgggatgctcgagcacctgtaaacaattttctcaacctatttgatgttcaaataaagaattaaactaaagacaacgagtttgttttttgtaagctccacttcttgctagcagttcaccactgatcctctaaaatcaaagtggttaaacgatctgtcacacacagtgagtctgaatgctaaagcctctcctcacctcactccctctgcccaacacccccaggtgtatcaggaagtgtgtggacactgtggtcaggcagaactggcctcaattcttggcttcaccacttacaaattttatgatcattggcagttgatttttcagagtttcggcttccttatcaacaatatgatgataagtaataacacctaattcacacgatggtggtgaggactaactgaggtgctcattaaacatagttgctgttttttaatgcctggcccaaatccttccctgtgagggagaagaaggatgcttgagagtggttattta

SEQ ID NO: 59964 - DNA, 7107 bp, Homo sapiens
  misc_feature (1473)..(1473): n is a, c, g, or t
gagcctcaaatatctccaaaatctgataccaatccttttgattgtgaattatattctgtagctaccaaagaaggaagaagaaaactaggaaggagtaagcacaaagatctcttcacattctccgggactgcggtaccaaatatcagcacagcacttcttgaaaaaggatgtagattttaatctgaactttgaaccatcactgaggtggcccgccggtttctgagccttctgccctgcggggacacggtctgcaccctgcccgcggccacggaccatgaccatgaccctccacaccaaagcatctgggatggccctactgcatcagatccaagggaacgagctggagcccctgaaccgtccgcagctcaagatccccctggagcggcccctgggcgaggtgtacctggacagcagcaagcccgccgtgtacaactaccccgagggcgccgcctacgagttcaacgccgcggccgccgccaacgcgcaggtctacggtcagaccggcctcccctacggccccgggtctgaggctgcggcgttcggctccaacggcctggggggtttccccccactcaacagcgtgtctccgagcccgctgatgctactgcacccgccgccgcagctgtcgcctttcctgcagccccacggccagcaggtgccctactacctggagaacgagcccagcggctacacggtgcgcgaggccggcccgccggcattctacaggccaaattcagataatcgacgccagggtggcagagaaagattggccagtaccaatgacaagggaagtatggctatggaatctgccaaggagactcgctactgtgcagtgtgcaatgactatgcttcaggctaccattatggagtctggtcctgtgagggctgcaaggccttcttcaagagaagtattcaaggacataacgactatatgtgtccagccaccaaccagtgcaccattgataaaaacaggaggaagagctgccaggcctgccggctccgcaaatgctacgaagtgggaatgatgaaaggtgggatacgaaaagaccgaagaggagggagaatgttgaaacacaagcgccagagagatgatggggagggcaggggtgaagtggggtctgctggagacatgagagctgccaacctttggccaagcccgctcatgatcaaacgctctaagaagaacagcctggccttgtccctgacggccgaccagatggtcagtgccttgttggatgctgagccccccatactctattccgagtatgatcctaccagacccttcagtgaagcttcgatgatgggcttactgaccaacctggcagacagggagctggttcacatgatcaactgggcgaagagggtgccaggctttgtggatttgaccctccatgatcaggtccaccttctagaatgtgcctggctagagatcctgatgattggtctcgtctggcgctccatggagcacccagngaagctactgtttgctcctaacttgctcttggacaggaaccagggaaaatgtgtagagggcatggtggagatcttcgacatgctgctggctacatcatctcggttccgcatgatgaatctgcagggagaggagtttgtgtgcctcaaatctattattttgcttaattctggagtgtacacatttctgtccagcaccctgaagtctctggaagagaaggaccatatccaccgagtcctggacaagatcacagacactttgatccacctgatggccaaggcaggcctgaccctgcagcagcagcaccagcggctggcccagctcctcctcatcctctcccacatcaggcacatgagaaccagggaaaatgtgtagagggcatggtggagatcttcgacatgctgctggctacatcatctcggttccgcatgatgaatctgcagggagaggagtttgtgtgcctcaaatctattattttgcttaattctggagtgtacacatttctgtccagcaccctgaagtctctggaagagaaggaccatatccaccgagtcctggacaagatcacagacactttgatccacctgatggccaaggcaggcctgaccctgcagcagcagcaccagcggctggcccagctcctcctcatcctctcccacatcaggcacatgtaacaaaggcatggagcatctgtacagcatgaagtgcaagaacgtggtgcccctctatgacctgctgctggagatgctggacgcccaccgcctacatgcgcccactagccgtggaggggcatccgtggaggagacggaccaaagccacttggccactgcgggctctacttcatcgcattccttgcaaaagtattacatcacgggggaggcagagggtttccctgccacagtctgagagctccctggctcccacacggttcagataatccctgctgcattttaccctcatcatgcaccactttagccaaattctgtctcctgcatacactccggcatgcatccaacaccaatggctttctagatgagtggccattcatttgcttgctcagttcttagtggcacatcttctgtcttctgttgggaacagccaaagggattccaaggctaaatctttgtaacagctctctttcccccttgctatgttactaagcgtgaggattcccgtagctcttcacagctgaactcagtctatgggttggggctcagataactctgtgcatttaagctacttgtagagacccaggcctggagagtagacattttgcctctgataagcactttttaaatggctctaagaataagccacagcaaagaatttaaagtggctcctttaattggtgacttggagaaagctaggtcaagggtttattatagcaccctcttgtattcctatggcaatgcatccttttatgaaagtggtacaccttaaagcttttatatgactgtagcagagtatctggtgattgtcaattcacttccccctataggaatacaaggggccacacagggaaggcagatcccctagttggccaagacttattttaacttgatacactgcagattcagagtgtcctgaagctctgcctctggctttccggtcatgggttccagttaattcatgcctcccatggacctatggagagcaacaagttgatcttagttaagtctccctatatgagggataagttcctgatttttgtttttatttttgtgttacaaaagaaagccctccctccctgaacttgcagtaaggtcagcttcaggacctgttccagtgggcactgtacttggatcttcccggcgtgtgtgtgccttacacaggggtgaactgttcactgtggtgatgcatgatgagggtaaatggtagttgaaaggagcaggggccctggtgttgcatttagccctggggcatggagctgaacagtacttgtgcaggattgttgtggctactagagaacaagagggaaagtagggcagaaactggatacagttctgagcacagccagacttgctcaggtggccctgcacaggctgcagctacctaggaacattccttgcagaccccgcattgccctttgggggtgccctgggatccctggggtagtccagctcttattcatttcccagcgtggccctggttggaagaagcagctgtcacagctgtgtagacagctgtgttcctacaattggcccagcaccctggggcacgggagaagggtggggaccgttgctgtcactactcaggctgactggggcctggtcagattacgtatgcccttggtggtttagagataatccaaaatcagggtttggtttggggaagaaaatcctcccccttcctcccccgccccgttccctaccgcctccactcctgccagctcatttccttcaatttcctttgacctataggctaaaaaagaaaggctcattccagccacagggcagccttccctgggcctttgcttctctagcacaattatgggttacttcctttttcttaacaaaaaagaatgtttgatttcctctgggtgaccttattgtctgtaattgaaaccctattgagaggtgatgtctgtgttagccaatgacccaggtgagctgctcgggcttctcttggtatgtcttgtttggaaaagtggatttcattcatttctgattgtccagttaagtgatcaccaaaggactgagaatctgggagggcaaaaaaaaaaaaaaaagtttttatgtgcacttaaatttggggacaattttatgtatctgtgttaaggatatgcttaagaacataattcttttgttgctgtttgtttaagaagcaccttagtttgtttaagaagcaccttatatagtataatatatatttttttgaaattacattgcttgtttatcagacaattgaatgtagtaattctgttctggatttaatttgactgggttaacatgcaaaaaccaaggaaaaatatttagtttttttttttttttttgtatacttttcaagctaccttgtcatgtatacagtcatttatgcctaaagcctggtgattattcatttaaatgaagatcacatttcatatcaacttttgtatccacagtagacaaaatagcactaatccagatgcctattgttggatattgaatgacagacaatcttatgtagcaaagattatgcctgaaaaggaaaattattcagggcagctaattttgcttttaccaaaatatcagtagtaatatttttggacagtagctaatgggtcagtgggttctttttaatgtttatacttagattttcttttaaaaaaattaaaataaaacaaaaaaaatttctaggactagacgatgtaataccagctaaagccaaacaattatacagtggaaggttttacattattcatccaatgtgtttctattcatgttaagatactactacatttgaagtgggcagagaacatcagatgattgaaatgttcgcccaggggtctccagcaactttggaaatctctttgtatttttacttgaagtgccactaatggacagcagatattttctggctgatgttggtattgggtgtaggaacatgatttaaaaaaaaaactcttgcctctgctttcccccactctgaggcaagttaaaatgtaaaagatgtgatttatctggggggctcaggtatggtggggaagtggattcaggaatctggggaatggcaaatatattaagaagagtattgaaagtatttggaggaaaatggttaattctgggtgtgcaccagggttcagtagagtccacttctgccctggagaccacaaatcaactagctccatttacagccatttctaaaatggcagcttcagttctagagaagaaagaacaacatcagcagtaaagtccatggaatagctagtggtctgtgtttcttttcgccattgcctagcttgccgtaatgattctataatgccatcatgcagcaattatgagaggctaggtcatccaaagagaagaccctatcaatgtaggttgcaaaatctaacccctaaggaagtgcagtctttgatttgatttccctagtaaccttgcagatatgtttaaccaagccatagcccatgccttttgagggctgaacaaataagggacttactgataatttacttttgatcacattaaggtgttctcaccttgaaatcttatacactgaaatggccattgatttaggccactggcttagagtactccttcccctgcatgacactgattacaaatactttcctattcatactttccaattatgagatggactgtgggtactgggagtgatcactaacaccatagtaatgtctaatattcacaggcagatctgcttggggaagctagttatgtgaaaggcaaatagagtcatacagtagctcaaaaggcaaccataattctctttggtgcaggtcttgggagcgtgatctagattacactgcaccattcccaagttaatcccctgaaaacttactctcaactggagcaaatgaactttggtcccaaatatccatcttttcagtagcgttaattatgctctgtttccaactgcatttcctttccaattgaattaaagtgtggcctcgtttttagtcatttaaaattgttttctaagtaattgctgcctctattatggcacttcaattttgcactgtcttttgagattcaagaaaaatttctattcttttttttgcatccaattgtgcctgaacttttaaaatatgtaaatgctgccatgttccaaacccatcgtcagtgtgtgtgtttagagctgtgcaccctagaaacaacatattgtcccatgagcaggtgcctgagacacagacccctttgcattcacagagaggtcattggttatagagacttgaattaataagtgacattatgccagtttctgttctctcacaggtgataaacaatgctttttgtgcactacatactcttcagtgtagagctcttgttttatgggaaaaggctcaaatgccaaattgtgtttgatggattaatatgcccttttgccgatgcatactattactgatgtgactcggttttgtcgcagctttgctttgtttaatgaaacacacttgtaaacctcttttgcactttgaaaaagaatccagcgggatgctcgagcacctgtaaacaattttctcaacctatttgatgttcaaataaagaattaaactaaagacaacgagtttgttttttgtaagctccacttcttgctagcagttcaccactgatcctctaaaatcaaagtggttaaacgatctgtcacacacagtgagtctgaatgctaaagcctctcctcacctcactccctctgcccaacacccccaggtgtatcaggaagtgtgtggacactgtggtcaggcagaactggcctcaattcttggcttcaccacttacaaattttatgatcattggcagttgatttttcagagtttcggcttccttatcaacaatatgatgataagtaataacacctaattcacacgatggtggtgaggactaactgaggtgctcattaaacatagttgctgttttttaatgcctggcccaaatccttccctgtgagggagaagaaggatgcttgagagtggttattta

SEQ ID NO: 59965 - DNA, 7370 bp, Homo sapiens
  misc_feature (252)..(252): n is a, c, g, or t
  misc_feature (1405)..(1406): n is a, c, g, or t
ccagtgccaagcttggtaccactagagcatgggtggccattgttgacctacaggaggcaccactgtcaccaacaaagggtaacagtctttcttttcaatatttatttatatccagtatttattttcaatactgactatggagagagctctcctgtgctcaaacactgcaatactgggggtctttcaaagcacaaaaacatatatttgcatgatggcatcattaacatttttatggctttctatttctttttngtactggtctcaagagccactcataaatctctcagtaactgcatagtgtcccagggccagagaccggccactcctggcattgtgattagagtcatttaatatccaaggtggtgactaatgtctggcaacaaagcctccattgggtgtcatgtgtcctgggaccctgagcgtgggcactctaggagcacctcagtattgcgtgttagtactatggccgagagaatagttgagaaagtggtcaagaggtggatccatgtgaacgccactgggaaatgagagacctcgttcccaatcacggtcagtgcaactcgaaagcctaaaatcagtttaaaacaaaggtatctacctttatcttatgttcatatcctaggcttttaataatacgtatttttcacatgtttacagaaagcagtcaactgagctattcatggaaaggtttgtgggtttggttaacgaagtgaggagtattacatttcagctggaaacacatccctagaatgccaaaacatttattccaaagtctggtttcctggtgcaatcggaggcatggcaatgcctctgttcagagactgggggctagggccagtaaggcatttgatccacatgtatcccagaaggcttttattgttaaattatattctttcggaaaaaccacccatgtcctattttgtaaacttgatatccatacacttttgactggcattctattttagccgtaagactatgattcacagcaagcctgtttttcctcttgcttggggtggcagcagaaagcatagggtactttccagcctccaagggtaggggcaaaggggctggggtttctcctccccagtacagctttctctggctgtgcacactgctccctgtgagcagacagcaagtctcccctcactccccactgccattcatccagcgctgtgcagtagcccagctgcgtgtctgccgggaggggctgccaagtgccctgcctactggctgcttcccgaatccctgccattccacgcacaaacacatccacacactctctctgcctagttcacacactgagccactcgcacatgcgagcacattccttccttccttctcactctctcggcccttgacttctacaagcccatggaacatttctggaaagacgttcttgatccannagggtggcccgccggtttctgagccttctgccctgcggggacacggtctgcaccctgcccgcggccacggaccatgaccatgaccctccacaccaaagcatctgggatggccctactgcatcagatccaagggaacgagctggagcccctgaaccgtccgcagctcaagatccccctggagcggcccctgggcgaggtgtacctggacagcagcaagcccgccgtgtacaactaccccgagggcgccgcctacgagttcaacgccgcggccgccgccaacgcgcaggtctacggtcagaccggcctcccctacggccccgggtctgaggctgcggcgttcggctccaacggcctggggggtttccccccactcaacagcgtgtctccgagcccgctgatgctactgcacccgccgccgcagctgtcgcctttcctgcagccccacggccagcaggtgccctactacctggagaacgagcccagcggctacacggtgcgcgaggccggcccgccggcattctacaggccaaattcagataatcgacgccagggtggcagagaaagattggccagtaccaatgacaagggaagtatggctatggaatctgccaaggagactcgctactgtgcagtgtgcaatgactatgcttcaggctaccattatggagtctggtcctgtgagggctgcaaggccttcttcaagagaagtattcaaggacataacgactatatgtgtccagccaccaaccagtgcaccattgataaaaacaggaggaagagctgccaggcctgccggctccgcaaatgctacgaagtgggaatgatgaaaggtgggatacgaaaagaccgaagaggagggagaatgttgaaacacaagcgccagagagatgatggggagggcaggggtgaactgatggccaaggcaggcctgaccctgcagcagcagcaccagcggctggcccagctcctcctcatcctctcccacatcaggcacatgagtaacaaaggcatggagcatctgtacagcatgaagtgcaagaacgtggtgcccctctatgacctgctgctggagatgctggacgcccaccgcctacatgcgcccactagccgtggaggggcatccgtggaggagacggaccaaagccacttggccactgcgggctctacttcatcgcattccttgcaaaagtattacatcacgggggaggcagagggtttccctgccacagtctgagagctccctggctcccacacggttcagataatccctgctgcattttaccctcatcatgcaccactttagccaaattctgtctcctgcatacactccggcatgcatccaacaccaatggctttctagatgagtggccattcatttgcttgctcagttcttagtggcacatcttctgtcttctgttgggaacagccaaagggattccaaggctaaatctttgtaacagctctctttcccccttgctatgttactaagcgtgaggattcccgtagctcttcacagctgaactcagtctatgggttggggctcagataactctgtgcatttaagctacttgtagagacccaggcctggagagtagacattttgcctctgataagcactttttaaatggctctaagaataagccacagcaaagaatttaaagtggctcctttaattggtgacttggagaaagctaggtcaagggtttattatagcaccctcttgtattcctatggcaatgcatccttttatgaaagtggtacaccttaaagcttttatatgactgtagcagagtatctggtgattgtcaattcacttccccctataggaatacaaggggccacacagggaaggcagatcccctagttggccaagacttattttaacttgatacactgcagattcagagtgtcctgaagctctgcctctggctttccggtcatgggttccagttaattcatgcctcccatggacctatggagagcaacaagttgatcttagttaagtctccctatatgagggataagttcctgatttttgtttttatttttgtgttacaaaagaaagccctccctccctgaacttgcagtaaggtcagcttcaggacctgttccagtgggcactgtacttggatcttcccggcgtgtgtgtgccttacacaggggtgaactgttcactgtggtgatgcatgatgagggtaaatggtagttgaaaggagcaggggccctggtgttgcatttagccctggggcatggagctgaacagtacttgtgcaggattgttgtggctactagagaacaagagggaaagtagggcagaaactggatacagttctgagcacagccagacttgctcaggtggccctgcacaggctgcagctacctaggaacattccttgcagaccccgcattgccctttgggggtgccctgggatccctggggtagtccagctcttattcatttcccagcgtggccctggttggaagaagcagctgtcacagctgtgtagacagctgtgttcctacaattggcccagcaccctggggcacgggagaagggtggggaccgttgctgtcactactcaggctgactggggcctggtcagattacgtatgcccttggtggtttagagataatccaaaatcagggtttggtttggggaagaaaatcctcccccttcctcccccgccccgttccctaccgcctccactcctgccagctcatttccttcaatttcctttgacctataggctaaaaaagaaaggctcattccagccacagggcagccttccctgggcctttgcttctctagcacaattatgggttacttcctttttcttaacaaaaaagaatgtttgatttcctctgggtgaccttattgtctgtaattgaaaccctattgagaggtgatgtctgtgttagccaatgacccaggtgagctgctcgggcttctcttggtatgtcttgtttggaaaagtggatttcattcatttctgattgtccagttaagtgatcaccaaaggactgagaatctgggagggcaaaaaaaaaaaaaaaagtttttatgtgcacttaaatttggggacaattttatgtatctgtgttaaggatatgcttaagaacataattcttttgttgctgtttgtttaagaagcaccttagtttgtttaagaagcaccttatatagtataatatatatttttttgaaattacattgcttgtttatcagacaattgaatgtagtaattctgttctggatttaatttgactgggttaacatgcaaaaaccaaggaaaaatatttagtttttttttttttttttgtatacttttcaagctaccttgtcatgtatacagtcatttatgcctaaagcctggtgattattcatttaaatgaagatcacatttcatatcaacttttgtatccacagtagacaaaatagcactaatccagatgcctattgttggatattgaatgacagacaatcttatgtagcaaagattatgcctgaaaaggaaaattattcagggcagctaattttgcttttaccaaaatatcagtagtaatatttttggacagtagctaatgggtcagtgggttctttttaatgtttatacttagattttcttttaaaaaaattaaaataaaacaaaaaaaatttctaggactagacgatgtaataccagctaaagccaaacaattatacagtggaaggttttacattattcatccaatgtgtttctattcatgttaagatactactacatttgaagtgggcagagaacatcagatgattgaaatgttcgcccaggggtctccagcaactttggaaatctctttgtatttttacttgaagtgccactaatggacagcagatattttctggctgatgttggtattgggtgtaggaacatgatttaaaaaaaaaactcttgcctctgctttcccccactctgaggcaagttaaaatgtaaaagatgtgatttatctggggggctcaggtatggtggggaagtggattcaggaatctggggaatggcaaatatattaagaagagtattgaaagtatttggaggaaaatggttaattctgggtgtgcaccagggttcagtagagtccacttctgccctggagaccacaaatcaactagctccatttacagccatttctaaaatggcagcttcagttctagagaagaaagaacaacatcagcagtaaagtccatggaatagctagtggtctgtgtttcttttcgccattgcctagcttgccgtaatgattctataatgccatcatgcagcaattatgagaggctaggtcatccaaagagaagaccctatcaatgtaggttgcaaaatctaacccctaaggaagtgcagtctttgatttgatttccctagtaaccttgcagatatgtttaaccaagccatagcccatgccttttgagggctgaacaaataagggacttactgataatttacttttgatcacattaaggtgttctcaccttgaaatcttatacactgaaatggccattgatttaggccactggcttagagtactccttcccctgcatgacactgattacaaatactttcctattcatactttccaattatgagatggactgtgggtactgggagtgatcactaacaccatagtaatgtctaatattcacaggcagatctgcttggggaagctagttatgtgaaaggcaaatagagtcatacagtagctcaaaaggcaaccataattctctttggtgcaggtcttgggagcgtgatctagattacactgcaccattcccaagttaatcccctgaaaacttactctcaactggagcaaatgaactttggtcccaaatatccatcttttcagtagcgttaattatgctctgtttccaactgcatttcctttccaattgaattaaagtgtggcctcgtttttagtcatttaaaattgttttctaagtaattgctgcctctattatggcacttcaattttgcactgtcttttgagattcaagaaaaatttctattcttttttttgcatccaattgtgcctgaacttttaaaatatgtaaatgctgccatgttccaaacccatcgtcagtgtgtgtgtttagagctgtgcaccctagaaacaacatattgtcccatgagcaggtgcctgagacacagacccctttgcattcacagagaggtcattggttatagagacttgaattaataagtgacattatgccagtttctgttctctcacaggtgataaacaatgctttttgtgcactacatactcttcagtgtagagctcttgttttatgggaaaaggctcaaatgccaaattgtgtttgatggattaatatgcccttttgccgatgcatactattactgatgtgactcggttttgtcgcagctttgctttgtttaatgaaacacacttgtaaacctcttttgcactttgaaaaagaatccagcgggatgctcgagcacctgtaaacaattttctcaacctatttgatgttcaaataaagaattaaactaaagacaacgagtttgttttttgtaagctccacttcttgctagcagttcaccactgatcctctaaaatcaaagtggttaaacgatctgtcacacacagtgagtctgaatgctaaagcctctcctcacctcactccctctgcccaacacccccaggtgtatcaggaagtgtgtggacactgtggtcaggcagaactggcctcaattcttggcttcaccacttacaaattttatgatcattggcagttgatttttcagagtttcggcttccttatcaacaatatgatgataagtaataacacctaattcacacgatggtggtgaggactaactgaggtgctcattaaacatagttgctgttttttaatgcctggcccaaatccttccctgtgagggagaagaaggatgcttgagagtggttattta

SEQ ID NO: 59966 - DNA, 7661 bp, Homo sapiens
  misc_feature (252)..(252): n is a, c, g, or t
  misc_feature (1405)..(1406): n is a, c, g, or t
  misc_feature (2342)..(2342): n is a, c, g, or t
ccagtgccaagcttggtaccactagagcatgggtggccattgttgacctacaggaggcaccactgtcaccaacaaagggtaacagtctttcttttcaatatttatttatatccagtatttattttcaatactgactatggagagagctctcctgtgctcaaacactgcaatactgggggtctttcaaagcacaaaaacatatatttgcatgatggcatcattaacatttttatggctttctatttctttttngtactggtctcaagagccactcataaatctctcagtaactgcatagtgtcccagggccagagaccggccactcctggcattgtgattagagtcatttaatatccaaggtggtgactaatgtctggcaacaaagcctccattgggtgtcatgtgtcctgggaccctgagcgtgggcactctaggagcacctcagtattgcgtgttagtactatggccgagagaatagttgagaaagtggtcaagaggtggatccatgtgaacgccactgggaaatgagagacctcgttcccaatcacggtcagtgcaactcgaaagcctaaaatcagtttaaaacaaaggtatctacctttatcttatgttcatatcctaggcttttaataatacgtatttttcacatgtttacagaaagcagtcaactgagctattcatggaaaggtttgtgggtttggttaacgaagtgaggagtattacatttcagctggaaacacatccctagaatgccaaaacatttattccaaagtctggtttcctggtgcaatcggaggcatggcaatgcctctgttcagagactgggggctagggccagtaaggcatttgatccacatgtatcccagaaggcttttattgttaaattatattctttcggaaaaaccacccatgtcctattttgtaaacttgatatccatacacttttgactggcattctattttagccgtaagactatgattcacagcaagcctgtttttcctcttgcttggggtggcagcagaaagcatagggtactttccagcctccaagggtaggggcaaaggggctggggtttctcctccccagtacagctttctctggctgtgcacactgctccctgtgagcagacagcaagtctcccctcactccccactgccattcatccagcgctgtgcagtagcccagctgcgtgtctgccgggaggggctgccaagtgccctgcctactggctgcttcccgaatccctgccattccacgcacaaacacatccacacactctctctgcctagttcacacactgagccactcgcacatgcgagcacattccttccttccttctcactctctcggcccttgacttctacaagcccatggaacatttctggaaagacgttcttgatccannagggtggcccgccggtttctgagccttctgccctgcggggacacggtctgcaccctgcccgcggccacggaccatgaccatgaccctccacaccaaagcatctgggatggccctactgcatcagatccaagggaacgagctggagcccctgaaccgtccgcagctcaagatccccctggagcggcccctgggcgaggtgtacctggacagcagcaagcccgccgtgtacaactaccccgagggcgccgcctacgagttcaacgccgcggccgccgccaacgcgcaggtctacggtcagaccggcctcccctacggccccgggtctgaggctgcggcgttcggctccaacggcctggggggtttccccccactcaacagcgtgtctccgagcccgctgatgctactgcacccgccgccgcagctgtcgcctttcctgcagccccacggccagcaggtgccctactacctggagaacgagcccagcggctacacggtgcgcgaggccggcccgccggcattctacaggccaaattcagataatcgacgccagggtggcagagaaagattggccagtaccaatgacaagggaagtatggctatggaatctgccaaggagactcgctactgtgcagtgtgcaatgactatgcttcaggctaccattatggagtctggtcctgtgagggctgcaaggccttcttcaagagaagtattcaaggacataacgactatatgtgtccagccaccaaccagtgcaccattgataaaaacaggaggaagagctgccaggcctgccggctccgcaaatgctacgaagtgggaatgatgaaaggtggctttgtggatttgaccctccatgatcaggtccaccttctagaatgtgcctggctagagatcctgatgattggtctcgtctggcgctccatggagcacccagngaagctactgtttgctcctaacttgctcttggacaggaaccagggaaaatgtgtagagggcatggtggagatcttcgacatgctgctggctacatcatctcggttccgcatgatgaatctgcagggagaggagtttgtgtgcctcaaatctattattttgcttaattctggagtgtacacatttctgtccagcaccctgaagtctctggaagagaaggaccatatccaccgagtcctggacaagatcacagacactttgatccacctgatggccaaggcaggcctgaccctgcagcagcagcaccagcggctggcccagctcctcctcatcctctcccacatcaggcacatgagtaacaaaggcatggagcatctgtacagcatgaagtgcaagaacgtggtgcccctctatgacctgctgctggagatgctggacgcccaccgcctacatgcgcccactagccgtggaggggcatccgtggaggagacggaccaaagccacttggccactgcgggctctacttcatcgcattccttgcaaaagtattacatcacgggggaggcagagggtttccctgccacagtctgagagctccctggctcccacacggttcagataatccctgctgcattttaccctcatcatgcaccactttagccaaattctgtctcctgcatacactccggcatgcatccaacaccaatggctttctagatgagtggccattcatttgcttgctcagttcttagtggcacatcttctgtcttctgttgggaacagccaaagggattccaaggctaaatctttgtaacagctctctttcccccttgctatgttactaagcgtgaggattcccgtagctcttcacagctgaactcagtctatgggttggggctcagataactctgtgcatttaagctacttgtagagacccaggcctggagagtagacattttgcctctgataagcactttttaaatggctctaagaataagccacagcaaagaatttaaagtggctcctttaattggtgacttggagaaagctaggtcaagggtttattatagcaccctcttgtattcctatggcaatgcatccttttatgaaagtggtacaccttaaagcttttatatgactgtagcagagtatctggtgattgtcaattcacttccccctataggaatacaaggggccacacagggaaggcagatcccctagttggccaagacttattttaacttgatacactgcagattcagagtgtcctgaagctctgcctctggctttccggtcatgggttccagttaattcatgcctcccatggacctatggagagcaacaagttgatcttagttaagtctccctatatgagggataagttcctgatttttgtttttatttttgtgttacaaaagaaagccctccctccctgaacttgcagtaaggtcagcttcaggacctgttccagtgggcactgtacttggatcttcccggcgtgtgtgtgccttacacaggggtgaactgttcactgtggtgatgcatgatgagggtaaatggtagttgaaaggagcaggggccctggtgttgcatttagccctggggcatggagctgaacagtacttgtgcaggattgttgtggctactagagaacaagagggaaagtagggcagaaactggatacagttctgagcacagccagacttgctcaggtggccctgcacaggctgcagctacctaggaacattccttgcagaccccgcattgccctttgggggtgccctgggatccctggggtagtccagctcttattcatttcccagcgtggccctggttggaagaagcagctgtcacagctgtgtagacagctgtgttcctacaattggcccagcaccctggggcacgggagaagggtggggaccgttgctgtcactactcaggctgactggggcctggtcagattacgtatgcccttggtggtttagagataatccaaaatcagggtttggtttggggaagaaaatcctcccccttcctcccccgccccgttccctaccgcctccactcctgccagctcatttccttcaatttcctttgacctataggctaaaaaagaaaggctcattccagccacagggcagccttccctgggcctttgcttctctagcacaattatgggttacttcctttttcttaacaaaaaagaatgtttgatttcctctgggtgaccttattgtctgtaattgaaaccctattgagaggtgatgtctgtgttagccaatgacccaggtgagctgctcgggcttctcttggtatgtcttgtttggaaaagtggatttcattcatttctgattgtccagttaagtgatcaccaaaggactgagaatctgggagggcaaaaaaaaaaaaaaaagtttttatgtgcacttaaatttggggacaattttatgtatctgtgttaaggatatgcttaagaacataattcttttgttgctgtttgtttaagaagcaccttagtttgtttaagaagcaccttatatagtataatatatatttttttgaaattacattgcttgtttatcagacaattgaatgtagtaattctgttctggatttaatttgactgggttaacatgcaaaaaccaaggaaaaatatttagtttttttttttttttttgtatacttttcaagctaccttgtcatgtatacagtcatttatgcctaaagcctggtgattattcatttaaatgaagatcacatttcatatcaacttttgtatccacagtagacaaaatagcactaatccagatgcctattgttggatattgaatgacagacaatcttatgtagcaaagattatgcctgaaaaggaaaattattcagggcagctaattttgcttttaccaaaatatcagtagtaatatttttggacagtagctaatgggtcagtgggttctttttaatgtttatacttagattttcttttaaaaaaattaaaataaaacaaaaaaaatttctaggactagacgatgtaataccagctaaagccaaacaattatacagtggaaggttttacattattcatccaatgtgtttctattcatgttaagatactactacatttgaagtgggcagagaacatcagatgattgaaatgttcgcccaggggtctccagcaactttggaaatctctttgtatttttacttgaagtgccactaatggacagcagatattttctggctgatgttggtattgggtgtaggaacatgatttaaaaaaaaaactcttgcctctgctttcccccactctgaggcaagttaaaatgtaaaagatgtgatttatctggggggctcaggtatggtggggaagtggattcaggaatctggggaatggcaaatatattaagaagagtattgaaagtatttggaggaaaatggttaattctgggtgtgcaccagggttcagtagagtccacttctgccctggagaccacaaatcaactagctccatttacagccatttctaaaatggcagcttcagttctagagaagaaagaacaacatcagcagtaaagtccatggaatagctagtggtctgtgtttcttttcgccattgcctagcttgccgtaatgattctataatgccatcatgcagcaattatgagaggctaggtcatccaaagagaagaccctatcaatgtaggttgcaaaatctaacccctaaggaagtgcagtctttgatttgatttccctagtaaccttgcagatatgtttaaccaagccatagcccatgccttttgagggctgaacaaataagggacttactgataatttacttttgatcacattaaggtgttctcaccttgaaatcttatacactgaaatggccattgatttaggccactggcttagagtactccttcccctgcatgacactgattacaaatactttcctattcatactttccaattatgagatggactgtgggtactgggagtgatcactaacaccatagtaatgtctaatattcacaggcagatctgcttggggaagctagttatgtgaaaggcaaatagagtcatacagtagctcaaaaggcaaccataattctctttggtgcaggtcttgggagcgtgatctagattacactgcaccattcccaagttaatcccctgaaaacttactctcaactggagcaaatgaactttggtcccaaatatccatcttttcagtagcgttaattatgctctgtttccaactgcatttcctttccaattgaattaaagtgtggcctcgtttttagtcatttaaaattgttttctaagtaattgctgcctctattatggcacttcaattttgcactgtcttttgagattcaagaaaaatttctattcttttttttgcatccaattgtgcctgaacttttaaaatatgtaaatgctgccatgttccaaacccatcgtcagtgtgtgtgtttagagctgtgcaccctagaaacaacatattgtcccatgagcaggtgcctgagacacagacccctttgcattcacagagaggtcattggttatagagacttgaattaataagtgacattatgccagtttctgttctctcacaggtgataaacaatgctttttgtgcactacatactcttcagtgtagagctcttgttttatgggaaaaggctcaaatgccaaattgtgtttgatggattaatatgcccttttgccgatgcatactattactgatgtgactcggttttgtcgcagctttgctttgtttaatgaaacacacttgtaaacctcttttgcactttgaaaaagaatccagcgggatgctcgagcacctgtaaacaattttctcaacctatttgatgttcaaataaagaattaaactaaagacaacgagtttgttttttgtaagctccacttcttgctagcagttcaccactgatcctctaaaatcaaagtggttaaacgatctgtcacacacagtgagtctgaatgctaaagcctctcctcacctcactccctctgcccaacacccccaggtgtatcaggaagtgtgtggacactgtggtcaggcagaactggcctcaattcttggcttcaccacttacaaattttatgatcattggcagttgatttttcagagtttcggcttccttatcaacaatatgatgataagtaataacacctaattcacacgatggtggtgaggactaactgaggtgctcattaaacatagttgctgttttttaatgcctggcccaaatccttccctgtgagggagaagaaggatgcttgagagtggttattta

SEQ ID NO: 59967 - DNA, 2201 bp, Homo sapiens
  misc_feature (252)..(252): n is a, c, g, or t
  misc_feature (1405)..(1406): n is a, c, g, or t
ccagtgccaagcttggtaccactagagcatgggtggccattgttgacctacaggaggcaccactgtcaccaacaaagggtaacagtctttcttttcaatatttatttatatccagtatttattttcaatactgactatggagagagctctcctgtgctcaaacactgcaatactgggggtctttcaaagcacaaaaacatatatttgcatgatggcatcattaacatttttatggctttctatttctttttngtactggtctcaagagccactcataaatctctcagtaactgcatagtgtcccagggccagagaccggccactcctggcattgtgattagagtcatttaatatccaaggtggtgactaatgtctggcaacaaagcctccattgggtgtcatgtgtcctgggaccctgagcgtgggcactctaggagcacctcagtattgcgtgttagtactatggccgagagaatagttgagaaagtggtcaagaggtggatccatgtgaacgccactgggaaatgagagacctcgttcccaatcacggtcagtgcaactcgaaagcctaaaatcagtttaaaacaaaggtatctacctttatcttatgttcatatcctaggcttttaataatacgtatttttcacatgtttacagaaagcagtcaactgagctattcatggaaaggtttgtgggtttggttaacgaagtgaggagtattacatttcagctggaaacacatccctagaatgccaaaacatttattccaaagtctggtttcctggtgcaatcggaggcatggcaatgcctctgttcagagactgggggctagggccagtaaggcatttgatccacatgtatcccagaaggcttttattgttaaattatattctttcggaaaaaccacccatgtcctattttgtaaacttgatatccatacacttttgactggcattctattttagccgtaagactatgattcacagcaagcctgtttttcctcttgcttggggtggcagcagaaagcatagggtactttccagcctccaagggtaggggcaaaggggctggggtttctcctccccagtacagctttctctggctgtgcacactgctccctgtgagcagacagcaagtctcccctcactccccactgccattcatccagcgctgtgcagtagcccagctgcgtgtctgccgggaggggctgccaagtgccctgcctactggctgcttcccgaatccctgccattccacgcacaaacacatccacacactctctctgcctagttcacacactgagccactcgcacatgcgagcacattccttccttccttctcactctctcggcccttgacttctacaagcccatggaacatttctggaaagacgttcttgatccannagggtggcccgccggtttctgagccttctgccctgcggggacacggtctgcaccctgcccgcggccacggaccatgaccatgaccctccacaccaaagcatctgggatggccctactgcatcagatccaagggaacgagctggagcccctgaaccgtccgcagctcaagatccccctggagcggcccctgggcgaggtgtacctggacagcagcaagcccgccgtgtacaactaccccgagggcgccgcctacgagttcaacgccgcggccgccgccaacgcgcaggtctacggtcagaccggcctcccctacggccccgggtctgaggctgcggcgttcggctccaacggcctggggggtttccccccactcaacagcgtgtctccgagcccgctgatgctactgcacccgccgccgcagctgtcgcctttcctgcagccccacggccagcaggtgccctactacctggagaacgagcccagcggctacacggtgcgcgaggccggcccgccggcattctacagaatggtgctgtcatgtggactgtcctcccgagtgtcccactggatgttcagagaatttatgtgaaggtcacgtcatttagcattgagatgctgtggttaccttcttccatttcttccataatatgcagccacatctatgtgtgaagaaatgtaatagataaaatttctctggacgcataataatgtgagaaagattgtcacatgtcccagcaaattgttattaatataaatttgttacttggcaagctgagattttgcaagatgttactc

SEQ ID NO: 59968 - DNA, 6878 bp, Homo sapiens
  misc_feature (1559)..(1559): n is a, c, g, or t
gagttgtgcctggagtgatgtttaagccaatgtcagggcaaggcaacagtccctggccgtcctccagcacctttgtaatgcatatgagctcgggagaccagtacttaaagttggaggcccgggagcccaggagctggcggagggcgttcgtcctgggagctgcacttgctccgtcgggtcgccggcttcaccggaccgcaggctcccggggcagggccggggccagagctcgcgtgtcggcgggacatgcgctgcgtcgcctctaacctcgggctgtgctctttttccaggtggcccgccggtttctgagccttctgccctgcggggacacggtctgcaccctgcccgcggccacggaccatgaccatgaccctccacaccaaagcatctgggatggccctactgcatcagatccaagggaacgagctggagcccctgaaccgtccgcagctcaagatccccctggagcggcccctgggcgaggtgtacctggacagcagcaagcccgccgtgtacaactaccccgagggcgccgcctacgagttcaacgccgcggccgccgccaacgcgcaggtctacggtcagaccggcctcccctacggccccgggtctgaggctgcggcgttcggctccaacggcctggggggtttccccccactcaacagcgtgtctccgagcccgctgatgctactgcacccgccgccgcagctgtcgcctttcctgcagccccacggccagcaggtgccctactacctggagaacgagcccagcggctacacggtgcgcgaggccggcccgccggcattctacaggccaaattcagataatcgacgccagggtggcagagaaagattggccagtaccaatgacaagggaagtatggctatggaatctgccaaggagactcgctactgtgcagtgtgcaatgactatgcttcaggctaccattatggagtctggtcctgtgagggctgcaaggccttcttcaagagaagtattcaaggacataacgactatatgtgtccagccaccaaccagtgcaccattgataaaaacaggaggaagagctgccaggcctgccggctccgcaaatgctacgaagtgggaatgatgaaaggtgggatacgaaaagaccgaagaggagggagaatgttgaaacacaagcgccagagagatgatggggagggcaggggtgaagtggggtctgctggagacatgagagctgccaacctttggccaagcccgctcatgatcaaacgctctaagaagaacagcctggccttgtccctgacggccgaccagatggtcagtgccttgttggatgctgagccccccatactctattccgagtatgatcctaccagacccttcagtgaagcttcgatgatgggcttactgaccaacctggcagacagggagctggttcacatgatcaactgggcgaagagggtgccaggctttgtggatttgaccctccatgatcaggtccaccttctagaatgtgcctggctagagatcctgatgattggtctcgtctggcgctccatggagcacccagngaagctactgtttgctcctaacttgctcttggacaggaaccagggaaaatgtgtagagggcatggtggagatcttcgacatgctgctggctacatcatctcggttccgcatgatgaatctgcagggagaggagtttgtgtgcctcaaatctattattttgcttaattctggagtgtacacatttctgtccagcaccctgaagtctctggaagagaaggaccatatccaccgagtcctggacaagatcacagacactttgatccacctgatggccaaggcaggcctgaccctgcagcagcagcaccagcggctggcccagctcctcctcatcctctcccacatcaggcacatgagtaacaaaggcatggagcatctgtacagcatgaagtgcaagaacgtggtgcccctctatgacctgctgctggagatgctggacgcccaccgcctacatgcgcccactagccgtggaggggcatccgtggaggagacggaccaaagccacttggccactgcgggctctacttcatcgcattccttgcaaaagtattacatcacgggggaggcagagggtttccctgccacagtctgagagctccctggctcccacacggttcagataatccctgctgcattttaccctcatcatgcaccactttagccaaattctgtctcctgcatacactccggcatgcatccaacaccaatggctttctagatgagtggccattcatttgcttgctcagttcttagtggcacatcttctgtcttctgttgggaacagccaaagggattccaaggctaaatctttgtaacagctctctttcccccttgctatgttactaagcgtgaggattcccgtagctcttcacagctgaactcagtctatgggttggggctcagataactctgtgcatttaagctacttgtagagacccaggcctggagagtagacattttgcctctgataagcactttttaaatggctctaagaataagccacagcaaagaatttaaagtggctcctttaattggtgacttggagaaagctaggtcaagggtttattatagcaccctcttgtattcctatggcaatgcatccttttatgaaagtggtacaccttaaagcttttatatgactgtagcagagtatctggtgattgtcaattcacttccccctataggaatacaaggggccacacagggaaggcagatcccctagttggccaagacttattttaacttgatacactgcagattcagagtgtcctgaagctctgcctctggctttccggtcatgggttccagttaattcatgcctcccatggacctatggagagcaacaagttgatcttagttaagtctccctatatgagggataagttcctgatttttgtttttatttttgtgttacaaaagaaagccctccctccctgaacttgcagtaaggtcagcttcaggacctgttccagtgggcactgtacttggatcttcccggcgtgtgtgtgccttacacaggggtgaactgttcactgtggtgatgcatgatgagggtaaatggtagttgaaaggagcaggggccctggtgttgcatttagccctggggcatggagctgaacagtacttgtgcaggattgttgtggctactagagaacaagagggaaagtagggcagaaactggatacagttctgagcacagccagacttgctcaggtggccctgcacaggctgcagctacctaggaacattccttgcagaccccgcattgccctttgggggtgccctgggatccctggggtagtccagctcttattcatttcccagcgtggccctggttggaagaagcagctgtcacagctgtgtagacagctgtgttcctacaattggcccagcaccctggggcacgggagaagggtggggaccgttgctgtcactactcaggctgactggggcctggtcagattacgtatgcccttggtggtttagagataatccaaaatcagggtttggtttggggaagaaaatcctcccccttcctcccccgccccgttccctaccgcctccactcctgccagctcatttccttcaatttcctttgacctataggctaaaaaagaaaggctcattccagccacagggcagccttccctgggcctttgcttctctagcacaattatgggttacttcctttttcttaacaaaaaagaatgtttgatttcctctgggtgaccttattgtctgtaattgaaaccctattgagaggtgatgtctgtgttagccaatgacccaggtgagctgctcgggcttctcttggtatgtcttgtttggaaaagtggatttcattcatttctgattgtccagttaagtgatcaccaaaggactgagaatctgggagggcaaaaaaaaaaaaaaaagtttttatgtgcacttaaatttggggacaattttatgtatctgtgttaaggatatgcttaagaacataattcttttgttgctgtttgtttaagaagcaccttagtttgtttaagaagcaccttatatagtataatatatatttttttgaaattacattgcttgtttatcagacaattgaatgtagtaattctgttctggatttaatttgactgggttaacatgcaaaaaccaaggaaaaatatttagtttttttttttttttttgtatacttttcaagctaccttgtcatgtatacagtcatttatgcctaaagcctggtgattattcatttaaatgaagatcacatttcatatcaacttttgtatccacagtagacaaaatagcactaatccagatgcctattgttggatattgaatgacagacaatcttatgtagcaaagattatgcctgaaaaggaaaattattcagggcagctaattttgcttttaccaaaatatcagtagtaatatttttggacagtagctaatgggtcagtgggttctttttaatgtttatacttagattttcttttaaaaaaattaaaataaaacaaaaaaaatttctaggactagacgatgtaataccagctaaagccaaacaattatacagtggaaggttttacattattcatccaatgtgtttctattcatgttaagatactactacatttgaagtgggcagagaacatcagatgattgaaatgttcgcccaggggtctccagcaactttggaaatctctttgtatttttacttgaagtgccactaatggacagcagatattttctggctgatgttggtattgggtgtaggaacatgatttaaaaaaaaaactcttgcctctgctttcccccactctgaggcaagttaaaatgtaaaagatgtgatttatctggggggctcaggtatggtggggaagtggattcaggaatctggggaatggcaaatatattaagaagagtattgaaagtatttggaggaaaatggttaattctgggtgtgcaccagggttcagtagagtccacttctgccctggagaccacaaatcaactagctccatttacagccatttctaaaatggcagcttcagttctagagaagaaagaacaacatcagcagtaaagtccatggaatagctagtggtctgtgtttcttttcgccattgcctagcttgccgtaatgattctataatgccatcatgcagcaattatgagaggctaggtcatccaaagagaagaccctatcaatgtaggttgcaaaatctaacccctaaggaagtgcagtctttgatttgatttccctagtaaccttgcagatatgtttaaccaagccatagcccatgccttttgagggctgaacaaataagggacttactgataatttacttttgatcacattaaggtgttctcaccttgaaatcttatacactgaaatggccattgatttaggccactggcttagagtactccttcccctgcatgacactgattacaaatactttcctattcatactttccaattatgagatggactgtgggtactgggagtgatcactaacaccatagtaatgtctaatattcacaggcagatctgcttggggaagctagttatgtgaaaggcaaatagagtcatacagtagctcaaaaggcaaccataattctctttggtgcaggtcttgggagcgtgatctagattacactgcaccattcccaagttaatcccctgaaaacttactctcaactggagcaaatgaactttggtcccaaatatccatcttttcagtagcgttaattatgctctgtttccaactgcatttcctttccaattgaattaaagtgtggcctcgtttttagtcatttaaaattgttttctaagtaattgctgcctctattatggcacttcaattttgcactgtcttttgagattcaagaaaaatttctattcttttttttgcatccaattgtgcctgaacttttaaaatatgtaaatgctgccatgttccaaacccatcgtcagtgtgtgtgtttagagctgtgcaccctagaaacaacatattgtcccatgagcaggtgcctgagacacagacccctttgcattcacagagaggtcattggttatagagacttgaattaataagtgacattatgccagtttctgttctctcacaggtgataaacaatgctttttgtgcactacatactcttcagtgtagagctcttgttttatgggaaaaggctcaaatgccaaattgtgtttgatggattaatatgcccttttgccgatgcatactattactgatgtgactcggttttgtcgcagctttgctttgtttaatgaaacacacttgtaaacctcttttgcactttgaaaaagaatccagcgggatgctcgagcacctgtaaacaattttctcaacctatttgatgttcaaataaagaattaaactaaagacaacgagtttgttttttgtaagctccacttcttgctagcagttcaccactgatcctctaaaatcaaagtggttaaacgatctgtcacacacagtgagtctgaatgctaaagcctctcctcacctcactccctctgcccaacacccccaggtgtatcaggaagtgtgtggacactgtggtcaggcagaactggcctcaattcttggcttcaccacttacaaattttatgatcattggcagttgatttttcagagtttcggcttccttatcaacaatatgatgataagtaataacacctaattcacacgatggtggtgaggactaactgaggtgctcattaaacatagttgctgttttttaatgcctggcccaaatccttccctgtgagggagaagaaggatgcttgagagtggttattta

SEQ ID NO: 59969 - DNA, 5948 bp, Homo sapiens
  misc_feature (629)..(629): n is a, c, g, or t
agcctggcacgcacgtcctccgccgagtacaatgtcaacaacctggtgagccctgtgctgttccaggaggccctgtggcacgtgcctgagcacgcggtggtgctggagatcgcgccccacgccctgctgcaggctgtcctgaagcgtggcctgaagccgagctgcaccatcatccccctgatgaagaaggatcacagggacaacctggagttcttcctggccggcatccggaggctgcacctctcaggcatcgacgccaaccccaatgccttgttcccacctgtggagttcccagctccccgaggaactcccctcatctccccactcatcaagtgggaccacagcctggccttgtccctgacggccgaccagatggtcagtgccttgttggatgctgagccccccatactctattccgagtatgatcctaccagacccttcagtgaagcttcgatgatgggcttactgaccaacctggcagacagggagctggttcacatgatcaactgggcgaagagggtgccaggctttgtggatttgaccctccatgatcaggtccaccttctagaatgtgcctggctagagatcctgatgattggtctcgtctggcgctccatggagcacccagngaagctactgtttgctcctaacttgctcttggacaggaaccagggaaaatgtgtagagggcatggtggagatcttcgacatgctgctggctacatcatctcggttccgcatgatgaatctgcagggagaggagtttgtgtgcctcaaatctattattttgcttaattctggagtgtacacatttctgtccagcaccctgaagtctctggaagagaaggaccatatccaccgagtcctggacaagatcacagacactttgatccacctgatggccaaggcaggcctgaccctgcagcagcagcaccagcggctggcccagctcctcctcatcctctcccacatcaggcacatgagtaacaaaggcatggagcatctgtacagcatgaagtgcaagaacgtggtgcccctctatgacctgctgctggagatgctggacgcccaccgcctacatgcgcccactagccgtggaggggcatccgtggaggagacggaccaaagccacttggccactgcgggctctacttcatcgcattccttgcaaaagtattacatcacgggggaggcagagggtttccctgccacagtctgagagctccctggctcccacacggttcagataatccctgctgcattttaccctcatcatgcaccactttagccaaattctgtctcctgcatacactccggcatgcatccaacaccaatggctttctagatgagtggccattcatttgcttgctcagttcttagtggcacatcttctgtcttctgttgggaacagccaaagggattccaaggctaaatctttgtaacagctctctttcccccttgctatgttactaagcgtgaggattcccgtagctcttcacagctgaactcagtctatgggttggggctcagataactctgtgcatttaagctacttgtagagacccaggcctggagagtagacattttgcctctgataagcactttttaaatggctctaagaataagccacagcaaagaatttaaagtggctcctttaattggtgacttggagaaagctaggtcaagggtttattatagcaccctcttgtattcctatggcaatgcatccttttatgaaagtggtacaccttaaagcttttatatgactgtagcagagtatctggtgattgtcaattcacttccccctataggaatacaaggggccacacagggaaggcagatcccctagttggccaagacttattttaacttgatacactgcagattcagagtgtcctgaagctctgcctctggctttccggtcatgggttccagttaattcatgcctcccatggacctatggagagcaacaagttgatcttagttaagtctccctatatgagggataagttcctgatttttgtttttatttttgtgttacaaaagaaagccctccctccctgaacttgcagtaaggtcagcttcaggacctgttccagtgggcactgtacttggatcttcccggcgtgtgtgtgccttacacaggggtgaactgttcactgtggtgatgcatgatgagggtaaatggtagttgaaaggagcaggggccctggtgttgcatttagccctggggcatggagctgaacagtacttgtgcaggattgttgtggctactagagaacaagagggaaagtagggcagaaactggatacagttctgagcacagccagacttgctcaggtggccctgcacaggctgcagctacctaggaacattccttgcagaccccgcattgccctttgggggtgccctgggatccctggggtagtccagctcttattcatttcccagcgtggccctggttggaagaagcagctgtcacagctgtgtagacagctgtgttcctacaattggcccagcaccctggggcacgggagaagggtggggaccgttgctgtcactactcaggctgactggggcctggtcagattacgtatgcccttggtggtttagagataatccaaaatcagggtttggtttggggaagaaaatcctcccccttcctcccccgccccgttccctaccgcctccactcctgccagctcatttccttcaatttcctttgacctataggctaaaaaagaaaggctcattccagccacagggcagccttccctgggcctttgcttctctagcacaattatgggttacttcctttttcttaacaaaaaagaatgtttgatttcctctgggtgaccttattgtctgtaattgaaaccctattgagaggtgatgtctgtgttagccaatgacccaggtgagctgctcgggcttctcttggtatgtcttgtttggaaaagtggatttcattcatttctgattgtccagttaagtgatcaccaaaggactgagaatctgggagggcaaaaaaaaaaaaaaaagtttttatgtgcacttaaatttggggacaattttatgtatctgtgttaaggatatgcttaagaacataattcttttgttgctgtttgtttaagaagcaccttagtttgtttaagaagcaccttatatagtataatatatatttttttgaaattacattgcttgtttatcagacaattgaatgtagtaattctgttctggatttaatttgactgggttaacatgcaaaaaccaaggaaaaatatttagtttttttttttttttttgtatacttttcaagctaccttgtcatgtatacagtcatttatgcctaaagcctggtgattattcatttaaatgaagatcacatttcatatcaacttttgtatccacagtagacaaaatagcactaatccagatgcctattgttggatattgaatgacagacaatcttatgtagcaaagattatgcctgaaaaggaaaattattcagggcagctaattttgcttttaccaaaatatcagtagtaatatttttggacagtagctaatgggtcagtgggttctttttaatgtttatacttagattttcttttaaaaaaattaaaataaaacaaaaaaaatttctaggactagacgatgtaataccagctaaagccaaacaattatacagtggaaggttttacattattcatccaatgtgtttctattcatgttaagatactactacatttgaagtgggcagagaacatcagatgattgaaatgttcgcccaggggtctccagcaactttggaaatctctttgtatttttacttgaagtgccactaatggacagcagatattttctggctgatgttggtattgggtgtaggaacatgatttaaaaaaaaaactcttgcctctgctttcccccactctgaggcaagttaaaatgtaaaagatgtgatttatctggggggctcaggtatggtggggaagtggattcaggaatctggggaatggcaaatatattaagaagagtattgaaagtatttggaggaaaatggttaattctgggtgtgcaccagggttcagtagagtccacttctgccctggagaccacaaatcaactagctccatttacagccatttctaaaatggcagcttcagttctagagaagaaagaacaacatcagcagtaaagtccatggaatagctagtggtctgtgtttcttttcgccattgcctagcttgccgtaatgattctataatgccatcatgcagcaattatgagaggctaggtcatccaaagagaagaccctatcaatgtaggttgcaaaatctaacccctaaggaagtgcagtctttgatttgatttccctagtaaccttgcagatatgtttaaccaagccatagcccatgccttttgagggctgaacaaataagggacttactgataatttacttttgatcacattaaggtgttctcaccttgaaatcttatacactgaaatggccattgatttaggccactggcttagagtactccttcccctgcatgacactgattacaaatactttcctattcatactttccaattatgagatggactgtgggtactgggagtgatcactaacaccatagtaatgtctaatattcacaggcagatctgcttggggaagctagttatgtgaaaggcaaatagagtcatacagtagctcaaaaggcaaccataattctctttggtgcaggtcttgggagcgtgatctagattacactgcaccattcccaagttaatcccctgaaaacttactctcaactggagcaaatgaactttggtcccaaatatccatcttttcagtagcgttaattatgctctgtttccaactgcatttcctttccaattgaattaaagtgtggcctcgtttttagtcatttaaaattgttttctaagtaattgctgcctctattatggcacttcaattttgcactgtcttttgagattcaagaaaaatttctattcttttttttgcatccaattgtgcctgaacttttaaaatatgtaaatgctgccatgttccaaacccatcgtcagtgtgtgtgtttagagctgtgcaccctagaaacaacatattgtcccatgagcaggtgcctgagacacagacccctttgcattcacagagaggtcattggttatagagacttgaattaataagtgacattatgccagtttctgttctctcacaggtgataaacaatgctttttgtgcactacatactcttcagtgtagagctcttgttttatgggaaaaggctcaaatgccaaattgtgtttgatggattaatatgcccttttgccgatgcatactattactgatgtgactcggttttgtcgcagctttgctttgtttaatgaaacacacttgtaaacctcttttgcactttgaaaaagaatccagcgggatgctcgagcacctgtaaacaattttctcaacctatttgatgttcaaataaagaattaaactaaagacaacgagtttgttttttgtaagctccacttcttgctagcagttcaccactgatcctctaaaatcaaagtggttaaacgatctgtcacacacagtgagtctgaatgctaaagcctctcctcacctcactccctctgcccaacacccccaggtgtatcaggaagtgtgtggacactgtggtcaggcagaactggcctcaattcttggcttcaccacttacaaattttatgatcattggcagttgatttttcagagtttcggcttccttatcaacaatatgatgataagtaataacacctaattcacacgatggtggtgaggactaactgaggtgctcattaaacatagttgctgttttttaatgcctggcccaaatccttccctgtgagggagaagaaggatgcttgagagtggttattta

SEQ ID NO: 59970 - DNA, 6095 bp, Homo sapiens
gagttgtgcctggagtgatgtttaagccaatgtcagggcaaggcaacagtccctggccgtcctccagcacctttgtaatgcatatgagctcgggagaccagtacttaaagttggaggcccgggagcccaggagctggcggagggcgttcgtcctgggagctgcacttgctccgtcgggtcgccggcttcaccggaccgcaggctcccggggcagggccggggccagagctcgcgtgtcggcgggacatgcgctgcgtcgcctctaacctcgggctgtgctctttttccaggtggcccgccggtttctgagccttctgccctgcggggacacggtctgcaccctgcccgcggccacggaccatgaccatgaccctccacaccaaagcatctgggatggccctactgcatcagatccaagggaacgagctggagcccctgaaccgtccgcagctcaagatccccctggagcggcccctgggcgaggtgtacctggacagcagcaagcccgccgtgtacaactaccccgagggcgccgcctacgagttcaacgccgcggccgccgccaacgcgcaggtctacggtcagaccggcctcccctacggccccgggtctgaggctgcggcgttcggctccaacggcctggggggtttccccccactcaacagcgtgtctccgagcccgctgatgctactgcacccgccgccgcagctgtcgcctttcctgcagccccacggccagcaggtgccctactacctggagaacgagcccagcggctacacggtgcgcgaggccggcccgccggcattctacaggaaccagggaaaatgtgtagagggcatggtggagatcttcgacatgctgctggctacatcatctcggttccgcatgatgaatctgcagggagaggagtttgtgtgcctcaaatctattattttgcttaattctggagtgtacacatttctgtccagcaccctgaagtctctggaagagaaggaccatatccaccgagtcctggacaagatcacagacactttgatccacctgatggccaaggcaggcctgaccctgcagcagcagcaccagcggctggcccagctcctcctcatcctctcccacatcaggcacatgagtaacaaaggcatggagcatctgtacagcatgaagtgcaagaacgtggtgcccctctatgacctgctgctggagatgctggacgcccaccgcctacatgcgcccactagccgtggaggggcatccgtggaggagacggaccaaagccacttggccactgcgggctctacttcatcgcattccttgcaaaagtattacatcacgggggaggcagagggtttccctgccacagtctgagagctccctggctcccacacggttcagataatccctgctgcattttaccctcatcatgcaccactttagccaaattctgtctcctgcatacactccggcatgcatccaacaccaatggctttctagatgagtggccattcatttgcttgctcagttcttagtggcacatcttctgtcttctgttgggaacagccaaagggattccaaggctaaatctttgtaacagctctctttcccccttgctatgttactaagcgtgaggattcccgtagctcttcacagctgaactcagtctatgggttggggctcagataactctgtgcatttaagctacttgtagagacccaggcctggagagtagacattttgcctctgataagcactttttaaatggctctaagaataagccacagcaaagaatttaaagtggctcctttaattggtgacttggagaaagctaggtcaagggtttattatagcaccctcttgtattcctatggcaatgcatccttttatgaaagtggtacaccttaaagcttttatatgactgtagcagagtatctggtgattgtcaattcacttccccctataggaatacaaggggccacacagggaaggcagatcccctagttggccaagacttattttaacttgatacactgcagattcagagtgtcctgaagctctgcctctggctttccggtcatgggttccagttaattcatgcctcccatggacctatggagagcaacaagttgatcttagttaagtctccctatatgagggataagttcctgatttttgtttttatttttgtgttacaaaagaaagccctccctccctgaacttgcagtaaggtcagcttcaggacctgttccagtgggcactgtacttggatcttcccggcgtgtgtgtgccttacacaggggtgaactgttcactgtggtgatgcatgatgagggtaaatggtagttgaaaggagcaggggccctggtgttgcatttagccctggggcatggagctgaacagtacttgtgcaggattgttgtggctactagagaacaagagggaaagtagggcagaaactggatacagttctgagcacagccagacttgctcaggtggccctgcacaggctgcagctacctaggaacattccttgcagaccccgcattgccctttgggggtgccctgggatccctggggtagtccagctcttattcatttcccagcgtggccctggttggaagaagcagctgtcacagctgtgtagacagctgtgttcctacaattggcccagcaccctggggcacgggagaagggtggggaccgttgctgtcactactcaggctgactggggcctggtcagattacgtatgcccttggtggtttagagataatccaaaatcagggtttggtttggggaagaaaatcctcccccttcctcccccgccccgttccctaccgcctccactcctgccagctcatttccttcaatttcctttgacctataggctaaaaaagaaaggctcattccagccacagggcagccttccctgggcctttgcttctctagcacaattatgggttacttcctttttcttaacaaaaaagaatgtttgatttcctctgggtgaccttattgtctgtaattgaaaccctattgagaggtgatgtctgtgttagccaatgacccaggtgagctgctcgggcttctcttggtatgtcttgtttggaaaagtggatttcattcatttctgattgtccagttaagtgatcaccaaaggactgagaatctgggagggcaaaaaaaaaaaaaaaagtttttatgtgcacttaaatttggggacaattttatgtatctgtgttaaggatatgcttaagaacataattcttttgttgctgtttgtttaagaagcaccttagtttgtttaagaagcaccttatatagtataatatatatttttttgaaattacattgcttgtttatcagacaattgaatgtagtaattctgttctggatttaatttgactgggttaacatgcaaaaaccaaggaaaaatatttagtttttttttttttttttgtatacttttcaagctaccttgtcatgtatacagtcatttatgcctaaagcctggtgattattcatttaaatgaagatcacatttcatatcaacttttgtatccacagtagacaaaatagcactaatccagatgcctattgttggatattgaatgacagacaatcttatgtagcaaagattatgcctgaaaaggaaaattattcagggcagctaattttgcttttaccaaaatatcagtagtaatatttttggacagtagctaatgggtcagtgggttctttttaatgtttatacttagattttcttttaaaaaaattaaaataaaacaaaaaaaatttctaggactagacgatgtaataccagctaaagccaaacaattatacagtggaaggttttacattattcatccaatgtgtttctattcatgttaagatactactacatttgaagtgggcagagaacatcagatgattgaaatgttcgcccaggggtctccagcaactttggaaatctctttgtatttttacttgaagtgccactaatggacagcagatattttctggctgatgttggtattgggtgtaggaacatgatttaaaaaaaaaactcttgcctctgctttcccccactctgaggcaagttaaaatgtaaaagatgtgatttatctggggggctcaggtatggtggggaagtggattcaggaatctggggaatggcaaatatattaagaagagtattgaaagtatttggaggaaaatggttaattctgggtgtgcaccagggttcagtagagtccacttctgccctggagaccacaaatcaactagctccatttacagccatttctaaaatggcagcttcagttctagagaagaaagaacaacatcagcagtaaagtccatggaatagctagtggtctgtgtttcttttcgccattgcctagcttgccgtaatgattctataatgccatcatgcagcaattatgagaggctaggtcatccaaagagaagaccctatcaatgtaggttgcaaaatctaacccctaaggaagtgcagtctttgatttgatttccctagtaaccttgcagatatgtttaaccaagccatagcccatgccttttgagggctgaacaaataagggacttactgataatttacttttgatcacattaaggtgttctcaccttgaaatcttatacactgaaatggccattgatttaggccactggcttagagtactccttcccctgcatgacactgattacaaatactttcctattcatactttccaattatgagatggactgtgggtactgggagtgatcactaacaccatagtaatgtctaatattcacaggcagatctgcttggggaagctagttatgtgaaaggcaaatagagtcatacagtagctcaaaaggcaaccataattctctttggtgcaggtcttgggagcgtgatctagattacactgcaccattcccaagttaatcccctgaaaacttactctcaactggagcaaatgaactttggtcccaaatatccatcttttcagtagcgttaattatgctctgtttccaactgcatttcctttccaattgaattaaagtgtggcctcgtttttagtcatttaaaattgttttctaagtaattgctgcctctattatggcacttcaattttgcactgtcttttgagattcaagaaaaatttctattcttttttttgcatccaattgtgcctgaacttttaaaatatgtaaatgctgccatgttccaaacccatcgtcagtgtgtgtgtttagagctgtgcaccctagaaacaacatattgtcccatgagcaggtgcctgagacacagacccctttgcattcacagagaggtcattggttatagagacttgaattaataagtgacattatgccagtttctgttctctcacaggtgataaacaatgctttttgtgcactacatactcttcagtgtagagctcttgttttatgggaaaaggctcaaatgccaaattgtgtttgatggattaatatgcccttttgccgatgcatactattactgatgtgactcggttttgtcgcagctttgctttgtttaatgaaacacacttgtaaacctcttttgcactttgaaaaagaatccagcgggatgctcgagcacctgtaaacaattttctcaacctatttgatgttcaaataaagaattaaactaaagacaacgagtttgttttttgtaagctccacttcttgctagcagttcaccactgatcctctaaaatcaaagtggttaaacgatctgtcacacacagtgagtctgaatgctaaagcctctcctcacctcactccctctgcccaacacccccaggtgtatcaggaagtgtgtggacactgtggtcaggcagaactggcctcaattcttggcttcaccacttacaaattttatgatcattggcagttgatttttcagagtttcggcttccttatcaacaatatgatgataagtaataacacctaattcacacgatggtggtgaggactaactgaggtgctcattaaacatagttgctgttttttaatgcctggcccaaatccttccctgtgagggagaagaaggatgcttgagagtggttattta

SEQ ID NO: 59971 - DNA, 8312 bp, Homo sapiens
  misc_feature (252)..(252): n is a, c, g, or t
  misc_feature (1405)..(1406): n is a, c, g, or t
  misc_feature (2678)..(2678): n is a, c, g, or t
ccagtgccaagcttggtaccactagagcatgggtggccattgttgacctacaggaggcaccactgtcaccaacaaagggtaacagtctttcttttcaatatttatttatatccagtatttattttcaatactgactatggagagagctctcctgtgctcaaacactgcaatactgggggtctttcaaagcacaaaaacatatatttgcatgatggcatcattaacatttttatggctttctatttctttttngtactggtctcaagagccactcataaatctctcagtaactgcatagtgtcccagggccagagaccggccactcctggcattgtgattagagtcatttaatatccaaggtggtgactaatgtctggcaacaaagcctccattgggtgtcatgtgtcctgggaccctgagcgtgggcactctaggagcacctcagtattgcgtgttagtactatggccgagagaatagttgagaaagtggtcaagaggtggatccatgtgaacgccactgggaaatgagagacctcgttcccaatcacggtcagtgcaactcgaaagcctaaaatcagtttaaaacaaaggtatctacctttatcttatgttcatatcctaggcttttaataatacgtatttttcacatgtttacagaaagcagtcaactgagctattcatggaaaggtttgtgggtttggttaacgaagtgaggagtattacatttcagctggaaacacatccctagaatgccaaaacatttattccaaagtctggtttcctggtgcaatcggaggcatggcaatgcctctgttcagagactgggggctagggccagtaaggcatttgatccacatgtatcccagaaggcttttattgttaaattatattctttcggaaaaaccacccatgtcctattttgtaaacttgatatccatacacttttgactggcattctattttagccgtaagactatgattcacagcaagcctgtttttcctcttgcttggggtggcagcagaaagcatagggtactttccagcctccaagggtaggggcaaaggggctggggtttctcctccccagtacagctttctctggctgtgcacactgctccctgtgagcagacagcaagtctcccctcactccccactgccattcatccagcgctgtgcagtagcccagctgcgtgtctgccgggaggggctgccaagtgccctgcctactggctgcttcccgaatccctgccattccacgcacaaacacatccacacactctctctgcctagttcacacactgagccactcgcacatgcgagcacattccttccttccttctcactctctcggcccttgacttctacaagcccatggaacatttctggaaagacgttcttgatccannagggtggcccgccggtttctgagccttctgccctgcggggacacggtctgcaccctgcccgcggccacggaccatgaccatgaccctccacaccaaagcatctgggatggccctactgcatcagatccaagggaacgagctggagcccctgaaccgtccgcagctcaagatccccctggagcggcccctgggcgaggtgtacctggacagcagcaagcccgccgtgtacaactaccccgagggcgccgcctacgagttcaacgccgcggccgccgccaacgcgcaggtctacggtcagaccggcctcccctacggccccgggtctgaggctgcggcgttcggctccaacggcctggggggtttccccccactcaacagcgtgtctccgagcccgctgatgctactgcacccgccgccgcagctgtcgcctttcctgcagccccacggccagcaggtgccctactacctggagaacgagcccagcggctacacggtgcgcgaggccggcccgccggcattctacaggccaaattcagataatcgacgccagggtggcagagaaagattggccagtaccaatgacaagggaagtatggctatggaatctgccaaggagactcgctactgtgcagtgtgcaatgactatgcttcaggctaccattatggagtctggtcctgtgagggctgcaaggccttcttcaagagaagtattcaaggacataacgactatatgtgtccagccaccaaccagtgcaccattgataaaaacaggaggaagagctgccaggcctgccggctccgcaaatgctacgaagtgggaatgatgaaaggtgggatacgaaaagaccgaagaggagggagaatgttgaaacacaagcgccagagagatgatggggagggcaggggtgaagtggggtctgctggagacatgagagctgccaacctttggccaagcccgctcatgatcaaacgctctaagaagaacagcctggccttgtccctgacggccgaccagatggtcagtgccttgttggatgctgagccccccatactctattccgagtatgatcctaccagacccttcagtgaagcttcgatgatgggcttactgaccaacctggcagacagggagctggttcacatgatcaactgggcgaagagggtgccaggctttgtggatttgaccctccatgatcaggtccaccttctagaatgtgcctggctagagatcctgatgattggtctcgtctggcgctccatggagcacccagngaagctactgtttgctcctaacttgctcttggacaggaaccagggaaaatgtgtagagggcatggtggagatcttcgacatgctgctggctacatcatctcggttccgcatgatgaatctgcagggagaggagtttgtgtgcctcaaatctattattttgcttaattctggagtgtacacatttctgtccagcaccctgaagtctctggaagagaaggaccatatccaccgagtcctggacaagatcacagacactttgatccacctgatggccaaggcaggcctgaccctgcagcagcagcaccagcggctggcccagctcctcctcatcctctcccacatcaggcacatgagaaccagggaaaatgtgtagagggcatggtggagatcttcgacatgctgctggctacatcatctcggttccgcatgatgaatctgcagggagaggagtttgtgtgcctcaaatctattattttgcttaattctggagtgtacacatttctgtccagcaccctgaagtctctggaagagaaggaccatatccaccgagtcctggacaagatcacagacactttgatccacctgatggccaaggcaggcctgaccctgcagcagcagcaccagcggctggcccagctcctcctcatcctctcccacatcaggcacatgtaacaaaggcatggagcatctgtacagcatgaagtgcaagaacgtggtgcccctctatgacctgctgctggagatgctggacgcccaccgcctacatgcgcccactagccgtggaggggcatccgtggaggagacggaccaaagccacttggccactgcgggctctacttcatcgcattccttgcaaaagtattacatcacgggggaggcagagggtttccctgccacagtctgagagctccctggctcccacacggttcagataatccctgctgcattttaccctcatcatgcaccactttagccaaattctgtctcctgcatacactccggcatgcatccaacaccaatggctttctagatgagtggccattcatttgcttgctcagttcttagtggcacatcttctgtcttctgttgggaacagccaaagggattccaaggctaaatctttgtaacagctctctttcccccttgctatgttactaagcgtgaggattcccgtagctcttcacagctgaactcagtctatgggttggggctcagataactctgtgcatttaagctacttgtagagacccaggcctggagagtagacattttgcctctgataagcactttttaaatggctctaagaataagccacagcaaagaatttaaagtggctcctttaattggtgacttggagaaagctaggtcaagggtttattatagcaccctcttgtattcctatggcaatgcatccttttatgaaagtggtacaccttaaagcttttatatgactgtagcagagtatctggtgattgtcaattcacttccccctataggaatacaaggggccacacagggaaggcagatcccctagttggccaagacttattttaacttgatacactgcagattcagagtgtcctgaagctctgcctctggctttccggtcatgggttccagttaattcatgcctcccatggacctatggagagcaacaagttgatcttagttaagtctccctatatgagggataagttcctgatttttgtttttatttttgtgttacaaaagaaagccctccctccctgaacttgcagtaaggtcagcttcaggacctgttccagtgggcactgtacttggatcttcccggcgtgtgtgtgccttacacaggggtgaactgttcactgtggtgatgcatgatgagggtaaatggtagttgaaaggagcaggggccctggtgttgcatttagccctggggcatggagctgaacagtacttgtgcaggattgttgtggctactagagaacaagagggaaagtagggcagaaactggatacagttctgagcacagccagacttgctcaggtggccctgcacaggctgcagctacctaggaacattccttgcagaccccgcattgccctttgggggtgccctgggatccctggggtagtccagctcttattcatttcccagcgtggccctggttggaagaagcagctgtcacagctgtgtagacagctgtgttcctacaattggcccagcaccctggggcacgggagaagggtggggaccgttgctgtcactactcaggctgactggggcctggtcagattacgtatgcccttggtggtttagagataatccaaaatcagggtttggtttggggaagaaaatcctcccccttcctcccccgccccgttccctaccgcctccactcctgccagctcatttccttcaatttcctttgacctataggctaaaaaagaaaggctcattccagccacagggcagccttccctgggcctttgcttctctagcacaattatgggttacttcctttttcttaacaaaaaagaatgtttgatttcctctgggtgaccttattgtctgtaattgaaaccctattgagaggtgatgtctgtgttagccaatgacccaggtgagctgctcgggcttctcttggtatgtcttgtttggaaaagtggatttcattcatttctgattgtccagttaagtgatcaccaaaggactgagaatctgggagggcaaaaaaaaaaaaaaaagtttttatgtgcacttaaatttggggacaattttatgtatctgtgttaaggatatgcttaagaacataattcttttgttgctgtttgtttaagaagcaccttagtttgtttaagaagcaccttatatagtataatatatatttttttgaaattacattgcttgtttatcagacaattgaatgtagtaattctgttctggatttaatttgactgggttaacatgcaaaaaccaaggaaaaatatttagtttttttttttttttttgtatacttttcaagctaccttgtcatgtatacagtcatttatgcctaaagcctggtgattattcatttaaatgaagatcacatttcatatcaacttttgtatccacagtagacaaaatagcactaatccagatgcctattgttggatattgaatgacagacaatcttatgtagcaaagattatgcctgaaaaggaaaattattcagggcagctaattttgcttttaccaaaatatcagtagtaatatttttggacagtagctaatgggtcagtgggttctttttaatgtttatacttagattttcttttaaaaaaattaaaataaaacaaaaaaaatttctaggactagacgatgtaataccagctaaagccaaacaattatacagtggaaggttttacattattcatccaatgtgtttctattcatgttaagatactactacatttgaagtgggcagagaacatcagatgattgaaatgttcgcccaggggtctccagcaactttggaaatctctttgtatttttacttgaagtgccactaatggacagcagatattttctggctgatgttggtattgggtgtaggaacatgatttaaaaaaaaaactcttgcctctgctttcccccactctgaggcaagttaaaatgtaaaagatgtgatttatctggggggctcaggtatggtggggaagtggattcaggaatctggggaatggcaaatatattaagaagagtattgaaagtatttggaggaaaatggttaattctgggtgtgcaccagggttcagtagagtccacttctgccctggagaccacaaatcaactagctccatttacagccatttctaaaatggcagcttcagttctagagaagaaagaacaacatcagcagtaaagtccatggaatagctagtggtctgtgtttcttttcgccattgcctagcttgccgtaatgattctataatgccatcatgcagcaattatgagaggctaggtcatccaaagagaagaccctatcaatgtaggttgcaaaatctaacccctaaggaagtgcagtctttgatttgatttccctagtaaccttgcagatatgtttaaccaagccatagcccatgccttttgagggctgaacaaataagggacttactgataatttacttttgatcacattaaggtgttctcaccttgaaatcttatacactgaaatggccattgatttaggccactggcttagagtactccttcccctgcatgacactgattacaaatactttcctattcatactttccaattatgagatggactgtgggtactgggagtgatcactaacaccatagtaatgtctaatattcacaggcagatctgcttggggaagctagttatgtgaaaggcaaatagagtcatacagtagctcaaaaggcaaccataattctctttggtgcaggtcttgggagcgtgatctagattacactgcaccattcccaagttaatcccctgaaaacttactctcaactggagcaaatgaactttggtcccaaatatccatcttttcagtagcgttaattatgctctgtttccaactgcatttcctttccaattgaattaaagtgtggcctcgtttttagtcatttaaaattgttttctaagtaattgctgcctctattatggcacttcaattttgcactgtcttttgagattcaagaaaaatttctattcttttttttgcatccaattgtgcctgaacttttaaaatatgtaaatgctgccatgttccaaacccatcgtcagtgtgtgtgtttagagctgtgcaccctagaaacaacatattgtcccatgagcaggtgcctgagacacagacccctttgcattcacagagaggtcattggttatagagacttgaattaataagtgacattatgccagtttctgttctctcacaggtgataaacaatgctttttgtgcactacatactcttcagtgtagagctcttgttttatgggaaaaggctcaaatgccaaattgtgtttgatggattaatatgcccttttgccgatgcatactattactgatgtgactcggttttgtcgcagctttgctttgtttaatgaaacacacttgtaaacctcttttgcactttgaaaaagaatccagcgggatgctcgagcacctgtaaacaattttctcaacctatttgatgttcaaataaagaattaaactaaagacaacgagtttgttttttgtaagctccacttcttgctagcagttcaccactgatcctctaaaatcaaagtggttaaacgatctgtcacacacagtgagtctgaatgctaaagcctctcctcacctcactccctctgcccaacacccccaggtgtatcaggaagtgtgtggacactgtggtcaggcagaactggcctcaattcttggcttcaccacttacaaattttatgatcattggcagttgatttttcagagtttcggcttccttatcaacaatatgatgataagtaataacacctaattcacacgatggtggtgaggactaactgaggtgctcattaaacatagttgctgttttttaatgcctggcccaaatccttccctgtgagggagaagaaggatgcttgagagtggttattta

SEQ ID NO: 59972 - DNA, 7094 bp, Homo sapiens
  misc_feature (1460)..(1460): n is a, c, g, or t
gacaaacagagatatatcggagtctggcacggggcacataaggcagcacattagagaaagccggcccctggatccgtctttcgcgtttattttaagcccagtcttccctgggccacctttagcagatcctcgtgcgcccccgccccctggccgtgaaactcagcctctatccagcagcgacgacaagtaaagtggcccgccggtttctgagccttctgccctgcggggacacggtctgcaccctgcccgcggccacggaccatgaccatgaccctccacaccaaagcatctgggatggccctactgcatcagatccaagggaacgagctggagcccctgaaccgtccgcagctcaagatccccctggagcggcccctgggcgaggtgtacctggacagcagcaagcccgccgtgtacaactaccccgagggcgccgcctacgagttcaacgccgcggccgccgccaacgcgcaggtctacggtcagaccggcctcccctacggccccgggtctgaggctgcggcgttcggctccaacggcctggggggtttccccccactcaacagcgtgtctccgagcccgctgatgctactgcacccgccgccgcagctgtcgcctttcctgcagccccacggccagcaggtgccctactacctggagaacgagcccagcggctacacggtgcgcgaggccggcccgccggcattctacaggccaaattcagataatcgacgccagggtggcagagaaagattggccagtaccaatgacaagggaagtatggctatggaatctgccaaggagactcgctactgtgcagtgtgcaatgactatgcttcaggctaccattatggagtctggtcctgtgagggctgcaaggccttcttcaagagaagtattcaaggacataacgactatatgtgtccagccaccaaccagtgcaccattgataaaaacaggaggaagagctgccaggcctgccggctccgcaaatgctacgaagtgggaatgatgaaaggtgggatacgaaaagaccgaagaggagggagaatgttgaaacacaagcgccagagagatgatggggagggcaggggtgaagtggggtctgctggagacatgagagctgccaacctttggccaagcccgctcatgatcaaacgctctaagaagaacagcctggccttgtccctgacggccgaccagatggtcagtgccttgttggatgctgagccccccatactctattccgagtatgatcctaccagacccttcagtgaagcttcgatgatgggcttactgaccaacctggcagacagggagctggttcacatgatcaactgggcgaagagggtgccaggctttgtggatttgaccctccatgatcaggtccaccttctagaatgtgcctggctagagatcctgatgattggtctcgtctggcgctccatggagcacccagngaagctactgtttgctcctaacttgctcttggacaggaaccagggaaaatgtgtagagggcatggtggagatcttcgacatgctgctggctacatcatctcggttccgcatgatgaatctgcagggagaggagtttgtgtgcctcaaatctattattttgcttaattctggagtgtacacatttctgtccagcaccctgaagtctctggaagagaaggaccatatccaccgagtcctggacaagatcacagacactttgatccacctgatggccaaggcaggcctgaccctgcagcagcagcaccagcggctggcccagctcctcctcatcctctcccacatcaggcacatgagaaccagggaaaatgtgtagagggcatggtggagatcttcgacatgctgctggctacatcatctcggttccgcatgatgaatctgcagggagaggagtttgtgtgcctcaaatctattattttgcttaattctggagtgtacacatttctgtccagcaccctgaagtctctggaagagaaggaccatatccaccgagtcctggacaagatcacagacactttgatccacctgatggccaaggcaggcctgaccctgcagcagcagcaccagcggctggcccagctcctcctcatcctctcccacatcaggcacatgtaacaaaggcatggagcatctgtacagcatgaagtgcaagaacgtggtgcccctctatgacctgctgctggagatgctggacgcccaccgcctacatgcgcccactagccgtggaggggcatccgtggaggagacggaccaaagccacttggccactgcgggctctacttcatcgcattccttgcaaaagtattacatcacgggggaggcagagggtttccctgccacagtctgagagctccctggctcccacacggttcagataatccctgctgcattttaccctcatcatgcaccactttagccaaattctgtctcctgcatacactccggcatgcatccaacaccaatggctttctagatgagtggccattcatttgcttgctcagttcttagtggcacatcttctgtcttctgttgggaacagccaaagggattccaaggctaaatctttgtaacagctctctttcccccttgctatgttactaagcgtgaggattcccgtagctcttcacagctgaactcagtctatgggttggggctcagataactctgtgcatttaagctacttgtagagacccaggcctggagagtagacattttgcctctgataagcactttttaaatggctctaagaataagccacagcaaagaatttaaagtggctcctttaattggtgacttggagaaagctaggtcaagggtttattatagcaccctcttgtattcctatggcaatgcatccttttatgaaagtggtacaccttaaagcttttatatgactgtagcagagtatctggtgattgtcaattcacttccccctataggaatacaaggggccacacagggaaggcagatcccctagttggccaagacttattttaacttgatacactgcagattcagagtgtcctgaagctctgcctctggctttccggtcatgggttccagttaattcatgcctcccatggacctatggagagcaacaagttgatcttagttaagtctccctatatgagggataagttcctgatttttgtttttatttttgtgttacaaaagaaagccctccctccctgaacttgcagtaaggtcagcttcaggacctgttccagtgggcactgtacttggatcttcccggcgtgtgtgtgccttacacaggggtgaactgttcactgtggtgatgcatgatgagggtaaatggtagttgaaaggagcaggggccctggtgttgcatttagccctggggcatggagctgaacagtacttgtgcaggattgttgtggctactagagaacaagagggaaagtagggcagaaactggatacagttctgagcacagccagacttgctcaggtggccctgcacaggctgcagctacctaggaacattccttgcagaccccgcattgccctttgggggtgccctgggatccctggggtagtccagctcttattcatttcccagcgtggccctggttggaagaagcagctgtcacagctgtgtagacagctgtgttcctacaattggcccagcaccctggggcacgggagaagggtggggaccgttgctgtcactactcaggctgactggggcctggtcagattacgtatgcccttggtggtttagagataatccaaaatcagggtttggtttggggaagaaaatcctcccccttcctcccccgccccgttccctaccgcctccactcctgccagctcatttccttcaatttcctttgacctataggctaaaaaagaaaggctcattccagccacagggcagccttccctgggcctttgcttctctagcacaattatgggttacttcctttttcttaacaaaaaagaatgtttgatttcctctgggtgaccttattgtctgtaattgaaaccctattgagaggtgatgtctgtgttagccaatgacccaggtgagctgctcgggcttctcttggtatgtcttgtttggaaaagtggatttcattcatttctgattgtccagttaagtgatcaccaaaggactgagaatctgggagggcaaaaaaaaaaaaaaaagtttttatgtgcacttaaatttggggacaattttatgtatctgtgttaaggatatgcttaagaacataattcttttgttgctgtttgtttaagaagcaccttagtttgtttaagaagcaccttatatagtataatatatatttttttgaaattacattgcttgtttatcagacaattgaatgtagtaattctgttctggatttaatttgactgggttaacatgcaaaaaccaaggaaaaatatttagtttttttttttttttttgtatacttttcaagctaccttgtcatgtatacagtcatttatgcctaaagcctggtgattattcatttaaatgaagatcacatttcatatcaacttttgtatccacagtagacaaaatagcactaatccagatgcctattgttggatattgaatgacagacaatcttatgtagcaaagattatgcctgaaaaggaaaattattcagggcagctaattttgcttttaccaaaatatcagtagtaatatttttggacagtagctaatgggtcagtgggttctttttaatgtttatacttagattttcttttaaaaaaattaaaataaaacaaaaaaaatttctaggactagacgatgtaataccagctaaagccaaacaattatacagtggaaggttttacattattcatccaatgtgtttctattcatgttaagatactactacatttgaagtgggcagagaacatcagatgattgaaatgttcgcccaggggtctccagcaactttggaaatctctttgtatttttacttgaagtgccactaatggacagcagatattttctggctgatgttggtattgggtgtaggaacatgatttaaaaaaaaaactcttgcctctgctttcccccactctgaggcaagttaaaatgtaaaagatgtgatttatctggggggctcaggtatggtggggaagtggattcaggaatctggggaatggcaaatatattaagaagagtattgaaagtatttggaggaaaatggttaattctgggtgtgcaccagggttcagtagagtccacttctgccctggagaccacaaatcaactagctccatttacagccatttctaaaatggcagcttcagttctagagaagaaagaacaacatcagcagtaaagtccatggaatagctagtggtctgtgtttcttttcgccattgcctagcttgccgtaatgattctataatgccatcatgcagcaattatgagaggctaggtcatccaaagagaagaccctatcaatgtaggttgcaaaatctaacccctaaggaagtgcagtctttgatttgatttccctagtaaccttgcagatatgtttaaccaagccatagcccatgccttttgagggctgaacaaataagggacttactgataatttacttttgatcacattaaggtgttctcaccttgaaatcttatacactgaaatggccattgatttaggccactggcttagagtactccttcccctgcatgacactgattacaaatactttcctattcatactttccaattatgagatggactgtgggtactgggagtgatcactaacaccatagtaatgtctaatattcacaggcagatctgcttggggaagctagttatgtgaaaggcaaatagagtcatacagtagctcaaaaggcaaccataattctctttggtgcaggtcttgggagcgtgatctagattacactgcaccattcccaagttaatcccctgaaaacttactctcaactggagcaaatgaactttggtcccaaatatccatcttttcagtagcgttaattatgctctgtttccaactgcatttcctttccaattgaattaaagtgtggcctcgtttttagtcatttaaaattgttttctaagtaattgctgcctctattatggcacttcaattttgcactgtcttttgagattcaagaaaaatttctattcttttttttgcatccaattgtgcctgaacttttaaaatatgtaaatgctgccatgttccaaacccatcgtcagtgtgtgtgtttagagctgtgcaccctagaaacaacatattgtcccatgagcaggtgcctgagacacagacccctttgcattcacagagaggtcattggttatagagacttgaattaataagtgacattatgccagtttctgttctctcacaggtgataaacaatgctttttgtgcactacatactcttcagtgtagagctcttgttttatgggaaaaggctcaaatgccaaattgtgtttgatggattaatatgcccttttgccgatgcatactattactgatgtgactcggttttgtcgcagctttgctttgtttaatgaaacacacttgtaaacctcttttgcactttgaaaaagaatccagcgggatgctcgagcacctgtaaacaattttctcaacctatttgatgttcaaataaagaattaaactaaagacaacgagtttgttttttgtaagctccacttcttgctagcagttcaccactgatcctctaaaatcaaagtggttaaacgatctgtcacacacagtgagtctgaatgctaaagcctctcctcacctcactccctctgcccaacacccccaggtgtatcaggaagtgtgtggacactgtggtcaggcagaactggcctcaattcttggcttcaccacttacaaattttatgatcattggcagttgatttttcagagtttcggcttccttatcaacaatatgatgataagtaataacacctaattcacacgatggtggtgaggactaactgaggtgctcattaaacatagttgctgttttttaatgcctggcccaaatccttccctgtgagggagaagaaggatgcttgagagtggttattta

SEQ ID NO: 59973 - DNA, 7858 bp, Homo sapiens
  misc_feature (252)..(252): n is a, c, g, or t
  misc_feature (1405)..(1406): n is a, c, g, or t
ccagtgccaagcttggtaccactagagcatgggtggccattgttgacctacaggaggcaccactgtcaccaacaaagggtaacagtctttcttttcaatatttatttatatccagtatttattttcaatactgactatggagagagctctcctgtgctcaaacactgcaatactgggggtctttcaaagcacaaaaacatatatttgcatgatggcatcattaacatttttatggctttctatttctttttngtactggtctcaagagccactcataaatctctcagtaactgcatagtgtcccagggccagagaccggccactcctggcattgtgattagagtcatttaatatccaaggtggtgactaatgtctggcaacaaagcctccattgggtgtcatgtgtcctgggaccctgagcgtgggcactctaggagcacctcagtattgcgtgttagtactatggccgagagaatagttgagaaagtggtcaagaggtggatccatgtgaacgccactgggaaatgagagacctcgttcccaatcacggtcagtgcaactcgaaagcctaaaatcagtttaaaacaaaggtatctacctttatcttatgttcatatcctaggcttttaataatacgtatttttcacatgtttacagaaagcagtcaactgagctattcatggaaaggtttgtgggtttggttaacgaagtgaggagtattacatttcagctggaaacacatccctagaatgccaaaacatttattccaaagtctggtttcctggtgcaatcggaggcatggcaatgcctctgttcagagactgggggctagggccagtaaggcatttgatccacatgtatcccagaaggcttttattgttaaattatattctttcggaaaaaccacccatgtcctattttgtaaacttgatatccatacacttttgactggcattctattttagccgtaagactatgattcacagcaagcctgtttttcctcttgcttggggtggcagcagaaagcatagggtactttccagcctccaagggtaggggcaaaggggctggggtttctcctccccagtacagctttctctggctgtgcacactgctccctgtgagcagacagcaagtctcccctcactccccactgccattcatccagcgctgtgcagtagcccagctgcgtgtctgccgggaggggctgccaagtgccctgcctactggctgcttcccgaatccctgccattccacgcacaaacacatccacacactctctctgcctagttcacacactgagccactcgcacatgcgagcacattccttccttccttctcactctctcggcccttgacttctacaagcccatggaacatttctggaaagacgttcttgatccannagggtggcccgccggtttctgagccttctgccctgcggggacacggtctgcaccctgcccgcggccacggaccatgaccatgaccctccacaccaaagcatctgggatggccctactgcatcagatccaagggaacgagctggagcccctgaaccgtccgcagctcaagatccccctggagcggcccctgggcgaggtgtacctggacagcagcaagcccgccgtgtacaactaccccgagggcgccgcctacgagttcaacgccgcggccgccgccaacgcgcaggtctacggtcagaccggcctcccctacggccccgggtctgaggctgcggcgttcggctccaacggcctggggggtttccccccactcaacagcgtgtctccgagcccgctgatgctactgcacccgccgccgcagctgtcgcctttcctgcagccccacggccagcaggtgccctactacctggagaacgagcccagcggctacacggtgcgcgaggccggcccgccggcattctacaggccaaattcagataatcgacgccagggtggcagagaaagattggccagtaccaatgacaagggaagtatggctatggaatctgccaaggagactcgctactgtgcagtgtgcaatgactatgcttcaggctaccattatggagtctggtcctgtgagggctgcaaggccttcttcaagagaagtattcaaggacataacgactatatgtgtccagccaccaaccagtgcaccattgataaaaacaggaggaagagctgccaggcctgccggctccgcaaatgctacgaagtgggaatgatgaaaggtgggatacgaaaagaccgaagaggagggagaatgttgaaacacaagcgccagagagatgatggggagggcaggggtgaagtggggtctgctggagacatgagagctgccaacctttggccaagcccgctcatgatcaaacgctctaagaagaacagcctggccttgtccctgacggccgaccagatggtcagtgccttgttggatgctgagccccccatactctattccgagtatgatcctaccagacccttcagtgaagcttcgatgatgggcttactgaccaacctggcagacagggagctggttcacatgatcaactgggcgaagagggtgccaggaaccagggaaaatgtgtagagggcatggtggagatcttcgacatgctgctggctacatcatctcggttccgcatgatgaatctgcagggagaggagtttgtgtgcctcaaatctattattttgcttaattctggagtgtacacatttctgtccagcaccctgaagtctctggaagagaaggaccatatccaccgagtcctggacaagatcacagacactttgatccacctgatggccaaggcaggcctgaccctgcagcagcagcaccagcggctggcccagctcctcctcatcctctcccacatcaggcacatgagtaacaaaggcatggagcatctgtacagcatgaagtgcaagaacgtggtgcccctctatgacctgctgctggagatgctggacgcccaccgcctacatgcgcccactagccgtggaggggcatccgtggaggagacggaccaaagccacttggccactgcgggctctacttcatcgcattccttgcaaaagtattacatcacgggggaggcagagggtttccctgccacagtctgagagctccctggctcccacacggttcagataatccctgctgcattttaccctcatcatgcaccactttagccaaattctgtctcctgcatacactccggcatgcatccaacaccaatggctttctagatgagtggccattcatttgcttgctcagttcttagtggcacatcttctgtcttctgttgggaacagccaaagggattccaaggctaaatctttgtaacagctctctttcccccttgctatgttactaagcgtgaggattcccgtagctcttcacagctgaactcagtctatgggttggggctcagataactctgtgcatttaagctacttgtagagacccaggcctggagagtagacattttgcctctgataagcactttttaaatggctctaagaataagccacagcaaagaatttaaagtggctcctttaattggtgacttggagaaagctaggtcaagggtttattatagcaccctcttgtattcctatggcaatgcatccttttatgaaagtggtacaccttaaagcttttatatgactgtagcagagtatctggtgattgtcaattcacttccccctataggaatacaaggggccacacagggaaggcagatcccctagttggccaagacttattttaacttgatacactgcagattcagagtgtcctgaagctctgcctctggctttccggtcatgggttccagttaattcatgcctcccatggacctatggagagcaacaagttgatcttagttaagtctccctatatgagggataagttcctgatttttgtttttatttttgtgttacaaaagaaagccctccctccctgaacttgcagtaaggtcagcttcaggacctgttccagtgggcactgtacttggatcttcccggcgtgtgtgtgccttacacaggggtgaactgttcactgtggtgatgcatgatgagggtaaatggtagttgaaaggagcaggggccctggtgttgcatttagccctggggcatggagctgaacagtacttgtgcaggattgttgtggctactagagaacaagagggaaagtagggcagaaactggatacagttctgagcacagccagacttgctcaggtggccctgcacaggctgcagctacctaggaacattccttgcagaccccgcattgccctttgggggtgccctgggatccctggggtagtccagctcttattcatttcccagcgtggccctggttggaagaagcagctgtcacagctgtgtagacagctgtgttcctacaattggcccagcaccctggggcacgggagaagggtggggaccgttgctgtcactactcaggctgactggggcctggtcagattacgtatgcccttggtggtttagagataatccaaaatcagggtttggtttggggaagaaaatcctcccccttcctcccccgccccgttccctaccgcctccactcctgccagctcatttccttcaatttcctttgacctataggctaaaaaagaaaggctcattccagccacagggcagccttccctgggcctttgcttctctagcacaattatgggttacttcctttttcttaacaaaaaagaatgtttgatttcctctgggtgaccttattgtctgtaattgaaaccctattgagaggtgatgtctgtgttagccaatgacccaggtgagctgctcgggcttctcttggtatgtcttgtttggaaaagtggatttcattcatttctgattgtccagttaagtgatcaccaaaggactgagaatctgggagggcaaaaaaaaaaaaaaaagtttttatgtgcacttaaatttggggacaattttatgtatctgtgttaaggatatgcttaagaacataattcttttgttgctgtttgtttaagaagcaccttagtttgtttaagaagcaccttatatagtataatatatatttttttgaaattacattgcttgtttatcagacaattgaatgtagtaattctgttctggatttaatttgactgggttaacatgcaaaaaccaaggaaaaatatttagtttttttttttttttttgtatacttttcaagctaccttgtcatgtatacagtcatttatgcctaaagcctggtgattattcatttaaatgaagatcacatttcatatcaacttttgtatccacagtagacaaaatagcactaatccagatgcctattgttggatattgaatgacagacaatcttatgtagcaaagattatgcctgaaaaggaaaattattcagggcagctaattttgcttttaccaaaatatcagtagtaatatttttggacagtagctaatgggtcagtgggttctttttaatgtttatacttagattttcttttaaaaaaattaaaataaaacaaaaaaaatttctaggactagacgatgtaataccagctaaagccaaacaattatacagtggaaggttttacattattcatccaatgtgtttctattcatgttaagatactactacatttgaagtgggcagagaacatcagatgattgaaatgttcgcccaggggtctccagcaactttggaaatctctttgtatttttacttgaagtgccactaatggacagcagatattttctggctgatgttggtattgggtgtaggaacatgatttaaaaaaaaaactcttgcctctgctttcccccactctgaggcaagttaaaatgtaaaagatgtgatttatctggggggctcaggtatggtggggaagtggattcaggaatctggggaatggcaaatatattaagaagagtattgaaagtatttggaggaaaatggttaattctgggtgtgcaccagggttcagtagagtccacttctgccctggagaccacaaatcaactagctccatttacagccatttctaaaatggcagcttcagttctagagaagaaagaacaacatcagcagtaaagtccatggaatagctagtggtctgtgtttcttttcgccattgcctagcttgccgtaatgattctataatgccatcatgcagcaattatgagaggctaggtcatccaaagagaagaccctatcaatgtaggttgcaaaatctaacccctaaggaagtgcagtctttgatttgatttccctagtaaccttgcagatatgtttaaccaagccatagcccatgccttttgagggctgaacaaataagggacttactgataatttacttttgatcacattaaggtgttctcaccttgaaatcttatacactgaaatggccattgatttaggccactggcttagagtactccttcccctgcatgacactgattacaaatactttcctattcatactttccaattatgagatggactgtgggtactgggagtgatcactaacaccatagtaatgtctaatattcacaggcagatctgcttggggaagctagttatgtgaaaggcaaatagagtcatacagtagctcaaaaggcaaccataattctctttggtgcaggtcttgggagcgtgatctagattacactgcaccattcccaagttaatcccctgaaaacttactctcaactggagcaaatgaactttggtcccaaatatccatcttttcagtagcgttaattatgctctgtttccaactgcatttcctttccaattgaattaaagtgtggcctcgtttttagtcatttaaaattgttttctaagtaattgctgcctctattatggcacttcaattttgcactgtcttttgagattcaagaaaaatttctattcttttttttgcatccaattgtgcctgaacttttaaaatatgtaaatgctgccatgttccaaacccatcgtcagtgtgtgtgtttagagctgtgcaccctagaaacaacatattgtcccatgagcaggtgcctgagacacagacccctttgcattcacagagaggtcattggttatagagacttgaattaataagtgacattatgccagtttctgttctctcacaggtgataaacaatgctttttgtgcactacatactcttcagtgtagagctcttgttttatgggaaaaggctcaaatgccaaattgtgtttgatggattaatatgcccttttgccgatgcatactattactgatgtgactcggttttgtcgcagctttgctttgtttaatgaaacacacttgtaaacctcttttgcactttgaaaaagaatccagcgggatgctcgagcacctgtaaacaattttctcaacctatttgatgttcaaataaagaattaaactaaagacaacgagtttgttttttgtaagctccacttcttgctagcagttcaccactgatcctctaaaatcaaagtggttaaacgatctgtcacacacagtgagtctgaatgctaaagcctctcctcacctcactccctctgcccaacacccccaggtgtatcaggaagtgtgtggacactgtggtcaggcagaactggcctcaattcttggcttcaccacttacaaattttatgatcattggcagttgatttttcagagtttcggcttccttatcaacaatatgatgataagtaataacacctaattcacacgatggtggtgaggactaactgaggtgctcattaaacatagttgctgttttttaatgcctggcccaaatccttccctgtgagggagaagaaggatgcttgagagtggttattta

SEQ ID NO: 59974 - DNA, 2879 bp, Homo sapiens
  misc_feature (252)..(252): n is a, c, g, or t
  misc_feature (1405)..(1406): n is a, c, g, or t
ccagtgccaagcttggtaccactagagcatgggtggccattgttgacctacaggaggcaccactgtcaccaacaaagggtaacagtctttcttttcaatatttatttatatccagtatttattttcaatactgactatggagagagctctcctgtgctcaaacactgcaatactgggggtctttcaaagcacaaaaacatatatttgcatgatggcatcattaacatttttatggctttctatttctttttngtactggtctcaagagccactcataaatctctcagtaactgcatagtgtcccagggccagagaccggccactcctggcattgtgattagagtcatttaatatccaaggtggtgactaatgtctggcaacaaagcctccattgggtgtcatgtgtcctgggaccctgagcgtgggcactctaggagcacctcagtattgcgtgttagtactatggccgagagaatagttgagaaagtggtcaagaggtggatccatgtgaacgccactgggaaatgagagacctcgttcccaatcacggtcagtgcaactcgaaagcctaaaatcagtttaaaacaaaggtatctacctttatcttatgttcatatcctaggcttttaataatacgtatttttcacatgtttacagaaagcagtcaactgagctattcatggaaaggtttgtgggtttggttaacgaagtgaggagtattacatttcagctggaaacacatccctagaatgccaaaacatttattccaaagtctggtttcctggtgcaatcggaggcatggcaatgcctctgttcagagactgggggctagggccagtaaggcatttgatccacatgtatcccagaaggcttttattgttaaattatattctttcggaaaaaccacccatgtcctattttgtaaacttgatatccatacacttttgactggcattctattttagccgtaagactatgattcacagcaagcctgtttttcctcttgcttggggtggcagcagaaagcatagggtactttccagcctccaagggtaggggcaaaggggctggggtttctcctccccagtacagctttctctggctgtgcacactgctccctgtgagcagacagcaagtctcccctcactccccactgccattcatccagcgctgtgcagtagcccagctgcgtgtctgccgggaggggctgccaagtgccctgcctactggctgcttcccgaatccctgccattccacgcacaaacacatccacacactctctctgcctagttcacacactgagccactcgcacatgcgagcacattccttccttccttctcactctctcggcccttgacttctacaagcccatggaacatttctggaaagacgttcttgatccannagggtggcccgccggtttctgagccttctgccctgcggggacacggtctgcaccctgcccgcggccacggaccatgaccatgaccctccacaccaaagcatctgggatggccctactgcatcagatccaagggaacgagctggagcccctgaaccgtccgcagctcaagatccccctggagcggcccctgggcgaggtgtacctggacagcagcaagcccgccgtgtacaactaccccgagggcgccgcctacgagttcaacgccgcggccgccgccaacgcgcaggtctacggtcagaccggcctcccctacggccccgggtctgaggctgcggcgttcggctccaacggcctggggggtttccccccactcaacagcgtgtctccgagcccgctgatgctactgcacccgccgccgcagctgtcgcctttcctgcagccccacggccagcaggtgccctactacctggagaacgagcccagcggctacacggtgcgcgaggccggcccgccggcattctacaggccaaattcagataatcgacgccagggtggcagagaaagattggccagtaccaatgacaagggaagtatggctatggaatctgccaaggagactcgctactgtgcagtgtgcaatgactatgcttcaggctaccattatggagtctggtcctgtgagggctgcaaggccttcttcaagagaagtattcaaggacataacgactatatgtgtccagccaccaaccagtgcaccattgataaaaacaggaggaagagctgccaggcctgccggctccgcaaatgctacgaagtgggaatgatgaaaggtgggatacgaaaagaccgaagaggagggagaatgttgaaacacaagcgccagagagatgatggggagggcaggggtgaagtggggtctgctggagacatgagagctgccaacctttggccaagcccgctcatgatcaaacgctctaagaagaacagcctggccttgtccctgacggccgaccagatggtcagtgccttgttggatgctgagccccccatactctattccgagtatgatcctaccagacccttcagtgaagcttcgatgatgggcttactgaccaacctggcagacagggagctggttcacatgatcaactgggcgaagagggtgccagaaaggatggatatatgtgtgatcctgggtgtgccaaatgctgtggcttcctgaagcttagatttccagcttgtcaccttcaaggttaccttgtgaataggacttttttgagctatttctatccagttgactatggattttgcctgttgctttgtttccaccaactctccctgaagatgaggcgcacagacagacaactcacaggcaagaacagcctggtccatcttgaaagattctcaagactattctccacaagataattgtctacttttaaaaatattcagtaaagggaatttttgctgtta

SEQ ID NO: 59975 - DNA, 394 bp, Homo sapiens
ggtctgctggagacatgagagctgccaacctttggccaagcccgctcatgatcaaacgctctaagaagaacagcctggccttgtccctgacggccgaccagatggtcagtgccttgttggatgctgagccccccatactctattccgagtatgatcctaccagacccttcagtgaagcttcgatgatgggcttactgaccaacctggcagacagggagctggttcacatgatcaactgggcgaagagggtgccaggtaagaatgcgaagcgcagcttttaagagtcaatagcttttcaagaacttgttgtgatgtcatgggagaaatagtgggggaaaaagaagcaataacatgttatgtaattggtttcaaggttacaggagatgtgttcatt

SEQ ID NO: 59976 - DNA, 2114 bp, Homo sapiens
atgggcctcgtggcacgggacgtttcaagtcctggcgtccccgcgagcaagcagcctgatcaggcctcgcagtgggacgttgggaagccggtgttggcagatgctgtggctgggaggagtccagagcgttcgccctgtccccgcggggctgagccacaactgcttaggagttttgggcaggatcgatggatgcaggaagcagtaggagtttggagaatgcagtgaataggatctatcatgatcagcttgttccaaagataaacacaagcaagaaaatgtccaccttagcgcacccacctaacatcctggaaatgtcacaagagattaagaaaaactgtggaggtaaacaggtagaaatcacacttgaaagaacaaaaatgacaaagggcatcaaagaaaaacaaagcaatgatttagagaaagcagcctttaaacggaaggcagaaggtgaagaaaagccaactagaaagaaacaggcaaagataacagaacttgacaatcagttaatcaccatgcctctgcctcacatccccttaaagaacataatggatgtggaaatgaagttggtctacattgatgaaatgggtgttcgctatgagtttgtagagtccttcatgtctactgggagtcagccaacatgccaagctgctgaaatagtagaccctttgagtgtacataatttcagctttctgcctcagattgacaaatggcttcaggtagccttaaaggatgccagctcttgctatagacaaaagaaatacgccttggcagcaggacagttcagaacagcacttgagctttgcagcaaaggagcagttctgggagaaccatttgatgcacctgctgaagatatagcaagtgtggcaagtttcattgagacaaagcttgttacctgttatctacggatgaggaaaccagatcttgccctgaatcatgcacacaggagcattgttttaaacccagcctatttccggaatcatcttcgtcaagcaacagtgtttagatgtctggagaggtattcagaggctgcccggagtgccgtgattgctgactacatgttctggcttggtggaggaagggaagagagcataagcaagctcatcaaactgtattggcaggccatgattgaggaagccatcaccagagctgaatctttctcggttatgtacacaccatttgcgacaaaaataagagctgataaaatagaaaaagtaaaagatgctttcacaaaaactcatcctgcatatgcagagtatatgtacacagatcttcaagcactccacatgttgcctcagacagttgactggtcatcttttcctccccaacaatatctcttgactcttgggttcaaaaacaaagatgatggaaaatttttggaaaaaatatcaagcaggaagctgccgatattcacagagcataaaacacctttcggtctgaccagagaagatacagtgaggcaaatggagacaatggggaagcgaatcttgccaatattggattttattagaagcacccaattgaatgggagttttcctgcatcctcaggtgtgatggagaagttgcaatatgccagcctcctcagccagctgcagagagtaaaggagcagtcccaggtgattaatcaagcaatggcagagctagcaaccattccctacctacaggacatcagtcaacaggaggcagaattgctgcagtcactaatggcagatgctatggacacccttgaaggaagaagaaacaataatgaacgtgtgtggaatatgatccaaaaggttggacaaattgaagattttctataccaattagaggacagtttcttaaaaactaaaaaactgagaactgctcgaaggcaaaaaacaaaaatgaagcgacttcaaactgttcagcaaaggtagtcattagggagcaggcactaccactaagatatcccagaagaagaggcaagggcatccactccaatgcccacctagtactgtgaagctggataacaaaagcttgtcaccaaaagaaagaggtggtattcccctcagttcatctttaccaaagacactctatgtttcattaatctcaactggcagcaataaatattctcagcaagttggacttgaaatgtg

SEQ ID NO: 59977 - DNA, 1021 bp, Homo sapiens
  misc_feature (969)..(969): n is a, c, g, or t
  misc_feature (983)..(983): n is a, c, g, or t
atgggcctcgtggcacgggacgtttcaagtcctggcgtccccgcgagcaagcagcctgatcaggcctcgcagtgggacgttgggaagccggtgttggcagatgctgtggctgggaggagtccagagcgttcgccctgtccccgcggggctgagccacaactgcttaggagttttgggcaggatcgatggatgcaggaagcagtaggagtttggagaatgcagtgaataggatctatcatgatcagcttgttccaaagataaacacaagcaagaaaatgtccaccttagcgcacccacctaacatcctggaaatgtcacaagagattaagaaaaactgtggaggtaaacaggtagaaatcacacttgaaagaacaaaaatgacaaagggcatcaaagaaaaacaaagcaatgatttagagaaagcagcctttaaacggaaggcagaaggtgaagaaaagccaactagaaagaaacaggcaaagataacagaacttgacaatcagttaatcaccatgcctctgcctcacatccccttaaagaacataatggatgtggaaatgaagttggtctacattgatgaaatgggtgttcgctatgagtttgtagagtccttcatgtctactgggagtcagccaacatgccaagctgctgaaatagtagaccctttgagtgtacataatttcagctttctgcctcagattgacaaatggcttcaggtagccttaaaggatgccagctcttgctatagacaaaagaaatacgccttggcagcaggacagttcagaacagcacttgaggtatgggattaaagaaaatatagattggtgacaggaaactatgaaatggaaagttgcaattacattgaggggttctggccatactgtaataagcagtgatcatgaggtgaggatatgtaatgatattaggattttgcagttcccagtttacataaagcaaataaagactgancggccagccgcccnttatcccttctcaacatatactagacatgaaatatcga

SEQ ID NO: 59978 - DNA, 2214 bp, Homo sapiens
atgggcctcgtggcacgggacgtttcaagtcctggcgtccccgcgagcaagcagcctgatcaggcctcgcagtgggacgttgggaagccggtgttggcagatgctgtggctgggaggagtccagagcgttcgccctgtccccgcggggctgagccacaactgcttaggagttttgggcaggatcgatggatgcaggaagcagtaggagtttggagaatgcagtgaataggatctatcatgatcagcttgttccaaagataaacacaagcaagaaaatgtccaccttagcgcacccacctaacatcctggaaatgtcacaagagattaagaaaaactgtggaggtaaacaggtagaaatcacacttgaaagaacaaaaatgacaaagggcatcaaagaaaaacaaagcaatgatttagagaaagcagcctttaaacggaaggcagaaggtgaagaaaagccaactagaaagaaacaggcaaagataacagaacttgacaatcagttaatcaccatgcctctgcctcacatccccttaaagaacataatggatgtggaaatgaagttggtctacattgatgaaatgggtgttcgctatgagtttgtagagtccttcatgtctactgggagtcagccaacatgccaagctgctgaaatagtagaccctttgagtgtacataatttcagctttctgcctcagattgacaaatggcttcaggtagccttaaaggatgccagctcttgctatagacaaaagaaatacgccttggcagcaggacagttcagaacagcacttgagctttgcagcaaaggagcagttctgggagaaccatttgatgcacctgctgaagatatagcaagtgtggcaagtttcattgagacaaagcttgttacctgttatctacggatgaggaaaccagatcttgccctgaatcatgcacacaggagcattgttttaaacccagcctatttccggaatcatcttcgtcaagcaacagtgtttagatgtctggagaggtattcagaggctgcccggagtgccgtgattgctgactacatgttctggcttggtggaggaagggaagagagcataagcaagctcatcaaactgtattggcaggccatgattgaggaagccatcaccagagctgaatctttctcggttatgtacacaccatttgcgacaaaaataagagctgataaaatagaaaaagtaaaagatgctttcacaaaaactcatcctgcatatgcagagtatatgtacacagatcttcaagcactccacatgttgcctcagacagttgactggtcatcttttcctccccaacaatatctcttgactcttgggttcaaaaacaaagatgatggaaaatttttggaaaaaatatcaagcaggaagctgccgatattcacagagcataaaacacctttcggtctgaccagagaagatacagtgaggcaaatggagacaatggggaagcgaatcttgccaatattggattttattagaagcacccaattgaatgggagttttcctgcatcctcaggtgtgatggagaagttgcaatatgccagcctcctcagccagctgcagagagtaaaggagcagtcccaggtgattaatcaagcaatggcagagctagcaaccattccctacctacaggacatcagtcaacaggaggcagaattgctgcagtcactaatggcagatgctatggacacccttgaaggaagaagaaacaataatgaacgtgtgtggaatatgatccaaaaggtaaaactttgagctgaaggaaaaagatctattattctcaaagaaaatgtccattttgggtcaaatctgtttggaggataaaaagaaacccaagttctttggtttgtttttttgttttccttttttaattaaatgcagctctctccctggaagtgtgaccaaaatcaaatatggatttatttaatctgcttcttttccaacaggctgtgttcatatgctttcgtgatttttcttcattatcatgctcattttcatattctattttcattatctgcgccttcgttctcggttttataattctttaaagccctttcatcagtgttttagtccactcctcaactatatttccacttttttcatttgaggaataatgactacatttcagggaactacaaagaaactagcacattgatgtttttagtaaaggactaacatactaatt

SEQ ID NO: 59979 - DNA, 718 bp, Homo sapiens
cattatctgcgccttcgttctcggttttataattctttaaagccctttcatcagtgttttagtccactcctcaactatatttccacttttttcatttgaggaataatgactacatttcagggaactacaaagaaactagcacattgatgtttttagtaaaggactaacatactaattgttagaaatagaggaacatcccatcattggctactggggtttaaatgcaggaagtgccgagatgcacctggacccaagtactcaggagacttgtgtgacacaacaggaccctctgaaaatgtgaaagttagtaatcttggttctccagtcaaactcaaagtattaagttctgatcaatcaactccccattcatcttcctcccatcactgtaagaacccaccaggggagactggcatcaggagatgtgaaacaaacaaaagaaccttcagtttaaaagccaaccctaagggattctggagcacctgaggaaacacgtgtcttttgtaatgaactcagaggccctgtgatatacagttgacccttgaacaacgtggtggttaggagcacagtcaaaaatctacaattagcttttggctccctaaaaacttaactaccaatagcctactattgactgaaagccttatggtaacataaagcgttgattcacacgtattgtatctaagtattatatactgtattcttacaatagtgtagtctagaa

SEQ ID NO: 59980 - DNA, 644 bp, Homo sapiens
atgggcctcgtggcacgggacgtttcaagtcctggcgtccccgcgagcaagcagcctgatcaggcctcgcagtgggacgttgggaagccggtgttggcagatgctgtggctgggaggagtccagagcgttcgccctgtccccgcggggctgagccacaactgcttaggagttttgggcaggatcgatggatgcaggaagcagtaggagtttggagaatctgcagtcactaatggcagatgctatggacacccttgaaggaagaagaaacaataatgaacgtgtgtggaatatgatccaaaaggttggacaaattgaagattttctataccaattagaggacagtttcttaaaaactaaaaaactgagaactgctcgaaggcaaaaaacaaaaatgaagcgacttcaaactgttcagcaaaggtagtcattagggagcaggcactaccactaagatatcccagaagaagaggcaagggcatccactccaatgcccacctagtactgtgaagctggataacaaaagcttgtcaccaaaagaaagaggtggtattcccctcagttcatctttaccaaagacactctatgtttcattaatctcaactggcagcaataaatattctcagcaagttggacttgaaatgtg

SEQ ID NO: 59981 - DNA, 225 bp, Homo sapiens
tgaagagattttgggcagaacagaggcagaaccaggttctaacagcaggaaagagaaattgaggggcaggagagcagtgagggaagacattttggagaggccaggacccggcaggcaacatgcagggttgcagggcggcagcgtgggtgtattgaaaagccttgactccttctttcttctaacaccttttattttgaagtctttaccactggcagctcagcgtac

SEQ ID NO: 59982 - DNA, 339 bp, Homo sapiens
ataacgaagactcttgagtattgaagatgaatatttattggggaaaaatgcaatgggaaataaagaaatcagaagattggagatgcttgacaaactactggaaattttattcccaagtaatttatttcttatttgtatcaatttgataaatattatgtaagttacgattatgttgaattgcaaataacaagagcaggtgtttatttttttttacataataacaagtccagaggtgtgtttagatgactgtgcaatgctaggccactggttctgatgttcttggcttcttccttatggtcacaagatggctgcttcagtaccagttcttatatctgcatt

SEQ ID NO: 59983 - DNA, 936 bp, Homo sapiens
tgctgggattacaggcatgagccattgcgcccggcaatgattatattttctaaactaaaagtctaaagctcatgattttacaatagatattttctgtttggtaagttttagtgtattaaaaatatcttttaaattttgataaatctagtacagaaatacatgatttttttacaacttgaactatagaagtatataacgtagacataaatcccttaaaatcctaacaatcgaaagcctaaagctcatgattttataacagatattttctgtttgggaagttttagtgtataaaaaaatcttttatatttttatagatctagtacagaaatacatgatctttattagaagtatataatgtggacattgaaaatcccttaaagtcctaacataaccaatatctataaatggcttgttgtgctgacatcatattataggatatcatggtcagacttgttttaacgctgtttcttttccatttaataatgtttgaacaatctttacagttcttggaaattttgacaaagatttaaaccacgttattggtacctttaataaatggtatttatgagaaataataacttacaggtgatcaggaccatatgagaaaacccagttttcttgatgctctaattaaataccagaaggtggccaggcacggtagctcacatctgtaatcccagcactttgggaggccaaggcaggcagatcacttgaagtcaggagtttgagaccagcctgcccaacatggtgaaaccgcatctctcttaaaaatacaaatacttagccaggcgttgtggcatgtgcctgtaatcccagttactcaggaggctgaggcaggagaattgcttgaatccgggaggtggagattgcagtgagctgagagggagccattgcactccagccttggtgacagtgagacttcatctcaaagataaa

SEQ ID NO: 59984 - DNA, 291 bp, Homo sapiens
ctttccaaccctttccaaatgttttttcaatcccttgagtgtctaggcttcctgcttttaaggcctcccttctaacccagggttgccccattcaccttaaaacatttttcaataacccagaaaaaaccaggctgaacatacccaagctccggaaccagcaaatcttgttcgaaccccgctgatgactcccaggggaagccaagaggacaaagacaaggatgaggacgaggacccaggacccgctggtgaatggcaactgctgtcaactcactttcaacctcagccagttgt

SEQ ID NO: 59985 - DNA, 468 bp, Homo sapiens
gtctgttattggtgtataagaacgcttgtgatttttgtacattgattttgtatcctgagactttgctgaagttgcttatcagcttaaggagattttgggctgagactatggggttttctagatatacaatcatgtcgtctgcaaacagggacaatttgacttcctcttttcctaattgaataccctttatttccttctcctgcttaattgccctggccagaacttccaactttcaaataaaattgtaagggttttgtaacacaatccaaagctaatgcaaaatgagaccttgaccaaatttgttttatacattaagtgaacttggatgggcaagattcattaatttattgagaacaaaaacaaaaccaaagcctaggcttggcaagatctaatcccaacactttggtaggtcaaagcgggagaatctcttgagcccaggagttcaagaccagccttagcaacatagag

SEQ ID NO: 59986 - DNA, 378 bp, Homo sapiens
tcagaatgaagccaacctcttagcctccagttttctcatttatttctcagctcaatttatgcatggaaaagggatgctaactattggggagggcacgctcagaggttaaaaaaaagaattaggaaggcattttagggttggaagatactctagaatcctgatctacacgtctgagatgaagaaactgaaacccagacaaggaccccaacctgtgtaaggttcagaacaagacttcctaacccccctccactctgccgcagaattgcaggtggcaagatgtggctttacacgtctttaaaaaacccaaataatcagaatttttttaaaaaaacagacagactaataaacaaataaagattcccagcctgaacagttacg

SEQ ID NO: 59987 - DNA, 553 bp, Homo sapiens
ctggcatagctatactaatattggacaaagtatactttaaagcaagaagcagttctagagcaaaagatggatattttgtgatgtaaagtgtttgatttaccagggaaataaaacaacaattctaaatgtatatgtaccaagtaaaattcgcagaactagtaggtgacagacaaatccacaatcataatgagagactttaattcaccttttagtggtagaaaagtacatacaaatatgcaaaattagtaatgatatagaaaatttaagcaacaaaataaacaactgatactaattgacataaatgatatacccaataaatgcggaatacgtattattttcaagtatgcatggaacatttaagaaagttgaccatatcataaatgaaaaagtaaatttcaacctatttcaaaggtttaaatcatacagagtaggatctacaaatttattatctaaatatctatatcagaataccatttgacccagccatcccattactgggtatatacccaaaggactataaatcatgctgctataaagacacatgcacgcgtat

SEQ ID NO: 59988 - DNA, 480 bp, Homo sapiens
tctcagtcctcagcacttccgcatccattatttctcttaatgaattaatatctgtgaggcgtgtgttataaataatattccctaactggatttaaaaggggagcttcctgggaatttcaggctctttaaggagtgtggcccttgtcaccctggggaccagggccactgcggccagaggtgtcagccagggtgaggacctcttccttttctttgagagcaggactaaattaacaagctgaagccagcttaccttggatgtggatcattctggcagtgttcaactttgagacaaggaagtgtgtgacattattgtcagcggagagaggccccaggcagaaggtcacttcctgaggtgtctggggagcactgcggcaagagacccccatttcccagcaaatgcttccttactcaatctttcggctacctggactttactaccacatctacagagccatcattggcttctaatgatgagcctga

SEQ ID NO: 59989 - DNA, 370 bp, Homo sapiens
atttcattattcggcatgtggacatccagttttaccaacatcatttattgaagaggctgtcctgtccctattgtgtgttcttcaaggcctgtttatttttaatgatgccattaactggggcacgcaatggagtaattctgaggccatttatttcctctcttaaagagaatctgcaaatggtcctagggattttttaaatgtgataaaataatagctaataatagctccaatttatagagtgcttactatgtgctaggcactgtgggaagcattttatgatcattgtcttatttaattgcagactgatggcatgcagacaaatctggcctgtaggctggaactgtgttttcaaaagataaatttgaatgac

SEQ ID NO: 59990 - DNA, 217 bp, Homo sapiens
cccggcctaagagttccggaaagttggagcggatgaatcagactatcaaaaatagtactattatcttccccgctggatatttaaaacaacaccacaagcaaggggcctcaaagcacctgctaaatttgagggaatgttatcctctcccccccctcccctgaccctggatattagagacaataacacaggggtaatgtacacccactgctttattggg

SEQ ID NO: 59991 - DNA, 583 bp, Homo sapiens
agacatttaatactataaaccaggggtcctcaacccccaggcctcggaccggtacctgtccatggctcgctaggaaccaggccaaacagcaggagtgagtggtggacgggtgagcattaccacctgagctcttcctcctgtcagatcagcagcagcattagattctcataggagcacaaaccctattgtgaactgtgcttacgaaggatctaggttgcacgttccttatgataatctaatgcctaataatctgagatggaacagtttcatcccaaaaccatccctaccgacatctgcagtcagtggaaaaattgtcttccacaaaaccagtacatgatgccaaaaaggttggggaccaccactataaacttccctcttagcactgcttttgctatatcccataggtttttaaagtatgtcgtgtttaattttcatttgtttcagcaatttttaaatttccatcttaatctctttgttgacccaggagcatattgtttaatttccatgtatgtatagtttccagagttgctcttggtatttatttatgattttattccactgtggtttgagaagatacttaata

SEQ ID NO: 59992 - DNA, 372 bp, Homo sapiens
caaggctggagggcagtggtgcagtcttggctcactgcaaactccgtcccccgagctcaagcaattttcatgcctcagcctcctgagtagctgggattacagaagcccaccaccacatccagctaatttttgtacttttagtagagacggccaggctggtctcaaactgctgacctcaggtgatccacccgcctcggcctcccagagtgcttggattacagtcatgagccaccactcccagcccctgatggtcttttggtttctgaacttttcaaggaatgcattttatacaactgtacccaaaattactatttatagatatcttaaacattgtagaatctcacaaaaacactagaatgctttcgaaccctt

SEQ ID NO: 59993 - DNA, 403 bp, Homo sapiens
gggaggcagaagttgcagtgagcccagattacaccactgcactccagctggtgacagagtgagactcttgtctcaaaaaaaatgaataagtaaataaaacataaaaataatatatataaaagtaaggtagcgatttcatttacatctctgtatctgcatgcaatacctagctcagtaatttacatatagtaggtgcttgataagtgtttattacattgaaatttgtaaaaagtgtttcataagaaatgtattgcataagaaatttaatgctgaggtaagccaatggcccatgcaatcttgtgtactgaaaaaataggttaattactcaccaagatgttaatctaaaaaagttcaatattaagtagttttttatttgtgtattggcaattcgttcaaaattacc

SEQ ID NO: 59994 - DNA, 780 bp, Homo sapiens
  misc_feature (394)..(394): n is a, c, g, or t
atagcattaggagatatacctaatgtaaatgactagttaacgggtgcagcacaccaacatggcacatgtatcatatgtaacctgcatgttgtgcacatgtaccctagaacttaaagtataataaacaaaaaaagtgggtgggcatttatgtgtatatgtgttcatgagcatgtacctatggtgtattgtttttagacctcttaaattgataagactcagagacagaatatctaagaagatgaaatgtaactggaattaaaagaaagatccaagccaaaattcttgaaattattttgtttgaaggtagtagttgaagtcatgtcttcaaagaagttggtatttaaaaagaaaagtcgatgcccagtactttatctttgggtaccttcatagcctngagataaaagctagcagagaattcaactacattatctgacaatgaccatgagccccaaatatcccccgggggcttagagcctcccagtgaaaaacatttccgcgaaacagaagtctgaaaaggtcagggcccagactaaggctctgacgtctccccccagaggacagctcagcaccggctcaggctaggccctgacgtgtccccctgaagacaaatcataagctcagacctccgggaagccaccggaaccacccatttcctccccatgtttgtcaagccgccctcaggcgttgacgacaacccctcacctcaaaaaacttttcatggcacgcatatggctgaataaactaacaggagtctataaaagcgtggagacagttcaggag

SEQ ID NO: 59995 - DNA, 413 bp, Homo sapiens
gcagaggagtgtatggttctgttagctagctatgtgttgtgtcattttcctgttgaggcttgcgtgaggagccatgcagcactcttaccacagacacttggagaaccactggatagacagactggaatgacactgcctcgacccactgtagagccttctcttgcttcaggcaccattcagaagtagcagccttacaagttacttggtgtaaccggatcagagcagagcatccacttgtggtttgtgttgcctacaaaatctaaagaggccgaggactggcacaataatcctgaacttggaaaacaaagactgcataacattacctattgatatagcggccagatgtgactttggttgttttcccttcatatgtggttgtatacaaaatagtacattttgttaagtaggaaaaa

SEQ ID NO: 59996 - DNA, 357 bp, Homo sapiens
tccccttcttatataagaggtagtgtagcatatactctttaaagcatcttattatttttaaaaattaactaaagtccagctggatgtggtgctctcgcctgtattggggactgaggcgagtggatcacctgaggtcaggagttcaagaccagcctggccaacatggtaaaaccctgtctgtgctaaaaatataaaaattacccgggtgtggtggtgcatgcctgtaatcccagctactcgggaggctaaggcaggagaatcgcttcaactcaggtggtggaggttgcagcgagcctagatcacaccaccgcactccagcctgggcgacagagtgggactccgtctcaaaaaaaaaaa

SEQ ID NO: 59997 - DNA, 270 bp, Homo sapiens
attcctacacattgatgcattataccttccaaatacacagttcaactttaccgatattttcaatttaggacattaaggcactattttaaaacctatatgtttattaaatagtattatgaagaaatagttttaaaatcctgagttttttctctttttaaaaagagcagggataatgaattatcagaatggtcaatctggaaaaatatgttctaggatatgtaataaatgctaaatgttacctatattgatttgcagaactgttctattggc

SEQ ID NO: 59998 - DNA, 336 bp, Homo sapiens
caggcaaagctcctaccatgcagttggggatgatgctcagttcgagatggacatctgactctcctgcaaggattagaagaaaagcagcaacactgatacttgtgtgcacctgatttggccaataggatcaacagtgaaaagacagaagaggcaataccagcagtccccattacagtctccacctccccgtcttcctctgggtgccaaatgatgggaagatgagcttcatctgaccatttcttctccctgtctcctgttccccttcccagttaaacaggttagattgaaggcccttgctgtatttctgtagagctttgcctggtaatcctctgcgca

SEQ ID NO: 59999 - DNA, 182 bp, Homo sapiens
gcggccgcctactactactactgctcgaattcaagcttctaacgatgtacggggacatgatcagttgtttttgtattttaactattcttccaaaccagcagatgtttggaaattaaggaaaaaattaaattctcatcaatggttgctgttatagttaaatcagtaaagatcttgagtatcaa

SEQ ID NO: 60000 - DNA, 7538 bp, Homo sapiens
ggccgaccagcttccccaactccctctggctcccgccttcgcccgcttccggtcgtcgtcgtcgccgctgctgccgctgctgttgctcctgaggctgctggctgaggccggaggatcgagcggcggcggcggcggcggctgagagggcggcggcgggagcggagcgggacgagggaacgggaggaagcgagcgaggagcgcgcagagcgcgcttttccgtccgcctgaggagccgaagcagccccggccccgccgccgccgcctgcccgccggacaaagccgagagcccgcgcccacagccatgtcctcgtcagccggcagcggccaccagcccagccagagccgcgccatccccacccgcaccgtggccatcagcgacgccgcgcagctacctcatgactattgcaccacgcccggggggacgctcttctccaccacaccgggaggaactcgaatcatttatgacagaaagtttctgttggatcgtcgcaattctcccatggctcagaccccaccctgccacctgcccaatatcccaggagtcactagccctggcaccttaattgaagactccaaagtagaagtaaacaatttgaacaacttgaacaatcacgacaggaaacatgcagttggggatgatgctcagttcgagatggacatctgactctcctgcaaggattagaagaaaagcagcaacactgatacttgtgtgcacctgatttggccaataggatcaacagtgaaaagacagaagaggcaataccagcagtccccattacagtctccacctccccgtcttcctctgggtgccaaatgatgggaagatgagcttcatctgaccatttcttctccctgtctcctgttccccttcccagttaaacaggttagattgaaggcccttgctgtatttctgtagagctaagcagcccttagaggaaaacagttcaactctgactttcctagttgtttttttattgagagccaccctcataccctgtaattttgtcccaaatcaaatatcaacctaccaacaactgcctggctgggaagtctggggaagggatacagagcttggtgggcctaacaccattcatattccttaccctctgtctctcctccctgtatcccacctatggttcagtgttgcaagagtctgggcttggggtctttaaaaccagcagggggaaatgataaaaagagagctgctttcccttttaccttgaggtattcgtccctcgggacagagcacagcttgtgcaactctggtagcgttaccctgtgacactgttttgaggtccacttcctttctttcctctgggaggaatgtcttctgtctttggtattatagttcatcttcccattcttttacttagtgcatttgtgcagatatttttaactctgtacatcagaagagagcccttggtaaccagttttgctcttcttctgccactcctccctgcttgcatctcgttgctggcagagtcctcttgtacttcaagaaagcaaagtgattttgtctgctcctagagcaggtccataccaagtaatagaggcactttagcttccacttggtgggtaaggcctgatcatagtattctgtcagataatgcctaagaatgaccgctgaagaacgttgacccatttgagtacccggtctcagtcgtcatttttaagtccagtgagcattgtggtagttgttcttagattgcagtttcttatgttttgagtttgaagttgattttcagaatgttcttagaaaagaactgcatttttttcctttgtggatctgctttgtttggctgctgggatagataagcatgggcttaaaaaatgtgttcctcccagttttcttgcctttcctgttgtactctgaatttctctccctacctccctcactttcttcctctctccttcctttccttcctttttctctaccaggccatttttcaaatttacatcaaagatacctgaagtgttggtatctgagaatatctgtcactcctcttatctgagaagtgaccttttatttttaagatgactacagacctatttttagatatgttttcagtacaattttgaacagcaactttttaattaaacatcttccagtgttaggaagttgagaaacgttcataggcaagtctgctgttctatgtcaccatcttttgtctcccctagtcccccaggagctctttcctttcccctctagttttgggtgtgcatgtttggagtttgtagtgggtggtttgtaaaactggaccattctgccttgctatgggttgttcaagaaagcctcattcttttctgtgaccctttcgcttttgcattcaccctccttcccacctacctgtcctggggctgttgagcagcataataatcccgggagaatgattcccctcatagaaagacaaaagcatccatcccctcatagttaagtagccactggtgtcctgggaatttctggttggatttggtgccctgaacttttttattaagaaatcagatcccagggtgagagtaacaggccatttggccaagaaagaaacctgtttgtttttcttttgaactatgaaaagaccctgtttgtgaatatattttagaaagagaggaaggatgtctgcagaactttgttctgttttctgccacaaaaatgtgaatagttcagagtgaaaaccttttgtgatggttgatgtctcaggaataagctggatctccaatgttttggggatgctttgagtctcaaaaaaaattgataatcagaaaagtaatttttgtttgtttgtttaatgtatccctgttctgtttttaattaaactccaagtctcattttacatattcttggaaaaacctaagttgcgctgtaatttacataagaagcatgctcaggacctctttgtaccccggggagcctgattctttgggaatgaagcttttcattcttcatacactggccttggcatcctgtggaatttgacccaactagcagctagtcagtctgtcagtgagcagaagagtgaactcttcttgatctttattgctatgtgtgaaaacttggcttcctcactgaacggtgaggaatggatttaaagcatgagctttagtagtatcaagatgccattttcctttttcttgctgtcttggggagcttctgcatgtgaccccctaatcagaaggcatgtttttagtatttcttgggagtgtcagctgtataatgcagcagctgttcaatcccttacccttctctgcaaggacttccttacagcttggtgcagttctttcccagaggccaccactactagacagtctttcttttatcttatggagataaattggcatttaaaaaataatttcacaaggcatgagataaactttcaatagatgatacctttgtgtcatgcctcatggaattatttttagaacaagccagagtccattgagtggtttacctctgcatgtttggagggaacctcacagatgaaacccttaatgaataatgtgtccggggttttttagagagaaggagcactcttaagttaccactttgagacagctcttaacatcttagtgaccatttgtagttttctttttatgaggaacccatgcttctatacttgggcggacaatcgagcttaatgagaagtgacttcccttcaaattccaacagcagacatgcattgtcatgattctgtcttctttttagtgtggtttattgagttcagcagttctcatattctgtttaaataggtacagcattttcaagggcacagatacagagaagctggctttctaggtattgggcttccaagccaagagttttgtccttccacctgtattagttatctattgctgtgtaaaaaattaccctaaatttagtatgttaaaatagtaaacattatctgtcagtttctgtgggttaagaatttgggagtagtttaacatgatggttctggcccatggtatcatgaagttacagtcaagattgaacaggggctgcagtcagctggagctggagaaaccacttccaagttctctctttgtggccgttggcaggatgcctcagtttcttcccatgtgggtctctgcgtagggcagcatgagtgtcctcacaccatgacacctggcttctccctgagcagctgattccagagatcatggggcagggccaggagaaagctgcagtgccttttaagacatagtcttggaaaggacacaccgtcacttcttatcctagttgttagaagcaagccactaagttcagcctgcactcaaggagagaggaattacacatacctctaccccaatggagcagtagcaaagaatttatggacatatcttaaaagcaccacaccccaactggggatgaaagtaggtcaacagggaggtaggtttaatctagataagctgaaagatagattgctatcaaaaacagttctccaagatgtgcatagccaaactgggatagaaggcaaactccccaaagctacctgctggttttgagaggggtggtaagacatggcaattcccaggagtagtagaaaataatatgcctgactaccaacagctcaagtatgcttatttgcacatcctagacttggtgtctgtaagactcagttaccacttttattttcctgtagctaggagttagcaaaaggaactggggccttccagccgagccactaaacctgtcttatttggaatggggattgtccagcaaagggagcaaacatgaattagatgttaagctattgagctgaagaaaagaaagcagttcacatttaggtgaaatagatgatgttatcaggaagccaggttcccaccagagtcggtgcttggtacctggtctctccagtctcaacagactcaggtcaggtctctcacccaggaagcaaccactcaataaaatagagaacatctgagaattacaaatgtctatgcttgattgctcctctaaatccagtgcataggttaaccctgcatgcccatttcttcctgggcttcttgatggcaatgtgttcttaaataactggtcttgtgttcatgctaaagacaaacttacatgaagtttttcagtttaagacattctagtgaatggctgctatgtgtttctggcactcattcctaaccaagtctttagagatttcagatgaccttaaagatgcaatatctttttctttctttctttctttctttttttctgagacaagagttgcgccctgtcgcccaggctggggtgctggagtgcagtggtgcgatctcagctcactgcagcctctgcttcccaggttcaagtgtttctcctgcctcagccttccgagtagctgggattacaggcatgtaccactatgcctggctaatttttatttctatatttttagtagagatggggtttcatcatgtttgccaggctggtctcgaactcctggcctcaagtgatccgcccacctcagcctcccaaagtgctgggattacaggcgcgagcgaccgcgcctggccaaagatgcaaattcttgtttggatttatgctctgcctcttcccagcattttcttatctgtagccctgcttgcttgagagtatacttggataagaagtattgctgttgagggagctataagaaaaggattcttcttccagaagtaaagaagctcactcctttagagtacctttaaatgaatttggtttttctttcttattttgaggtggattggtcttctctttttttgggtttccagctcactgggactctcagaccttacctttccagctcaaacaccattagttaaattccttcattctcattagaatgcagcctgctgagtatgtgggtttcactgccggagtccatcatttagccagtatacatagaggaactgcttcgaatcaaggcaactggtgaagggcttagcatgttggcagcaatatcccagagattgaatctgtttgcattttcctcatctaggataacagctgcttgaagccagggctcttagccctttgcattccccttgagcgaggaagccacactgcctttctgtgtctggttcagagctcttccttcttggcatgttttctggactacatgcacatgggcagctatagattaatctgcaaaacctagtcacttacctacccataatatctgggaaggtgtggtatttgttttaaagaaacattgtttctttgggagggcagtttctgtctggactttgaggtggacttagttatccctacagttctttaactctcagcttttaataaaagatgaaatcagatattgatgcagttgggtcacaattctttagaatgcttctaccccagggccgcttcctgttcctagtcatggttttccagtttagtagtggagtttcttgaggctaacttacagaaatttctaactgaaaactttaagagttattgatacttgttttttcagtcagtcacttacatcacctagcctactctctggaatttaaatttatttctctaggctggtcctggaagttgataaccttttggcaaagcttagatttaggagaaggcttgagtccctgttcagcgggtctgtggattctctttgcttatggctctctgcctgcagccctggcagaccatactgtatgtcatggatacccagtggaaatattactgagatgaaacacatttccaagggtatttaaactctcactctgccacctttctaagggtgggaggctggcagagatgctgcaatgcttgataatcatttggccacactgaaatttccaaagggagctcttgccggtgcttaaaaccaaaactcctggacacttagaaaattccatgaatctagcacaaaatatccattcttgcccaagtgtatcccctttctctccagcttaatcttttttttttttttttttttaaagcccaggccaagggtacttttaactggaaactggggaggagggaagaacactagcagggagctaagaggcaggttgctgggtaagccatcctgctcctacctggtgcctgtatctacattgctgagtgctgtgcgccagtgcctttccttcatctgcagatggagcccatctctttccacctgggtgaggagaccctctgctactccaggggtaaaccttaaagaaggtgtcttgaagagcccaaaggacactcacgtgctaaggtgtccattttatgcatctttaaaatattttatttaaaaaaaaaaatagccctgccctgtcttagtgccactaacggcccagttccatccattctgaatggaaaagcggagactgccagcactttccttggtcttccctttgtctcccatgatgtgttgttccctcatccctcccatccatttcactgtgtgtggatggatagcagagggtaccacgcagtccttgaggcagtcctgtgtgattccatgatcagttgtttttgtattttaactattcttccaaaccagcagatgtttggaaattaaggaaaaaattaaattctcatcaatggttgctgttatagttaaatcagtaaagatcttgagtatcaa

SEQ ID NO: 60001 - DNA, 7828 bp, Homo sapiens
ggccgaccagcttccccaactccctctggctcccgccttcgcccgcttccggtcgtcgtcgtcgccgctgctgccgctgctgttgctcctgaggctgctggctgaggccggaggatcgagcggcggcggcggcggcggctgagagggcggcggcgggagcggagcgggacgagggaacgggaggaagcgagcgaggagcgcgcagagcgcgcttttccgtccgcctgaggagccgaagcagccccggccccgccgccgccgcctgcccgccggacaaagccgagagcccgcgcccacagccatgtcctcgtcagccggcagcggccaccagcccagccagagccgcgccatccccacccgcaccgtggccatcagcgacgccgcgcagctacctcatgactattgcaccacgcccggggggacgctcttctccaccacaccgggaggaactcgaatcatttatgacagaaagtttctgttggatcgtcgcaattctcccatggctcagaccccaccctgccacctgcccaatatcccaggagtcactagccctggcaccttaattgaagactccaaagtagaagtaaacaatttgaacaacttgaacaatcacgacaggaaacatgcagttggggatgatgctcagttcgagatggacatctgactctcctgcaaggattagaagaaaagcagcaacactgatacttgtgtgcacctgatttggccaataggatcaacagtgaaaagacagaagaggcaataccagcagtccccattacagtctccacctccccgtcttcctctgggtgccaaatgatgggaagatgagcttcatctgaccatttcttctccctgtctcctgttccccttcccagttaaacaggttagattgaaggcccttgctgtatttctgtagagctaagcagcccttagaggaaaacagttcaactctgactttcctagttgtttttttattgagagccaccctcataccctgtaattttgtcccaaatcaaatatcaacctaccaacaactgcctggctgggaagtctggggaagggatacagagcttggtgggcctaacaccattcatattccttaccctctgtctctcctccctgtatcccacctatggttcagtgttgcaagagtctgggcttggggtctttaaaaccagcagggggaaatgataaaaagagagctgctttcccttttaccttgaggtattcgtccctcgggacagagcacagcttgtgcaactctggtagcgttaccctgtgacactgttttgaggtccacttcctttctttcctctgggaggaatgtcttctgtctttggtattatagttcatcttcccattcttttacttagtgcatttgtgcagatatttttaactctgtacatcagaagagagcccttggtaaccagttttgctcttcttctgccactcctccctgcttgcatctcgttgctggcagagtcctcttgtacttcaagaaagcaaagtgattttgtctgctcctagagcaggtccataccaagtaatagaggcactttagcttccacttggtgggtaaggcctgatcatagtattctgtcagataatgcctaagaatgaccgctgaagaacgttgacccatttgagtacccggtctcagtcgtcatttttaagtccagtgagcattgtggtagttgttcttagattgcagtttcttatgttttgagtttgaagttgattttcagaatgttcttagaaaagaactgcatttttttcctttgtggatctgctttgtttggctgctgggatagataagcatgggcttaaaaaatgtgttcctcccagttttcttgcctttcctgttgtactctgaatttctctccctacctccctcactttcttcctctctccttcctttccttcctttttctctaccaggccatttttcaaatttacatcaaagatacctgaagtgttggtatctgagaatatctgtcactcctcttatctgagaagtgaccttttatttttaagatgactacagacctatttttagatatgttttcagtacaattttgaacagcaactttttaattaaacatcttccagtgttaggaagttgagaaacgttcataggcaagtctgctgttctatgtcaccatcttttgtctcccctagtcccccaggagctctttcctttcccctctagttttgggtgtgcatgtttggagtttgtagtgggtggtttgtaaaactggaccattctgccttgctatgggttgttcaagaaagcctcattcttttctgtgaccctttcgcttttgcattcaccctccttcccacctacctgtcctggggctgttgagcagcataataatcccgggagaatgattcccctcatagaaagacaaaagcatccatcccctcatagttaagtagccactggtgtcctgggaatttctggttggatttggtgccctgaacttttttattaagaaatcagatcccagggtgagagtaacaggccatttggccaagaaagaaacctgtttgtttttcttttgaactatgaaaagaccctgtttgtgaatatattttagaaagagaggaaggatgtctgcagaactttgttctgttttctgccacaaaaatgtgaatagttcagagtgaaaaccttttgtgatggttgatgtctcaggaataagctggatctccaatgttttggggatgctttgagtctcaaaaaaaattgataatcagaaaagtaatttttgtttgtttgtttaatgtatccctgttctgtttttaattaaactccaagtctcattttacatattcttggaaaaacctaagttgcgctgtaatttacataagaagcatgctcaggacctctttgtaccccggggagcctgattctttgggaatgaagcttttcattcttcatacactggccttggcatcctgtggaatttgacccaactagcagctagtcagtctgtcagtgagcagaagagtgaactcttcttgatctttattgctatgtgtgaaaacttggcttcctcactgaacggtgaggaatggatttaaagcatgagctttagtagtatcaagatgccattttcctttttcttgctgtcttggggagcttctgcatgtgaccccctaatcagaaggcatgtttttagtatttcttgggagtgtcagctgtataatgcagcagctgttcaatcccttacccttctctgcaaggacttccttacagcttggtgcagttctttcccagaggccaccactactagacagtctttcttttatcttatggagataaattggcatttaaaaaataatttcacaaggcatgagataaactttcaatagatgatacctttgtgtcatgcctcatggaattatttttagaacaagccagagtccattgagtggtttacctctgcatgtttggagggaacctcacagatgaaacccttaatgaataatgtgtccggggttttttagagagaaggagcactcttaagttaccactttgagacagctcttaacatcttagtgaccatttgtagttttctttttatgaggaacccatgcttctatacttgggcggacaatcgagcttaatgagaagtgacttcccttcaaattccaacagcagacatgcattgtcatgattctgtcttctttttagtgtggtttattgagttcagcagttctcatattctgtttaaataggtacagcattttcaagggcacagatacagagaagctggctttctaggtattgggcttccaagccaagagttttgtccttccacctgtattagttatctattgctgtgtaaaaaattaccctaaatttagtatgttaaaatagtaaacattatctgtcagtttctgtgggttaagaatttgggagtagtttaacatgatggttctggcccatggtatcatgaagttacagtcaagattgaacaggggctgcagtcagctggagctggagaaaccacttccaagttctctctttgtggccgttggcaggatgcctcagtttcttcccatgtgggtctctgcgtagggcagcatgagtgtcctcacaccatgacacctggcttctccctgagcagctgattccagagatcatggggcagggccaggagaaagctgcagtgccttttaagacatagtcttggaaaggacacaccgtcacttcttatcctagttgttagaagcaagccactaagttcagcctgcactcaaggagagaggaattacacatacctctaccccaatggagcagtagcaaagaatttatggacatatcttaaaagcaccacaccccaactggggatgaaagtaggtcaacagggaggtaggtttaatctagataagctgaaagatagattgctatcaaaaacagttctccaagatgtgcatagccaaactgggatagaaggcaaactccccaaagctacctgctggttttgagaggggtggtaagacatggcaattcccaggagtagtagaaaataatatgcctgactaccaacagctcaagtatgcttatttgcacatcctagacttggtgtctgtaagactcagttaccacttttattttcctgtagctaggagttagcaaaaggaactggggccttccagccgagccactaaacctgtcttatttggaatggggattgtccagcaaagggagcaaacatgaattagatgttaagctattgagctgaagaaaagaaagcagttcacatttaggtgaaatagatgatgttatcaggaagccaggttcccaccagagtcggtgcttggtacctggtctctccagtctcaacagactcaggtcaggtctctcacccaggaagcaaccactcaataaaatagagaacatctgagaattacaaatgtctatgcttgattgctcctctaaatccagtgcataggttaaccctgcatgcccatttcttcctgggcttcttgatggcaatgtgttcttaaataactggtcttgtgttcatgctaaagacaaacttacatgaagtttttcagtttaagacattctagtgaatggctgctatgtgtttctggcactcattcctaaccaagtctttagagatttcagatgaccttaaagatgcaatatctttttctttctttctttctttctttttttctgagacaagagttgcgccctgtcgcccaggctggggtgctggagtgcagtggtgcgatctcagctcactgcagcctctgcttcccaggttcaagtgtttctcctgcctcagccttccgagtagctgggattacaggcatgtaccactatgcctggctaatttttatttctatatttttagtagagatggggtttcatcatgtttgccaggctggtctcgaactcctggcctcaagtgatccgcccacctcagcctcccaaagtgctgggattacaggcgcgagcgaccgcgcctggccaaagatgcaaattcttgtttggatttatgctctgcctcttcccagcattttcttatctgtagccctgcttgcttgagagtatacttggataagaagtattgctgttgagggagctataagaaaaggattcttcttccagaagtaaagaagctcactcctttagagtacctttaaatgaatttggtttttctttcttattttgaggtggattggtcttctctttttttgggtttccagctcactgggactctcagaccttacctttccagctcaaacaccattagttaaattccttcattctcattagaatgcagcctgctgagtatgtgggtttcactgccggagtccatcatttagccagtatacatagaggaactgcttcgaatcaaggcaactggtgaagggcttagcatgttggcagcaatatcccagagattgaatctgtttgcattttcctcatctaggataacagctgcttgaagccagggctcttagccctttgcattccccttgagcgaggaagccacactgcctttctgtgtctggttcagagctcttccttcttggcatgttttctggactacatgcacatgggcagctatagattaatctgcaaaacctagtcacttacctacccataatatctgggaaggtgtggtatttgttttaaagaaacattgtttctttgggagggcagtttctgtctggactttgaggtggacttagttatccctacagttctttaactctcagcttttaataaaagatgaaatcagatattgatgcagttgggtcacaattctttagaatgcttctaccccagggccgcttcctgttcctagtcatggttttccagtttagtagtggagtttcttgaggctaacttacagaaatttctaactgaaaactttaagagttattgatacttgttttttcagtcagtcacttacatcacctagcctactctctggaatttaaatttatttctctaggctggtcctggaagttgataaccttttggcaaagcttagatttaggagaaggcttgagtccctgttcagcgggtctgtggattctctttgcttatggctctctgcctgcagccctggcagaccatactgtatgtcatggatacccagtggaaatattactgagatgaaacacatttccaagggtatttaaactctcactctgccacctttctaagggtgggaggctggcagagatgctgcaatgcttgataatcatttggccacactgaaatttccaaagggagctcttgccggtgcttaaaaccaaaactcctggacacttagaaaattccatgaatctagcacaaaatatccattcttgcccaagtgtatcccctttctctccagcttaatcttttttttttttttttttttaaagcccaggccaagggtacttttaactggaaactggggaggagggaagaacactagcagggagctaagaggcaggttgctgggtaagccatcctgctcctacctggtgcctgtatctacattgctgagtgctgtgcgccagtgcctttccttcatctgcagatggagcccatctctttccacctgggtgaggagaccctctgctactccaggggtaaaccttaaagaaggtgtcttgaagagcccaaaggacactcacgtgctaaggtgtccattttatgcatctttaaaatattttatttaaaaaaaaaaatagccctgccctgtcttagtgccactaacggcccagttccatccattctgaatggaaaagcggagactgccagcactttccttggtcttccctttgtctcccatgatgtgttgttccctcatccctcccatccatttcactgtgtgtggatggatagcagagggtaccacgcagtccttgaggcagtcctgtgtgattccatgatcagttgtttttgtattttaactattcttccaaaccagcagatgtttggaaattaaggaaaaaattaaattctcatcaatggttgctgttatagttaaatcagtaaagatcttgagtatcaaaaaaaaaaaaaaaaaaaaaaaaaaaaaaaaactttggggggggcttgggccccggaaaaagtttctctaaaccatcggtgggggccgggggcccaggtgggcacgcgtgaccgtgggcacaaagcgtgtcccgaggaagaacccgggccagagacaggggggcgggatttcccccccaagaaaaaagccccgggggggaacccccaggctcttggaacaatcccaaggggaggccggaggcacaaagggatgcctaccacaggggcccccagggaatccgaattaaatac

SEQ ID NO: 60002 - DNA, 7590 bp, Homo sapiens
ggccgaccagcttccccaactccctctggctcccgccttcgcccgcttccggtcgtcgtcgtcgccgctgctgccgctgctgttgctcctgaggctgctggctgaggccggaggatcgagcggcggcggcggcggcggctgagagggcggcggcgggagcggagcgggacgagggaacgggaggaagcgagcgaggagcgcgcagagcgcgcttttccgtccgcctgaggagccgaagcagccccggccccgccgccgccgcctgcccgccggacaaagccgagagcccgcgcccacagccatgtcctcgtcagccggcagcggccaccagcccagccagagccgcgccatccccacccgcaccgtggccatcagcgacgccgcgcagctacctcatgactattgcaccacgcccggggggacgctcttctccaccacaccgggaggaactcgaatcatttatgacagaaagtttctgttggatcgtcgcaattctcccatggctcagaccccaccctgccacctgcccaatatcccaggagtcactagccctggcaccttaattgaagactccaaagtagaagtaaacaatttgaacaacttgaacaatcacgacaggaaacatgcagttggggatgatgctcagttcgagatggacatctgactctcctgcaaggattagaagaaaagcagcaacactgatacttgtgtgcacctgatttggccaataggatcaacagtgaaaagacagaagaggcaataccagcagtccccattacagtctccacctccccgtcttcctctgggtgccaaatgatgggaagatgagcttcatctgaccatttcttctccctgtctcctgttccccttcccagttaaacaggttagattgaaggcccttgctgtatttctgtagagctaagcagcccttagaggaaaacagttcaactctgactttcctagttgtttttttattgagagccaccctcataccctgtaattttgtcccaaatcaaatatcaacctaccaacaactgcctggctgggaagtctggggaagggatacagagcttggtgggcctaacaccattcatattccttaccctctgtctctcctccctgtatcccacctatggttcagtgttgcaagagtctgggcttggggtctttaaaaccagcagggggaaatgataaaaagagagctgctttcccttttaccttgaggtattcgtccctcgggacagagcacagcttgtgcaactctggtagcgttaccctgtgacactgttttgaggtccacttcctttctttcctctgggaggaatgtcttctgtctttggtattatagttcatcttcccattcttttacttagtgcatttgtgcagatatttttaactctgtacatcagaagagagcccttggtaaccagttttgctcttcttctgccactcctccctgcttgcatctcgttgctggcagagtcctcttgtacttcaagaaagcaaagtgattttgtctgctcctagagcaggtccataccaagtaatagaggcactttagcttccacttggtgggtaaggcctgatcatagtattctgtcagataatgcctaagaatgaccgctgaagaacgttgacccatttgagtacccggtctcagtcgtcatttttaagtccagtgagcattgtggtagttgttcttagattgcagtttcttatgttttgagtttgaagttgattttcagaatgttcttagaaaagaactgcatttttttcctttgtggatctgctttgtttggctgctgggatagataagcatgggcttaaaaaatgtgttcctcccagttttcttgcctttcctgttgtactctgaatttctctccctacctccctcactttcttcctctctccttcctttccttcctttttctctaccaggccatttttcaaatttacatcaaagatacctgaagtgttggtatctgagaatatctgtcactcctcttatctgagaagtgaccttttatttttaagatgactacagacctatttttagatatgttttcagtacaattttgaacagcaactttttaattaaacatcttccagtgttaggaagttgagaaacgttcataggcaagtctgctgttctatgtcaccatcttttgtctcccctagtcccccaggagctctttcctttcccctctagttttgggtgtgcatgtttggagtttgtagtgggtggtttgtaaaactggaccattctgccttgctatgggttgttcaagaaagcctcattcttttctgtgaccctttcgcttttgcattcaccctccttcccacctacctgtcctggggctgttgagcagcataataatcccgggagaatgattcccctcatagaaagacaaaagcatccatcccctcatagttaagtagccactggtgtcctgggaatttctggttggatttggtgccctgaacttttttattaagaaatcagatcccagggtgagagtaacaggccatttggccaagaaagaaacctgtttgtttttcttttgaactatgaaaagaccctgtttgtgaatatattttagaaagagaggaaggatgtctgcagaactttgttctgttttctgccacaaaaatgtgaatagttcagagtgaaaaccttttgtgatggttgatgtctcaggaataagctggatctccaatgttttggggatgctttgagtctcaaaaaaaattgataatcagaaaagtaatttttgtttgtttgtttaatgtatccctgttctgtttttaattaaactccaagtctcattttacatattcttggaaaaacctaagttgcgctgtaatttacataagaagcatgctcaggacctctttgtaccccggggagcctgattctttgggaatgaagcttttcattcttcatacactggccttggcatcctgtggaatttgacccaactagcagctagtcagtctgtcagtgagcagaagagtgaactcttcttgatctttattgctatgtgtgaaaacttggcttcctcactgaacggtgaggaatggatttaaagcatgagctttagtagtatcaagatgccattttcctttttcttgctgtcttggggagcttctgcatgtgaccccctaatcagaaggcatgtttttagtatttcttgggagtgtcagctgtataatgcagcagctgttcaatcccttacccttctctgcaaggacttccttacagcttggtgcagttctttcccagaggccaccactactagacagtctttcttttatcttatggagataaattggcatttaaaaaataatttcacaaggcatgagataaactttcaatagatgatacctttgtgtcatgcctcatggaattatttttagaacaagccagagtccattgagtggtttacctctgcatgtttggagggaacctcacagatgaaacccttaatgaataatgtgtccggggttttttagagagaaggagcactcttaagttaccactttgagacagctcttaacatcttagtgaccatttgtagttttctttttatgaggaacccatgcttctatacttgggcggacaatcgagcttaatgagaagtgacttcccttcaaattccaacagcagacatgcattgtcatgattctgtcttctttttagtgtggtttattgagttcagcagttctcatattctgtttaaataggtacagcattttcaagggcacagatacagagaagctggctttctaggtattgggcttccaagccaagagttttgtccttccacctgtattagttatctattgctgtgtaaaaaattaccctaaatttagtatgttaaaatagtaaacattatctgtcagtttctgtgggttaagaatttgggagtagtttaacatgatggttctggcccatggtatcatgaagttacagtcaagattgaacaggggctgcagtcagctggagctggagaaaccacttccaagttctctctttgtggccgttggcaggatgcctcagtttcttcccatgtgggtctctgcgtagggcagcatgagtgtcctcacaccatgacacctggcttctccctgagcagctgattccagagatcatggggcagggccaggagaaagctgcagtgccttttaagacatagtcttggaaaggacacaccgtcacttcttatcctagttgttagaagcaagccactaagttcagcctgcactcaaggagagaggaattacacatacctctaccccaatggagcagtagcaaagaatttatggacatatcttaaaagcaccacaccccaactggggatgaaagtaggtcaacagggaggtaggtttaatctagataagctgaaagatagattgctatcaaaaacagttctccaagatgtgcatagccaaactgggatagaaggcaaactccccaaagctacctgctggttttgagaggggtggtaagacatggcaattcccaggagtagtagaaaataatatgcctgactaccaacagctcaagtatgcttatttgcacatcctagacttggtgtctgtaagactcagttaccacttttattttcctgtagctaggagttagcaaaaggaactggggccttccagccgagccactaaacctgtcttatttggaatggggattgtccagcaaagggagcaaacatgaattagatgttaagctattgagctgaagaaaagaaagcagttcacatttaggtgaaatagatgatgttatcaggaagccaggttcccaccagagtcggtgcttggtacctggtctctccagtctcaacagactcaggtcaggtctctcacccaggaagcaaccactcaataaaatagagaacatctgagaattacaaatgtctatgcttgattgctcctctaaatccagtgcataggttaaccctgcatgcccatttcttcctgggcttcttgatggcaatgtgttcttaaataactggtcttgtgttcatgctaaagacaaacttacatgaagtttttcagtttaagacattctagtgaatggctgctatgtgtttctggcactcattcctaaccaagtctttagagatttcagatgaccttaaagatgcaatatctttttctttctttctttctttctttttttctgagacaagagttgcgccctgtcgcccaggctggggtgctggagtgcagtggtgcgatctcagctcactgcagcctctgcttcccaggttcaagtgtttctcctgcctcagccttccgagtagctgggattacaggcatgtaccactatgcctggctaatttttatttctatatttttagtagagatggggtttcatcatgtttgccaggctggtctcgaactcctggcctcaagtgatccgcccacctcagcctcccaaagtgctgggattacaggcgcgagcgaccgcgcctggccaaagatgcaaattcttgtttggatttatgctctgcctcttcccagcattttcttatctgtagccctgcttgcttgagagtatacttggataagaagtattgctgttgagggagctataagaaaaggattcttcttccagaagtaaagaagctcactcctttagagtacctttaaatgaatttggtttttctttcttattttgaggtggattggtcttctctttttttgggtttccagctcactgggactctcagaccttacctttccagctcaaacaccattagttaaattccttcattctcattagaatgcagcctgctgagtatgtgggtttcactgccggagtccatcatttagccagtatacatagaggaactgcttcgaatcaaggcaactggtgaagggcttagcatgttggcagcaatatcccagagattgaatctgtttgcattttcctcatctaggataacagctgcttgaagccagggctcttagccctttgcattccccttgagcgaggaagccacactgcctttctgtgtctggttcagagctcttccttcttggcatgttttctggactacatgcacatgggcagctatagattaatctgcaaaacctagtcacttacctacccataatatctgggaaggtgtggtatttgttttaaagaaacattgtttctttgggagggcagtttctgtctggactttgaggtggacttagttatccctacagttctttaactctcagcttttaataaaagatgaaatcagatattgatgcagttgggtcacaattctttagaatgcttctaccccagggccgcttcctgttcctagtcatggttttccagtttagtagtggagtttcttgaggctaacttacagaaatttctaactgaaaactttaagagttattgatacttgttttttcagtcagtcacttacatcacctagcctactctctggaatttaaatttatttctctaggctggtcctggaagttgataaccttttggcaaagcttagatttaggagaaggcttgagtccctgttcagcgggtctgtggattctctttgcttatggctctctgcctgcagccctggcagaccatactgtatgtcatggatacccagtggaaatattactgagatgaaacacatttccaagggtatttaaactctcactctgccacctttctaagggtgggaggctggcagagatgctgcaatgcttgataatcatttggccacactgaaatttccaaagggagctcttgccggtgcttaaaaccaaaactcctggacacttagaaaattccatgaatctagcacaaaatatccattcttgcccaagtgtatcccctttctctccagcttaatcttttttttttttttttttttaaagcccaggccaagggtacttttaactggaaactggggaggagggaagaacactagcagggagctaagaggcaggttgctgggtaagccatcctgctcctacctggtgcctgtatctacattgctgagtgctgtgcgccagtgcctttccttcatctgcagatggagcccatctctttccacctgggtgaggagaccctctgctactccaggggtaaaccttaaagaaggtgtcttgaagagcccaaaggacactcacgtgctaaggtgtccattttatgcatctttaaaatattttatttaaaaaaaaaaatagccctgccctgtcttagtgccactaacggcccagttccatccattctgaatggaaaagcggagactgccagcactttccttggtcttccctttgtctcccatgatgtgttgttccctcatccctcccatccatttcactgtgtgtggatggatagcagagggtaccacgcagtccttgaggcagtcctgtgtgattccatgatcagttgtttttgtattttaactattcttccaaaccagcagatgtttggaaattaaggaaaaaattaaattctcatcaatggttgctgttatagttaaatcagtaaagatcttgagtatcaaaaaaaaaaaataaagtcgagcggccgcgaatttagtagtagtaggcggccgc

SEQ ID NO: 60003 - DNA, 6270 bp, Homo sapiens
ggccgaccagcttccccaactccctctggctcccgccttcgcccgcttccggtcgtcgtcgtcgccgctgctgccgctgctgttgctcctgaggctgctggctgaggccggaggatcgagcggcggcggcggcggcggctgagagggcggcggcgggagcggagcgggacgagggaacgggaggaagcgagcgaggagcgcgcagagcgcgcttttccgtccgcctgaggagccgaagcagccccggccccgccgccgccgcctgcccgccggacaaagccgagagcccgcgcccacagccatgtcctcgtcagccggcagcggccaccagcccagccagagccgcgccatccccacccgcaccgtggccatcagcgacgccgcgcagctacctcatgactattgcaccacgcccggggggacgctcttctccaccacaccgggaggaactcgaatcatttatgacagaaagtttctgttggatcgtcgcaattctcccatggctcagaccccaccctgccacctgcccaatatcccaggagtcactagccctggcaccttaattgaagactccaaagtagaagtaaacaatttgaacaacttgaacaatcacgacaggaaacatgcagttggggatgatgctcagttcgagatggacatctgactctcctgcaaggattagaagaaaagcagcaacactgatacttgtgtgcacctgatttggccaataggatcaacagtgaaaagacagaagaggcaataccagcagtccccattacagtctccacctccccgtcttcctctgggtgccaaatgatgggaagatgagcttcatctgaccatttcttctccctgtctcctgttccccttcccagttaaacaggttagattgaaggcccttgctgtatttctgtagagctaagcagcccttagaggaaaacagttcaactctgactttcctagttgtttttttattgagagccaccctcataccctgtaattttgtcccaaatcaaatatcaacctaccaacaactgcctggctgggaagtctggggaagggatacagagcttggtgggcctaacaccattcatattccttaccctctgtctctcctccctgtatcccacctatggttcagtgttgcaagagtctgggcttggggtctttaaaaccagcagggggaaatgataaaaagagagctgctttcccttttaccttgaggtattcgtccctcgggacagagcacagcttgtgcaactctggtagcgttaccctgtgacactgttttgaggtccacttcctttctttcctctgggaggaatgtcttctgtctttggtattatagttcatcttcccattcttttacttagtgcatttgtgcagatatttttaactctgtacatcagaagagagcccttggtaaccagttttgctcttcttctgccactcctccctgcttgcatctcgttgctggcagagtcctcttgtacttcaagaaagcaaagtgattttgtctgctcctagagcaggtccataccaagtaatagaggcactttagcttccacttggtgggtaaggcctgatcatagtattctgtcagataatgcctaagaatgaccgctgaagaacgttgacccatttgagtacccggtctcagtcgtcatttttaagtccagtgagcattgtggtagttgttcttagattgcagtttcttatgttttgagtttgaagttgattttcagaatgttcttagaaaagaactgcatttttttcctttgtggatctgctttgtttggctgctgggatagataagcatgggcttaaaaaatgtgttcctcccagttttcttgcctttcctgttgtactctgaatttctctccctacctccctcactttcttcctctctccttcctttccttcctttttctctaccaggccatttttcaaatttacatcaaagatacctgaagtgttggtatctgagaatatctgtcactcctcttatctgagaagtgaccttttatttttaagatgactacagacctatttttagatatgttttcagtacaattttgaacagcaactttttaattaaacatcttccagtgttaggaagttgagaaacgttcataggcaagtctgctgttctatgtcaccatcttttgtctcccctagtcccccaggagctctttcctttcccctctagttttgggtgtgcatgtttggagtttgtagtgggtggtttgtaaaactggaccattctgccttgctatgggttgttcaagaaagcctcattcttttctgtgaccctttcgcttttgcattcaccctccttcccacctacctgtcctggggctgttgagcagcataataatcccgggagaatgattcccctcatagaaagacaaaagcatccatcccctcatagttaagtagccactggtgtcctgggaatttctggttggatttggtgccctgaacttttttattaagaaatcagatcccagggtgagagtaacaggccatttggccaagaaagaaacctgtttgtttttcttttgaactatgaaaagaccctgtttgtgaatatattttagaaagagaggaaggatgtctgcagaactttgttctgttttctgccacaaaaatgtgaatagttcagagtgaaaaccttttgtgatggttgatgtctcaggaataagctggatctccaatgttttggggatgctttgagtctcaaaaaaaattgataatcagaaaagtaatttttgtttgtttgtttaatgtatccctgttctgtttttaattaaactccaagtctcattttacatattcttggaaaaacctaagttgcgctgtaatttacataagaagcatgctcaggacctctttgtaccccggggagcctgattctttgggaatgaagcttttcattcttcatacactggccttggcatcctgtggaatttgacccaactagcagctagtcagtctgtcagtgagcagaagagtgaactcttcttgatctttattgctatgtgtgaaaacttggcttcctcactgaacggtgaggaatggatttaaagcatgagctttagtagtatcaagatgccattttcctttttcttgctgtcttggggagcttctgcatgtgaccccctaatcagaaggcatgtttttagtatttcttgggagtgtcagctgtataatgcagcagctgttcaatcccttacccttctctgcaaggacttccttacagcttggtgcagttctttcccagaggccaccactactagacagtctttcttttatcttatggagataaattggcatttaaaaaataatttcacaaggcatgagataaactttcaatagatgatacctttgtgtcatgcctcatggaattatttttagaacaagccagagtccattgagtggtttacctctgcatgtttggagggaacctcacagatgaaacccttaatgaataatgtgtccggggttttttagagagaaggagcactcttaagttaccactttgagacagctcttaacatcttagtgaccatttgtagttttctttttatgaggaacccatgcttctatacttgggcggacaatcgagcttaatgagaagtgacttcccttcaaattccaacagcagacatgcattgtcatgattctgtcttctttttagtgtggtttattgagttcagcagttctcatattctgtttaaataggtacagcattttcaagggcacagatacagagaagctggctttctaggtattgggcttccaagccaagagttttgtccttccacctgtattagttatctattgctgtgtaaaaaattaccctaaatttagtatgttaaaatagtaaacattatctgtcagtttctgtgggttaagaatttgggagtagtttaacatgatggttctggcccatggtatcatgaagttacagtcaagattgaacaggggctgcagtcagctggagctggagaaaccacttccaagttctctctttgtggccgttggcaggatgcctcagtttcttcccatgtgggtctctgcgtagggcagcatgagtgtcctcacaccatgacacctggcttctccctgagcagctgattccagagatcatggggcagggccaggagaaagctgcagtgccttttaagacatagtcttggaaaggacacaccgtcacttcttatcctagttgttagaagcaagccactaagttcagcctgcactcaaggagagaggaattacacatacctctaccccaatggagcagtagcaaagaatttatggacatatcttaaaagcaccacaccccaactggggatgaaagtaggtcaacagggaggtaggtttaatctagataagctgaaagatagattgctatcaaaaacagttctccaagatgtgcatagccaaactgggatagaaggcaaactccccaaagctacctgctggttttgagaggggtggtaagacatggcaattcccaggagtagtagaaaataatatgcctgactaccaacagctcaagtatgcttatttgcacatcctagacttggtgtctgtaagactcagttaccacttttattttcctgtagctaggagttagcaaaaggaactggggccttccagccgagccactaaacctgtcttatttggaatggggattgtccagcaaagggagcaaacatgaattagatgttaagctattgagctgaagaaaagaaagcagttcacatttaggtgaaatagatgatgttatcaggaagccaggttcccaccagagtcggtgcttggtacctggtctctccagtctcaacagactcaggtcaggtctctcacccaggaagcaaccactcaataaaatagagaacatctgagaattacaaatgtctatgcttgattgctcctctaaatccagtgcataggttaaccctgcatgcccatttcttcctgggcttcttgatggcaatgtgttcttaaataactggtcttgtgttcatgctaaagacaaacttacatgaagtttttcagtttaagacattctagtgaatggctgctatgtgtttctggcactcattcctaaccaagtctttagagatttcagatgaccttaaagatgcaatatctttttctttctttctttctttctttttttctgagacaagagttgcgccctgtcgcccaggctggggtgctggagtgcagtggtgcgatctcagctcactgcagcctctgcttcccaggttcaagtgtttctcctgcctcagccttccgagtagctgggattacaggcatgtaccactatgcctggctaatttttatttctatatttttagtagagatggggtttcatcatgtttgccaggctggtctcgaactcctggcctcaagtgatccgcccacctcagcctcccaaagtgctgggattacaggcgcgagcgaccgcgcctggccaaagatgcaaattcttgtttggatttatgctctgcctcttcccagcattttcttatctgtagccctgcttgcttgagagtatacttggataagaagtattgctgttgagggagctataagaaaaggattcttcttccagaagtaaagaagctcactcctttagagtacctttaaatgaatttggtttttctttcttattttgaggtggattggtcttctctttttttgggtttccagctcactgggactctcagaccttacctttccagctcaaacaccattagttaaattccttcattctcattagaatgcagcctgctgagtatgtgggtttcactgccggagtccatcatttagccagtatacatagaggaactgcttcgaatcaaggcaactggtgaagggcttagcatgttggcagcaatatcccagagattgaatctgtttgcattttcctcatctaggataacagctgcttgaagccagggctcttagccctttgcattccccttgagcgaggaagccacactgcctttctgtgtctggttcagagctcttccttcttggcatgttttctggactacatgcacatgggcagctatagattaatctgcaaaacctagtcacttacctacccataatatctgggaaggtgtggtatttgttttaaagaaacattgtttctttgggagggcagtttctgtctggactttgaggtggacttagttatccctacagttctttaactctcagcttttaataaaagatgaaatcaga

SEQ ID NO: 60004 - DNA, 7144 bp, Homo sapiens
ggccgaccagcttccccaactccctctggctcccgccttcgcccgcttccggtcgtcgtcgtcgccgctgctgccgctgctgttgctcctgaggctgctggctgaggccggaggatcgagcggcggcggcggcggcggctgagagggcggcggcgggagcggagcgggacgagggaacgggaggaagcgagcgaggagcgcgcagagcgcgcttttccgtccgcctgaggagccgaagcagccccggccccgccgccgccgcctgcccgccggacaaagccgagagcccgcgcccacagccatgtcctcgtcagccggcagcggccaccagcccagccagagccgcgccatccccacccgcaccgtggccatcagcgacgccgcgcagctacctcatgactattgcaccacgcccggggggacgctcttctccaccacaccgggaggaactcgaatcatttatgacagaaagtttctgttggatcgtcgcaattctcccatggctcagaccccaccctgccacctgcccaatatcccaggagtcactagccctggcaccttaattgaagactccaaagtagaagtaaacaatttgaacaacttgaacaatcacgacaggaaacatgcagttggggatgatgctcagttcgagatggacatctgactctcctgcaaggattagaagaaaagcagcaacactgatacttgtgtgcacctgatttggccaataggatcaacagtgaaaagacagaagaggcaataccagcagtccccattacagtctccacctccccgtcttcctctgggtgccaaatgatgggaagatgagcttcatctgaccatttcttctccctgtctcctgttccccttcccagttaaacaggttagattgaaggcccttgctgtatttctgtagagctaagcagcccttagaggaaaacagttcaactctgactttcctagttgtttttttattgagagccaccctcataccctgtaattttgtcccaaatcaaatatcaacctaccaacaactgcctggctgggaagtctggggaagggatacagagcttggtgggcctaacaccattcatattccttaccctctgtctctcctccctgtatcccacctatggttcagtgttgcaagagtctgggcttggggtctttaaaaccagcagggggaaatgataaaaagagagctgctttcccttttaccttgaggtattcgtccctcgggacagagcacagcttgtgcaactctggtagcgttaccctgtgacactgttttgaggtccacttcctttctttcctctgggaggaatgtcttctgtctttggtattatagttcatcttcccattcttttacttagtgcatttgtgcagatatttttaactctgtacatcagaagagagcccttggtaaccagttttgctcttcttctgccactcctccctgcttgcatctcgttgctggcagagtcctcttgtacttcaagaaagcaaagtgattttgtctgctcctagagcaggtccataccaagtaatagaggcactttagcttccacttggtgggtaaggcctgatcatagtattctgtcagataatgcctaagaatgaccgctgaagaacgttgacccatttgagtacccggtctcagtcgtcatttttaagtccagtgagcattgtggtagttgttcttagattgcagtttcttatgttttgagtttgaagttgattttcagaatgttcttagaaaagaactgcatttttttcctttgtggatctgctttgtttggctgctgggatagataagcatgggcttaaaaaatgtgttcctcccagttttcttgcctttcctgttgtactctgaatttctctccctacctccctcactttcttcctctctccttcctttccttcctttttctctaccaggccatttttcaaatttacatcaaagatacctgaagtgttggtatctgagaatatctgtcactcctcttatctgagaagtgaccttttatttttaagatgactacagacctatttttagatatgttttcagtacaattttgaacagcaactttttaattaaacatcttccagtgttaggaagttgagaaacgttcataggcaagtctgctgttctatgtcaccatcttttgtctcccctagtcccccaggagctctttcctttcccctctagttttgggtgtgcatgtttggagtttgtagtgggtggtttgtaaaactggaccattctgccttgctatgggttgttcaagaaagcctcattcttttctgtgaccctttcgcttttgcattcaccctccttcccacctacctgtcctggggctgttgagcagcataataatcccgggagaatgattcccctcatagaaagacaaaagcatccatcccctcatagttaagtagccactggtgtcctgggaatttctggttggatttggtgccctgaacttttttattaagaaatcagatcccagggtgagagtaacaggccatttggccaagaaagaaacctgtttgtttttcttttgaactatgaaaagaccctgtttgtgaatatattttagaaagagaggaaggatgtctgcagaactttgttctgttttctgccacaaaaatgtgaatagttcagagtgaaaaccttttgtgatggttgatgtctcaggaataagctggatctccaatgttttggggatgctttgagtctcaaaaaaaattgataatcagaaaagtaatttttgtttgtttgtttaatgtatccctgttctgtttttaattaaactccaagtctcattttacatattcttggaaaaacctaagttgcgctgtaatttacataagaagcatgctcaggacctctttgtaccccggggagcctgattctttgggaatgaagcttttcattcttcatacactggccttggcatcctgtggaatttgacccaactagcagctagtcagtctgtcagtgagcagaagagtgaactcttcttgatctttattgctatgtgtgaaaacttggcttcctcactgaacggtgaggaatggatttaaagcatgagctttagtagtatcaagatgccattttcctttttcttgctgtcttggggagcttctgcatgtgaccccctaatcagaaggcatgtttttagtatttcttgggagtgtcagctgtataatgcagcagctgttcaatcccttacccttctctgcaaggacttccttacagcttggtgcagttctttcccagaggccaccactactagacagtctttcttttatcttatggagataaattggcatttaaaaaataatttcacaaggcatgagataaactttcaatagatgatacctttgtgtcatgcctcatggaattatttttagaacaagccagagtccattgagtggtttacctctgcatgtttggagggaacctcacagatgaaacccttaatgaataatgtgtccggggttttttagagagaaggagcactcttaagttaccactttgagacagctcttaacatcttagtgaccatttgtagttttctttttatgaggaacccatgcttctatacttgggcggacaatcgagcttaatgagaagtgacttcccttcaaattccaacagcagacatgcattgtcatgattctgtcttctttttagtgtggtttattgagttcagcagttctcatattctgtttaaataggtacagcattttcaagggcacagatacagagaagctggctttctaggtattgggcttccaagccaagagttttgtccttccacctgtattagttatctattgctgtgtaaaaaattaccctaaatttagtatgttaaaatagtaaacattatctgtcagtttctgtgggttaagaatttgggagtagtttaacatgatggttctggcccatggtatcatgaagttacagtcaagattgaacaggggctgcagtcagctggagctggagaaaccacttccaagttctctctttgtggccgttggcaggatgcctcagtttcttcccatgtgggtctctgcgtagggcagcatgagtgtcctcacaccatgacacctggcttctccctgagcagctgattccagagatcatggggcagggccaggagaaagctgcagtgccttttaagacatagtcttggaaaggacacaccgtcacttcttatcctagttgttagaagcaagccactaagttcagcctgcactcaaggagagaggaattacacatacctctaccccaatggagcagtagcaaagaatttatggacatatcttaaaagcaccacaccccaactggggatgaaagtaggtcaacagggaggtaggtttaatctagataagctgaaagatagattgctatcaaaaacagttctccaagatgtgcatagccaaactgggatagaaggcaaactccccaaagctacctgctggttttgagaggggtggtaagacatggcaattcccaggagtagtagaaaataatatgcctgactaccaacagctcaagtatgcttatttgcacatcctagacttggtgtctgtaagactcagttaccacttttattttcctgtagctaggagttagcaaaaggaactggggccttccagccgagccactaaacctgtcttatttggaatggggattgtccagcaaagggagcaaacatgaattagatgttaagctattgagctgaagaaaagaaagcagttcacatttaggtgaaatagatgatgttatcaggaagccaggttcccaccagagtcggtgcttggtacctggtctctccagtctcaacagactcaggtcaggtctctcacccaggaagcaaccactcaataaaatagagaacatctgagaattacaaatgtctatgcttgattgctcctctaaatccagtgcataggttaaccctgcatgcccatttcttcctgggcttcttgatggcaatgtgttcttaaataactggtcttgtgttcatgctaaagacaaacttacatgaagtttttcagtttaagacattctagtgaatggctgctatgtgtttctggcactcattcctaaccaagtctttagagatttcagatgaccttaaagatgcaatatctttttctttctttctttctttctttttttctgagacaagagttgcgccctgtcgcccaggctggggtgctggagtgcagtggtgcgatctcagctcactgcagcctctgcttcccaggttcaagtgtttctcctgcctcagccttccgagtagctgggattacaggcatgtaccactatgcctggctaatttttatttctatatttttagtagagatggggtttcatcatgtttgccaggctggtctcgaactcctggcctcaagtgatccgcccacctcagcctcccaaagtgctgggattacaggcgcgagcgaccgcgcctggccaaagatgcaaattcttgtttggatttatgctctgcctcttcccagcattttcttatctgtagccctgcttgcttgagagtatacttggataagaagtattgctgttgagggagctataagaaaaggattcttcttccagaagtaaagaagctcactcctttagagtacctttaaatgaatttggtttttctttcttattttgaggtggattggtcttctctttttttgggtttccagctcactgggactctcagaccttacctttccagctcaaacaccattagttaaattccttcattctcattagaatgcagcctgctgagtatgtgggtttcactgccggagtccatcatttagccagtatacatagaggaactgcttcgaatcaaggcaactggtgaagggcttagcatgttggcagcaatatcccagagattgaatctgtttgcattttcctcatctaggataacagctgcttgaagccagggctcttagccctttgcattccccttgagcgaggaagccacactgcctttctgtgtctggttcagagctcttccttcttggcatgttttctggactacatgcacatgggcagctatagattaatctgcaaaacctagtcacttacctacccataatatctgggaaggtgtggtatttgttttaaagaaacattgtttctttgggagggcagtttctgtctggactttgaggtggacttagttatccctacagttctttaactctcagcttttaataaaagatgaaatcagatattgatgcagttgggtcacaattctttagaatgcttctaccccagggccgcttcctgttcctagtcatggttttccagtttagtagtggagtttcttgaggctaacttacagaaatttctaactgaaaactttaagagttattgatacttgttttttcagtcagtcacttacatcacctagcctactctctggaatttaaatttatttctctaggctggtcctggaagttgataaccttttggcaaagcttagatttaggagaaggcttgagtccctgttcagcgggtctgtggattctctttgcttatggctctctgcctgcagccctggcagaccatactgtatgtcatggatacccagtggaaatattactgagatgaaacacatttccaagggtatttaaactctcactctgccacctttctaagggtgggaggctggcagagatgctgcaatgcttgataatcatttggccacactgaaatttccaaagggagctcttgccggtgcttaaaaccaaaactcctggacacttagaaaattccatgaatctagcacaaaatatccattcttgcccaagtgtatcccctttctctccagcttaatcttttttttttttttttttttaaagcccaggccaagggtacttttaactggaaactggggaggagggaagaacactagcagggagctaagaggcaggttgctgggtaagccatcctgctcctacctggtgcctgtatctacattgctgagtgctgtgcgccagtgcctttccttcatctgcagatggagcccatctctttccacctgggtgaggagaccctctgctactccaggtggaaagagcccggttaccggtcctcgtgccg

SEQ ID NO: 60005 - DNA, 6920 bp, Homo sapiens
ggccgaccagcttccccaactccctctggctcccgccttcgcccgcttccggtcgtcgtcgtcgccgctgctgccgctgctgttgctcctgaggctgctggctgaggccggaggatcgagcggcggcggcggcggcggctgagagggcggcggcgggagcggagcgggacgagggaacgggaggaagcgagcgaggagcgcgcagagcgcgcttttccgtccgcctgaggagccgaagcagccccggccccgccgccgccgcctgcccgccggacaaagccgagagcccgcgcccacagccatgtcctcgtcagccggcagcggccaccagcccagccagagccgcgccatccccacccgcaccgtggccatcagcgacgccgcgcagctacctcatgactattgcaccacgcccggggggacgctcttctccaccacaccgggaggaactcgaatcatttatgacagaaagtttctgttggatcgtcgcaattctcccatggctcagaccccaccctgccacctgcccaatatcccaggagtcactagccctggcaccttaattgaagactccaaagtagaagtaaacaatttgaacaacttgaacaatcacgacaggaaacatgcagttggggatgatgctcagttcgagatggacatctgactctcctgcaaggattagaagaaaagcagcaacactgatacttgtgtgcacctgatttggccaataggatcaacagtgaaaagacagaagaggcaataccagcagtccccattacagtctccacctccccgtcttcctctgggtgccaaatgatgggaagatgagcttcatctgaccatttcttctccctgtctcctgttccccttcccagttaaacaggttagattgaaggcccttgctgtatttctgtagagctaagcagcccttagaggaaaacagttcaactctgactttcctagttgtttttttattgagagccaccctcataccctgtaattttgtcccaaatcaaatatcaacctaccaacaactgcctggctgggaagtctggggaagggatacagagcttggtgggcctaacaccattcatattccttaccctctgtctctcctccctgtatcccacctatggttcagtgttgcaagagtctgggcttggggtctttaaaaccagcagggggaaatgataaaaagagagctgctttcccttttaccttgaggtattcgtccctcgggacagagcacagcttgtgcaactctggtagcgttaccctgtgacactgttttgaggtccacttcctttctttcctctgggaggaatgtcttctgtctttggtattatagttcatcttcccattcttttacttagtgcatttgtgcagatatttttaactctgtacatcagaagagagcccttggtaaccagttttgctcttcttctgccactcctccctgcttgcatctcgttgctggcagagtcctcttgtacttcaagaaagcaaagtgattttgtctgctcctagagcaggtccataccaagtaatagaggcactttagcttccacttggtgggtaaggcctgatcatagtattctgtcagataatgcctaagaatgaccgctgaagaacgttgacccatttgagtacccggtctcagtcgtcatttttaagtccagtgagcattgtggtagttgttcttagattgcagtttcttatgttttgagtttgaagttgattttcagaatgttcttagaaaagaactgcatttttttcctttgtggatctgctttgtttggctgctgggatagataagcatgggcttaaaaaatgtgttcctcccagttttcttgcctttcctgttgtactctgaatttctctccctacctccctcactttcttcctctctccttcctttccttcctttttctctaccaggccatttttcaaatttacatcaaagatacctgaagtgttggtatctgagaatatctgtcactcctcttatctgagaagtgaccttttatttttaagatgactacagacctatttttagatatgttttcagtacaattttgaacagcaactttttaattaaacatcttccagtgttaggaagttgagaaacgttcataggcaagtctgctgttctatgtcaccatcttttgtctcccctagtcccccaggagctctttcctttcccctctagttttgggtgtgcatgtttggagtttgtagtgggtggtttgtaaaactggaccattctgccttgctatgggttgttcaagaaagcctcattcttttctgtgaccctttcgcttttgcattcaccctccttcccacctacctgtcctggggctgttgagcagcataataatcccgggagaatgattcccctcatagaaagacaaaagcatccatcccctcatagttaagtagccactggtgtcctgggaatttctggttggatttggtgccctgaacttttttattaagaaatcagatcccagggtgagagtaacaggccatttggccaagaaagaaacctgtttgtttttcttttgaactatgaaaagaccctgtttgtgaatatattttagaaagagaggaaggatgtctgcagaactttgttctgttttctgccacaaaaatgtgaatagttcagagtgaaaaccttttgtgatggttgatgtctcaggaataagctggatctccaatgttttggggatgctttgagtctcaaaaaaaattgataatcagaaaagtaatttttgtttgtttgtttaatgtatccctgttctgtttttaattaaactccaagtctcattttacatattcttggaaaaacctaagttgcgctgtaatttacataagaagcatgctcaggacctctttgtaccccggggagcctgattctttgggaatgaagcttttcattcttcatacactggccttggcatcctgtggaatttgacccaactagcagctagtcagtctgtcagtgagcagaagagtgaactcttcttgatctttattgctatgtgtgaaaacttggcttcctcactgaacggtgaggaatggatttaaagcatgagctttagtagtatcaagatgccattttcctttttcttgctgtcttggggagcttctgcatgtgaccccctaatcagaaggcatgtttttagtatttcttgggagtgtcagctgtataatgcagcagctgttcaatcccttacccttctctgcaaggacttccttacagcttggtgcagttctttcccagaggccaccactactagacagtctttcttttatcttatggagataaattggcatttaaaaaataatttcacaaggcatgagataaactttcaatagatgatacctttgtgtcatgcctcatggaattatttttagaacaagccagagtccattgagtggtttacctctgcatgtttggagggaacctcacagatgaaacccttaatgaataatgtgtccggggttttttagagagaaggagcactcttaagttaccactttgagacagctcttaacatcttagtgaccatttgtagttttctttttatgaggaacccatgcttctatacttgggcggacaatcgagcttaatgagaagtgacttcccttcaaattccaacagcagacatgcattgtcatgattctgtcttctttttagtgtggtttattgagttcagcagttctcatattctgtttaaataggtacagcattttcaagggcacagatacagagaagctggctttctaggtattgggcttccaagccaagagttttgtccttccacctgtattagttatctattgctgtgtaaaaaattaccctaaatttagtatgttaaaatagtaaacattatctgtcagtttctgtgggttaagaatttgggagtagtttaacatgatggttctggcccatggtatcatgaagttacagtcaagattgaacaggggctgcagtcagctggagctggagaaaccacttccaagttctctctttgtggccgttggcaggatgcctcagtttcttcccatgtgggtctctgcgtagggcagcatgagtgtcctcacaccatgacacctggcttctccctgagcagctgattccagagatcatggggcagggccaggagaaagctgcagtgccttttaagacatagtcttggaaaggacacaccgtcacttcttatcctagttgttagaagcaagccactaagttcagcctgcactcaaggagagaggaattacacatacctctaccccaatggagcagtagcaaagaatttatggacatatcttaaaagcaccacaccccaactggggatgaaagtaggtcaacagggaggtaggtttaatctagataagctgaaagatagattgctatcaaaaacagttctccaagatgtgcatagccaaactgggatagaaggcaaactccccaaagctacctgctggttttgagaggggtggtaagacatggcaattcccaggagtagtagaaaataatatgcctgactaccaacagctcaagtatgcttatttgcacatcctagacttggtgtctgtaagactcagttaccacttttattttcctgtagctaggagttagcaaaaggaactggggccttccagccgagccactaaacctgtcttatttggaatggggattgtccagcaaagggagcaaacatgaattagatgttaagctattgagctgaagaaaagaaagcagttcacatttaggtgaaatagatgatgttatcaggaagccaggttcccaccagagtcggtgcttggtacctggtctctccagtctcaacagactcaggtcaggtctctcacccaggaagcaaccactcaataaaatagagaacatctgagaattacaaatgtctatgcttgattgctcctctaaatccagtgcataggttaaccctgcatgcccatttcttcctgggcttcttgatggcaatgtgttcttaaataactggtcttgtgttcatgctaaagacaaacttacatgaagtttttcagtttaagacattctagtgaatggctgctatgtgtttctggcactcattcctaaccaagtctttagagatttcagatgaccttaaagatgcaatatctttttctttctttctttctttctttttttctgagacaagagttgcgccctgtcgcccaggctggggtgctggagtgcagtggtgcgatctcagctcactgcagcctctgcttcccaggttcaagtgtttctcctgcctcagccttccgagtagctgggattacaggcatgtaccactatgcctggctaatttttatttctatatttttagtagagatggggtttcatcatgtttgccaggctggtctcgaactcctggcctcaagtgatccgcccacctcagcctcccaaagtgctgggattacaggcgcgagcgaccgcgcctggccaaagatgcaaattcttgtttggatttatgctctgcctcttcccagcattttcttatctgtagccctgcttgcttgagagtatacttggataagaagtattgctgttgagggagctataagaaaaggattcttcttccagaagtaaagaagctcactcctttagagtacctttaaatgaatttggtttttctttcttattttgaggtggattggtcttctctttttttgggtttccagctcactgggactctcagaccttacctttccagctcaaacaccattagttaaattccttcattctcattagaatgcagcctgctgagtatgtgggtttcactgccggagtccatcatttagccagtatacatagaggaactgcttcgaatcaaggcaactggtgaagggcttagcatgttggcagcaatatcccagagattgaatctgtttgcattttcctcatctaggataacagctgcttgaagccagggctcttagccctttgcattccccttgagcgaggaagccacactgcctttctgtgtctggttcagagctcttccttcttggcatgttttctggactacatgcacatgggcagctatagattaatctgcaaaacctagtcacttacctacccataatatctgggaaggtgtggtatttgttttaaagaaacattgtttctttgggagggcagtttctgtctggactttgaggtggacttagttatccctacagttctttaactctcagcttttaataaaagatgaaatcagatattgatgcagttgggtcacaattctttagaatgcttctaccccagggccgcttcctgttcctagtcatggttttccagtttagtagtggagtttcttgaggctaacttacagaaatttctaactgaaaactttaagagttattgatacttgttttttcagtcagtcacttacatcacctagcctactctctggaatttaaatttatttctctaggctggtcctggaagttgataaccttttggcaaagcttagatttaggagaaggcttgagtccctgttcagcgggtctgtggattctctttgcttatggctctctgcctgcagccctggcagaccatactgtatgtcatggatacccagtggaaatattactgagatgaaacacatttccaagggtatttaaactctcactctgccacctttctaagggtgggaggctggcagagatgctgcaatgcttgataatcatttggccacactgaaatttccaaagggagctcttgccggtgcttaaaaccaaaactcctggacacttagaaaattccatgaatctagcacaaaatatccattcttgcctcttagctccctgctagtgttcttccctcctccccagtttccagttaaaagtacccttggcctgggctttaa

SEQ ID NO: 60006 - DNA, 6852 bp, Homo sapiens
ggccgaccagcttccccaactccctctggctcccgccttcgcccgcttccggtcgtcgtcgtcgccgctgctgccgctgctgttgctcctgaggctgctggctgaggccggaggatcgagcggcggcggcggcggcggctgagagggcggcggcgggagcggagcgggacgagggaacgggaggaagcgagcgaggagcgcgcagagcgcgcttttccgtccgcctgaggagccgaagcagccccggccccgccgccgccgcctgcccgccggacaaagccgagagcccgcgcccacagccatgtcctcgtcagccggcagcggccaccagcccagccagagccgcgccatccccacccgcaccgtggccatcagcgacgccgcgcagctacctcatgactattgcaccacgcccggggggacgctcttctccaccacaccgggaggaactcgaatcatttatgacagaaagtttctgttggatcgtcgcaattctcccatggctcagaccccaccctgccacctgcccaatatcccaggagtcactagccctggcaccttaattgaagactccaaagtagaagtaaacaatttgaacaacttgaacaatcacgacaggaaacatgcagttggggatgatgctcagttcgagatggacatctgactctcctgcaaggattagaagaaaagcagcaacactgatacttgtgtgcacctgatttggccaataggatcaacagtgaaaagacagaagaggcaataccagcagtccccattacagtctccacctccccgtcttcctctgggtgccaaatgatgggaagatgagcttcatctgaccatttcttctccctgtctcctgttccccttcccagttaaacaggttagattgaaggcccttgctgtatttctgtagagctaagcagcccttagaggaaaacagttcaactctgactttcctagttgtttttttattgagagccaccctcataccctgtaattttgtcccaaatcaaatatcaacctaccaacaactgcctggctgggaagtctggggaagggatacagagcttggtgggcctaacaccattcatattccttaccctctgtctctcctccctgtatcccacctatggttcagtgttgcaagagtctgggcttggggtctttaaaaccagcagggggaaatgataaaaagagagctgctttcccttttaccttgaggtattcgtccctcgggacagagcacagcttgtgcaactctggtagcgttaccctgtgacactgttttgaggtccacttcctttctttcctctgggaggaatgtcttctgtctttggtattatagttcatcttcccattcttttacttagtgcatttgtgcagatatttttaactctgtacatcagaagagagcccttggtaaccagttttgctcttcttctgccactcctccctgcttgcatctcgttgctggcagagtcctcttgtacttcaagaaagcaaagtgattttgtctgctcctagagcaggtccataccaagtaatagaggcactttagcttccacttggtgggtaaggcctgatcatagtattctgtcagataatgcctaagaatgaccgctgaagaacgttgacccatttgagtacccggtctcagtcgtcatttttaagtccagtgagcattgtggtagttgttcttagattgcagtttcttatgttttgagtttgaagttgattttcagaatgttcttagaaaagaactgcatttttttcctttgtggatctgctttgtttggctgctgggatagataagcatgggcttaaaaaatgtgttcctcccagttttcttgcctttcctgttgtactctgaatttctctccctacctccctcactttcttcctctctccttcctttccttcctttttctctaccaggccatttttcaaatttacatcaaagatacctgaagtgttggtatctgagaatatctgtcactcctcttatctgagaagtgaccttttatttttaagatgactacagacctatttttagatatgttttcagtacaattttgaacagcaactttttaattaaacatcttccagtgttaggaagttgagaaacgttcataggcaagtctgctgttctatgtcaccatcttttgtctcccctagtcccccaggagctctttcctttcccctctagttttgggtgtgcatgtttggagtttgtagtgggtggtttgtaaaactggaccattctgccttgctatgggttgttcaagaaagcctcattcttttctgtgaccctttcgcttttgcattcaccctccttcccacctacctgtcctggggctgttgagcagcataataatcccgggagaatgattcccctcatagaaagacaaaagcatccatcccctcatagttaagtagccactggtgtcctgggaatttctggttggatttggtgccctgaacttttttattaagaaatcagatcccagggtgagagtaacaggccatttggccaagaaagaaacctgtttgtttttcttttgaactatgaaaagaccctgtttgtgaatatattttagaaagagaggaaggatgtctgcagaactttgttctgttttctgccacaaaaatgtgaatagttcagagtgaaaaccttttgtgatggttgatgtctcaggaataagctggatctccaatgttttggggatgctttgagtctcaaaaaaaattgataatcagaaaagtaatttttgtttgtttgtttaatgtatccctgttctgtttttaattaaactccaagtctcattttacatattcttggaaaaacctaagttgcgctgtaatttacataagaagcatgctcaggacctctttgtaccccggggagcctgattctttgggaatgaagcttttcattcttcatacactggccttggcatcctgtggaatttgacccaactagcagctagtcagtctgtcagtgagcagaagagtgaactcttcttgatctttattgctatgtgtgaaaacttggcttcctcactgaacggtgaggaatggatttaaagcatgagctttagtagtatcaagatgccattttcctttttcttgctgtcttggggagcttctgcatgtgaccccctaatcagaaggcatgtttttagtatttcttgggagtgtcagctgtataatgcagcagctgttcaatcccttacccttctctgcaaggacttccttacagcttggtgcagttctttcccagaggccaccactactagacagtctttcttttatcttatggagataaattggcatttaaaaaataatttcacaaggcatgagataaactttcaatagatgatacctttgtgtcatgcctcatggaattatttttagaacaagccagagtccattgagtggtttacctctgcatgtttggagggaacctcacagatgaaacccttaatgaataatgtgtccggggttttttagagagaaggagcactcttaagttaccactttgagacagctcttaacatcttagtgaccatttgtagttttctttttatgaggaacccatgcttctatacttgggcggacaatcgagcttaatgagaagtgacttcccttcaaattccaacagcagacatgcattgtcatgattctgtcttctttttagtgtggtttattgagttcagcagttctcatattctgtttaaataggtacagcattttcaagggcacagatacagagaagctggctttctaggtattgggcttccaagccaagagttttgtccttccacctgtattagttatctattgctgtgtaaaaaattaccctaaatttagtatgttaaaatagtaaacattatctgtcagtttctgtgggttaagaatttgggagtagtttaacatgatggttctggcccatggtatcatgaagttacagtcaagattgaacaggggctgcagtcagctggagctggagaaaccacttccaagttctctctttgtggccgttggcaggatgcctcagtttcttcccatgtgggtctctgcgtagggcagcatgagtgtcctcacaccatgacacctggcttctccctgagcagctgattccagagatcatggggcagggccaggagaaagctgcagtgccttttaagacatagtcttggaaaggacacaccgtcacttcttatcctagttgttagaagcaagccactaagttcagcctgcactcaaggagagaggaattacacatacctctaccccaatggagcagtagcaaagaatttatggacatatcttaaaagcaccacaccccaactggggatgaaagtaggtcaacagggaggtaggtttaatctagataagctgaaagatagattgctatcaaaaacagttctccaagatgtgcatagccaaactgggatagaaggcaaactccccaaagctacctgctggttttgagaggggtggtaagacatggcaattcccaggagtagtagaaaataatatgcctgactaccaacagctcaagtatgcttatttgcacatcctagacttggtgtctgtaagactcagttaccacttttattttcctgtagctaggagttagcaaaaggaactggggccttccagccgagccactaaacctgtcttatttggaatggggattgtccagcaaagggagcaaacatgaattagatgttaagctattgagctgaagaaaagaaagcagttcacatttaggtgaaatagatgatgttatcaggaagccaggttcccaccagagtcggtgcttggtacctggtctctccagtctcaacagactcaggtcaggtctctcacccaggaagcaaccactcaataaaatagagaacatctgagaattacaaatgtctatgcttgattgctcctctaaatccagtgcataggttaaccctgcatgcccatttcttcctgggcttcttgatggcaatgtgttcttaaataactggtcttgtgttcatgctaaagacaaacttacatgaagtttttcagtttaagacattctagtgaatggctgctatgtgtttctggcactcattcctaaccaagtctttagagatttcagatgaccttaaagatgcaatatctttttctttctttctttctttctttttttctgagacaagagttgcgccctgtcgcccaggctggggtgctggagtgcagtggtgcgatctcagctcactgcagcctctgcttcccaggttcaagtgtttctcctgcctcagccttccgagtagctgggattacaggcatgtaccactatgcctggctaatttttatttctatatttttagtagagatggggtttcatcatgtttgccaggctggtctcgaactcctggcctcaagtgatccgcccacctcagcctcccaaagtgctgggattacaggcgcgagcgaccgcgcctggccaaagatgcaaattcttgtttggatttatgctctgcctcttcccagcattttcttatctgtagccctgcttgcttgagagtatacttggataagaagtattgctgttgagggagctataagaaaaggattcttcttccagaagtaaagaagctcactcctttagagtacctttaaatgaatttggtttttctttcttattttgaggtggattggtcttctctttttttgggtttccagctcactgggactctcagaccttacctttccagctcaaacaccattagttaaattccttcattctcattagaatgcagcctgctgagtatgtgggtttcactgccggagtccatcatttagccagtatacatagaggaactgcttcgaatcaaggcaactggtgaagggcttagcatgttggcagcaatatcccagagattgaatctgtttgcattttcctcatctaggataacagctgcttgaagccagggctcttagccctttgcattccccttgagcgaggaagccacactgcctttctgtgtctggttcagagctcttccttcttggcatgttttctggactacatgcacatgggcagctatagattaatctgcaaaacctagtcacttacctacccataatatctgggaaggtgtggtatttgttttaaagaaacattgtttctttgggagggcagtttctgtctggactttgaggtggacttagttatccctacagttctttaactctcagcttttaataaaagatgaaatcagatattgatgcagttgggtcacaattctttagaatgcttctaccccagggccgcttcctgttcctagtcatggttttccagtttagtagtggagtttcttgaggctaacttacagaaatttctaactgaaaactttaagagttattgatacttgttttttcagtcagtcacttacatcacctagcctactctctggaatttaaatttatttctctaggctggtcctggaagttgataaccttttggcaaagcttagatttaggagaaggcttgagtccctgttcagcgggtctgtggattctctttgcttatggctctctgcctgcagccctggcagaccatactgtatgtcatggatacccagtggaaatattactgagatgaaacacatttccaagggtatttaaactctcactctgccacctttctaagggtgggaggtttgcctatattctaatattctagatattggttgcttacacttgaagctttcaaagtgagcttttgcccgtgcttaaaatcaataatgtgctttaccccttatgtgtcttattttggattatatctctaaactaatttcgttc

SEQ ID NO: 60007 - DNA, 7484 bp, Homo sapiens
ggccgaccagcttccccaactccctctggctcccgccttcgcccgcttccggtcgtcgtcgtcgccgctgctgccgctgctgttgctcctgaggctgctggctgaggccggaggatcgagcggcggcggcggcggcggctgagagggcggcggcgggagcggagcgggacgagggaacgggaggaagcgagcgaggagcgcgcagagcgcgcttttccgtccgcctgaggagccgaagcagccccggccccgccgccgccgcctgcccgccggacaaagccgagagcccgcgcccacagccatgtcctcgtcagccggcagcggccaccagcccagccagagccgcgccatccccacccgcaccgtggccatcagcgacgccgcgcagctacctcatgactattgcaccacgcccggggggacgctcttctccaccacaccgggaggaactcgaatcatttatgacagaaagtttctgttggatcgtcgcaattctcccatggctcagaccccaccctgccacctgcccaatatcccaggagtcactagccctggcaccttaattgaagactccaaagtagaagtaaacaatttgaacaacttgaacaatcacgacaggaaacatgcagttggggatgatgctcagttcgagatggacatctgactctcctgcaaggattagaagaaaagcagcaacactgatacttgtgtgcacctgatttggccaataggatcaacagtgaaaagacagaagaggcaataccagcagtccccattacagtctccacctccccgtcttcctctgggtgccaaatgatgggaagatgagcttcatctgaccatttcttctccctgtctcctgttccccttcccagttaaacaggttagattgaaggcccttgctgtatttctgtagagctaagcagcccttagaggaaaacagttcaactctgactttcctagttgtttttttattgagagccaccctcataccctgtaattttgtcccaaatcaaatatcaacctaccaacaactgcctggctgggaagtctggggaagggatacagagcttggtgggcctaacaccattcatattccttaccctctgtctctcctccctgtatcccacctatggttcagtgttgcaagagtctgggcttggggtctttaaaaccagcagggggaaatgataacagcttgtgcaactctggtagcgttaccctgtgacactgttttgaggtccacttcctttctttcctctgggaggaatgtcttctgtctttggtattatagttcatcttcccattcttttacttagtgcatttgtgcagatatttttaactctgtacatcagaagagagcccttggtaaccagttttgctcttcttctgccactcctccctgcttgcatctcgttgctggcagagtcctcttgtacttcaagaaagcaaagtgattttgtctgctcctagagcaggtccataccaagtaatagaggcactttagcttccacttggtgggtaaggcctgatcatagtattctgtcagataatgcctaagaatgaccgctgaagaacgttgacccatttgagtacccggtctcagtcgtcatttttaagtccagtgagcattgtggtagttgttcttagattgcagtttcttatgttttgagtttgaagttgattttcagaatgttcttagaaaagaactgcatttttttcctttgtggatctgctttgtttggctgctgggatagataagcatgggcttaaaaaatgtgttcctcccagttttcttgcctttcctgttgtactctgaatttctctccctacctccctcactttcttcctctctccttcctttccttcctttttctctaccaggccatttttcaaatttacatcaaagatacctgaagtgttggtatctgagaatatctgtcactcctcttatctgagaagtgaccttttatttttaagatgactacagacctatttttagatatgttttcagtacaattttgaacagcaactttttaattaaacatcttccagtgttaggaagttgagaaacgttcataggcaagtctgctgttctatgtcaccatcttttgtctcccctagtcccccaggagctctttcctttcccctctagttttgggtgtgcatgtttggagtttgtagtgggtggtttgtaaaactggaccattctgccttgctatgggttgttcaagaaagcctcattcttttctgtgaccctttcgcttttgcattcaccctccttcccacctacctgtcctggggctgttgagcagcataataatcccgggagaatgattcccctcatagaaagacaaaagcatccatcccctcatagttaagtagccactggtgtcctgggaatttctggttggatttggtgccctgaacttttttattaagaaatcagatcccagggtgagagtaacaggccatttggccaagaaagaaacctgtttgtttttcttttgaactatgaaaagaccctgtttgtgaatatattttagaaagagaggaaggatgtctgcagaactttgttctgttttctgccacaaaaatgtgaatagttcagagtgaaaaccttttgtgatggttgatgtctcaggaataagctggatctccaatgttttggggatgctttgagtctcaaaaaaaattgataatcagaaaagtaatttttgtttgtttgtttaatgtatccctgttctgtttttaattaaactccaagtctcattttacatattcttggaaaaacctaagttgcgctgtaatttacataagaagcatgctcaggacctctttgtaccccggggagcctgattctttgggaatgaagcttttcattcttcatacactggccttggcatcctgtggaatttgacccaactagcagctagtcagtctgtcagtgagcagaagagtgaactcttcttgatctttattgctatgtgtgaaaacttggcttcctcactgaacggtgaggaatggatttaaagcatgagctttagtagtatcaagatgccattttcctttttcttgctgtcttggggagcttctgcatgtgaccccctaatcagaaggcatgtttttagtatttcttgggagtgtcagctgtataatgcagcagctgttcaatcccttacccttctctgcaaggacttccttacagcttggtgcagttctttcccagaggccaccactactagacagtctttcttttatcttatggagataaattggcatttaaaaaataatttcacaaggcatgagataaactttcaatagatgatacctttgtgtcatgcctcatggaattatttttagaacaagccagagtccattgagtggtttacctctgcatgtttggagggaacctcacagatgaaacccttaatgaataatgtgtccggggttttttagagagaaggagcactcttaagttaccactttgagacagctcttaacatcttagtgaccatttgtagttttctttttatgaggaacccatgcttctatacttgggcggacaatcgagcttaatgagaagtgacttcccttcaaattccaacagcagacatgcattgtcatgattctgtcttctttttagtgtggtttattgagttcagcagttctcatattctgtttaaataggtacagcattttcaagggcacagatacagagaagctggctttctaggtattgggcttccaagccaagagttttgtccttccacctgtattagttatctattgctgtgtaaaaaattaccctaaatttagtatgttaaaatagtaaacattatctgtcagtttctgtgggttaagaatttgggagtagtttaacatgatggttctggcccatggtatcatgaagttacagtcaagattgaacaggggctgcagtcagctggagctggagaaaccacttccaagttctctctttgtggccgttggcaggatgcctcagtttcttcccatgtgggtctctgcgtagggcagcatgagtgtcctcacaccatgacacctggcttctccctgagcagctgattccagagatcatggggcagggccaggagaaagctgcagtgccttttaagacatagtcttggaaaggacacaccgtcacttcttatcctagttgttagaagcaagccactaagttcagcctgcactcaaggagagaggaattacacatacctctaccccaatggagcagtagcaaagaatttatggacatatcttaaaagcaccacaccccaactggggatgaaagtaggtcaacagggaggtaggtttaatctagataagctgaaagatagattgctatcaaaaacagttctccaagatgtgcatagccaaactgggatagaaggcaaactccccaaagctacctgctggttttgagaggggtggtaagacatggcaattcccaggagtagtagaaaataatatgcctgactaccaacagctcaagtatgcttatttgcacatcctagacttggtgtctgtaagactcagttaccacttttattttcctgtagctaggagttagcaaaaggaactggggccttccagccgagccactaaacctgtcttatttggaatggggattgtccagcaaagggagcaaacatgaattagatgttaagctattgagctgaagaaaagaaagcagttcacatttaggtgaaatagatgatgttatcaggaagccaggttcccaccagagtcggtgcttggtacctggtctctccagtctcaacagactcaggtcaggtctctcacccaggaagcaaccactcaataaaatagagaacatctgagaattacaaatgtctatgcttgattgctcctctaaatccagtgcataggttaaccctgcatgcccatttcttcctgggcttcttgatggcaatgtgttcttaaataactggtcttgtgttcatgctaaagacaaacttacatgaagtttttcagtttaagacattctagtgaatggctgctatgtgtttctggcactcattcctaaccaagtctttagagatttcagatgaccttaaagatgcaatatctttttctttctttctttctttctttttttctgagacaagagttgcgccctgtcgcccaggctggggtgctggagtgcagtggtgcgatctcagctcactgcagcctctgcttcccaggttcaagtgtttctcctgcctcagccttccgagtagctgggattacaggcatgtaccactatgcctggctaatttttatttctatatttttagtagagatggggtttcatcatgtttgccaggctggtctcgaactcctggcctcaagtgatccgcccacctcagcctcccaaagtgctgggattacaggcgcgagcgaccgcgcctggccaaagatgcaaattcttgtttggatttatgctctgcctcttcccagcattttcttatctgtagccctgcttgcttgagagtatacttggataagaagtattgctgttgagggagctataagaaaaggattcttcttccagaagtaaagaagctcactcctttagagtacctttaaatgaatttggtttttctttcttattttgaggtggattggtcttctctttttttgggtttccagctcactgggactctcagaccttacctttccagctcaaacaccattagttaaattccttcattctcattagaatgcagcctgctgagtatgtgggtttcactgccggagtccatcatttagccagtatacatagaggaactgcttcgaatcaaggcaactggtgaagggcttagcatgttggcagcaatatcccagagattgaatctgtttgcattttcctcatctaggataacagctgcttgaagccagggctcttagccctttgcattccccttgagcgaggaagccacactgcctttctgtgtctggttcagagctcttccttcttggcatgttttctggactacatgcacatgggcagctatagattaatctgcaaaacctagtcacttacctacccataatatctgggaaggtgtggtatttgttttaaagaaacattgtttctttgggagggcagtttctgtctggactttgaggtggacttagttatccctacagttctttaactctcagcttttaataaaagatgaaatcagatattgatgcagttgggtcacaattctttagaatgcttctaccccagggccgcttcctgttcctagtcatggttttccagtttagtagtggagtttcttgaggctaacttacagaaatttctaactgaaaactttaagagttattgatacttgttttttcagtcagtcacttacatcacctagcctactctctggaatttaaatttatttctctaggctggtcctggaagttgataaccttttggcaaagcttagatttaggagaaggcttgagtccctgttcagcgggtctgtggattctctttgcttatggctctctgcctgcagccctggcagaccatactgtatgtcatggatacccagtggaaatattactgagatgaaacacatttccaagggtatttaaactctcactctgccacctttctaagggtgggaggctggcagagatgctgcaatgcttgataatcatttggccacactgaaatttccaaagggagctcttgccggtgcttaaaaccaaaactcctggacacttagaaaattccatgaatctagcacaaaatatccattcttgcccaagtgtatcccctttctctccagcttaatcttttttttttttttttttttaaagcccaggccaagggtacttttaactggaaactggggaggagggaagaacactagcagggagctaagaggcaggttgctgggtaagccatcctgctcctacctggtgcctgtatctacattgctgagtgctgtgcgccagtgcctttccttcatctgcagatggagcccatctctttccacctgggtgaggagaccctctgctactccaggggtaaaccttaaagaaggtgtcttgaagagcccaaaggacactcacgtgctaaggtgtccattttatgcatctttaaaatattttatttaaaaaaaaaaatagccctgccctgtcttagtgccactaacggcccagttccatccattctgaatggaaaagcggagactgccagcactttccttggtcttccctttgtctcccatgatgtgttgttccctcatccctcccatccatttcactgtgtgtggatggatagcagagggtaccacgcagtccttgaggcagtcctgtgtgattccatgatcagttgtttttgtattttaactattcttccaaaccagcagatgtttggaaattaaggaaaaaattaaattctcatcaatggttgctgttatagttaaatcagtaaagatcttgagtatcaa

SEQ ID NO: 60008 - DNA, 7190 bp, Homo sapiens
ggggatgcgctctgtctaggtcatgggtcggggcggcagactacctcatgactattgcaccacgcccggggggacgctcttctccaccacaccgggaggaactcgaatcatttatgacagaaagtttctgttggatcgtcgcaattctcccatggctcagaccccaccctgccacctgcccaatatcccaggagtcactagccctggcaccttaattgaagactccaaagtagaagtaaacaatttgaacaacttgaacaatcacgacaggaaacatgcagttggggatgatgctcagttcgagatggacatctgactctcctgcaaggattagaagaaaagcagcaacactgatacttgtgtgcacctgatttggccaataggatcaacagtgaaaagacagaagaggcaataccagcagtccccattacagtctccacctccccgtcttcctctgggtgccaaatgatgggaagatgagcttcatctgaccatttcttctccctgtctcctgttccccttcccagttaaacaggttagattgaaggcccttgctgtatttctgtagagctaagcagcccttagaggaaaacagttcaactctgactttcctagttgtttttttattgagagccaccctcataccctgtaattttgtcccaaatcaaatatcaacctaccaacaactgcctggctgggaagtctggggaagggatacagagcttggtgggcctaacaccattcatattccttaccctctgtctctcctccctgtatcccacctatggttcagtgttgcaagagtctgggcttggggtctttaaaaccagcagggggaaatgataaaaagagagctgctttcccttttaccttgaggtattcgtccctcgggacagagcacagcttgtgcaactctggtagcgttaccctgtgacactgttttgaggtccacttcctttctttcctctgggaggaatgtcttctgtctttggtattatagttcatcttcccattcttttacttagtgcatttgtgcagatatttttaactctgtacatcagaagagagcccttggtaaccagttttgctcttcttctgccactcctccctgcttgcatctcgttgctggcagagtcctcttgtacttcaagaaagcaaagtgattttgtctgctcctagagcaggtccataccaagtaatagaggcactttagcttccacttggtgggtaaggcctgatcatagtattctgtcagataatgcctaagaatgaccgctgaagaacgttgacccatttgagtacccggtctcagtcgtcatttttaagtccagtgagcattgtggtagttgttcttagattgcagtttcttatgttttgagtttgaagttgattttcagaatgttcttagaaaagaactgcatttttttcctttgtggatctgctttgtttggctgctgggatagataagcatgggcttaaaaaatgtgttcctcccagttttcttgcctttcctgttgtactctgaatttctctccctacctccctcactttcttcctctctccttcctttccttcctttttctctaccaggccatttttcaaatttacatcaaagatacctgaagtgttggtatctgagaatatctgtcactcctcttatctgagaagtgaccttttatttttaagatgactacagacctatttttagatatgttttcagtacaattttgaacagcaactttttaattaaacatcttccagtgttaggaagttgagaaacgttcataggcaagtctgctgttctatgtcaccatcttttgtctcccctagtcccccaggagctctttcctttcccctctagttttgggtgtgcatgtttggagtttgtagtgggtggtttgtaaaactggaccattctgccttgctatgggttgttcaagaaagcctcattcttttctgtgaccctttcgcttttgcattcaccctccttcccacctacctgtcctggggctgttgagcagcataataatcccgggagaatgattcccctcatagaaagacaaaagcatccatcccctcatagttaagtagccactggtgtcctgggaatttctggttggatttggtgccctgaacttttttattaagaaatcagatcccagggtgagagtaacaggccatttggccaagaaagaaacctgtttgtttttcttttgaactatgaaaagaccctgtttgtgaatatattttagaaagagaggaaggatgtctgcagaactttgttctgttttctgccacaaaaatgtgaatagttcagagtgaaaaccttttgtgatggttgatgtctcaggaataagctggatctccaatgttttggggatgctttgagtctcaaaaaaaattgataatcagaaaagtaatttttgtttgtttgtttaatgtatccctgttctgtttttaattaaactccaagtctcattttacatattcttggaaaaacctaagttgcgctgtaatttacataagaagcatgctcaggacctctttgtaccccggggagcctgattctttgggaatgaagcttttcattcttcatacactggccttggcatcctgtggaatttgacccaactagcagctagtcagtctgtcagtgagcagaagagtgaactcttcttgatctttattgctatgtgtgaaaacttggcttcctcactgaacggtgaggaatggatttaaagcatgagctttagtagtatcaagatgccattttcctttttcttgctgtcttggggagcttctgcatgtgaccccctaatcagaaggcatgtttttagtatttcttgggagtgtcagctgtataatgcagcagctgttcaatcccttacccttctctgcaaggacttccttacagcttggtgcagttctttcccagaggccaccactactagacagtctttcttttatcttatggagataaattggcatttaaaaaataatttcacaaggcatgagataaactttcaatagatgatacctttgtgtcatgcctcatggaattatttttagaacaagccagagtccattgagtggtttacctctgcatgtttggagggaacctcacagatgaaacccttaatgaataatgtgtccggggttttttagagagaaggagcactcttaagttaccactttgagacagctcttaacatcttagtgaccatttgtagttttctttttatgaggaacccatgcttctatacttgggcggacaatcgagcttaatgagaagtgacttcccttcaaattccaacagcagacatgcattgtcatgattctgtcttctttttagtgtggtttattgagttcagcagttctcatattctgtttaaataggtacagcattttcaagggcacagatacagagaagctggctttctaggtattgggcttccaagccaagagttttgtccttccacctgtattagttatctattgctgtgtaaaaaattaccctaaatttagtatgttaaaatagtaaacattatctgtcagtttctgtgggttaagaatttgggagtagtttaacatgatggttctggcccatggtatcatgaagttacagtcaagattgaacaggggctgcagtcagctggagctggagaaaccacttccaagttctctctttgtggccgttggcaggatgcctcagtttcttcccatgtgggtctctgcgtagggcagcatgagtgtcctcacaccatgacacctggcttctccctgagcagctgattccagagatcatggggcagggccaggagaaagctgcagtgccttttaagacatagtcttggaaaggacacaccgtcacttcttatcctagttgttagaagcaagccactaagttcagcctgcactcaaggagagaggaattacacatacctctaccccaatggagcagtagcaaagaatttatggacatatcttaaaagcaccacaccccaactggggatgaaagtaggtcaacagggaggtaggtttaatctagataagctgaaagatagattgctatcaaaaacagttctccaagatgtgcatagccaaactgggatagaaggcaaactccccaaagctacctgctggttttgagaggggtggtaagacatggcaattcccaggagtagtagaaaataatatgcctgactaccaacagctcaagtatgcttatttgcacatcctagacttggtgtctgtaagactcagttaccacttttattttcctgtagctaggagttagcaaaaggaactggggccttccagccgagccactaaacctgtcttatttggaatggggattgtccagcaaagggagcaaacatgaattagatgttaagctattgagctgaagaaaagaaagcagttcacatttaggtgaaatagatgatgttatcaggaagccaggttcccaccagagtcggtgcttggtacctggtctctccagtctcaacagactcaggtcaggtctctcacccaggaagcaaccactcaataaaatagagaacatctgagaattacaaatgtctatgcttgattgctcctctaaatccagtgcataggttaaccctgcatgcccatttcttcctgggcttcttgatggcaatgtgttcttaaataactggtcttgtgttcatgctaaagacaaacttacatgaagtttttcagtttaagacattctagtgaatggctgctatgtgtttctggcactcattcctaaccaagtctttagagatttcagatgaccttaaagatgcaatatctttttctttctttctttctttctttttttctgagacaagagttgcgccctgtcgcccaggctggggtgctggagtgcagtggtgcgatctcagctcactgcagcctctgcttcccaggttcaagtgtttctcctgcctcagccttccgagtagctgggattacaggcatgtaccactatgcctggctaatttttatttctatatttttagtagagatggggtttcatcatgtttgccaggctggtctcgaactcctggcctcaagtgatccgcccacctcagcctcccaaagtgctgggattacaggcgcgagcgaccgcgcctggccaaagatgcaaattcttgtttggatttatgctctgcctcttcccagcattttcttatctgtagccctgcttgcttgagagtatacttggataagaagtattgctgttgagggagctataagaaaaggattcttcttccagaagtaaagaagctcactcctttagagtacctttaaatgaatttggtttttctttcttattttgaggtggattggtcttctctttttttgggtttccagctcactgggactctcagaccttacctttccagctcaaacaccattagttaaattccttcattctcattagaatgcagcctgctgagtatgtgggtttcactgccggagtccatcatttagccagtatacatagaggaactgcttcgaatcaaggcaactggtgaagggcttagcatgttggcagcaatatcccagagattgaatctgtttgcattttcctcatctaggataacagctgcttgaagccagggctcttagccctttgcattccccttgagcgaggaagccacactgcctttctgtgtctggttcagagctcttccttcttggcatgttttctggactacatgcacatgggcagctatagattaatctgcaaaacctagtcacttacctacccataatatctgggaaggtgtggtatttgttttaaagaaacattgtttctttgggagggcagtttctgtctggactttgaggtggacttagttatccctacagttctttaactctcagcttttaataaaagatgaaatcagatattgatgcagttgggtcacaattctttagaatgcttctaccccagggccgcttcctgttcctagtcatggttttccagtttagtagtggagtttcttgaggctaacttacagaaatttctaactgaaaactttaagagttattgatacttgttttttcagtcagtcacttacatcacctagcctactctctggaatttaaatttatttctctaggctggtcctggaagttgataaccttttggcaaagcttagatttaggagaaggcttgagtccctgttcagcgggtctgtggattctctttgcttatggctctctgcctgcagccctggcagaccatactgtatgtcatggatacccagtggaaatattactgagatgaaacacatttccaagggtatttaaactctcactctgccacctttctaagggtgggaggctggcagagatgctgcaatgcttgataatcatttggccacactgaaatttccaaagggagctcttgccggtgcttaaaaccaaaactcctggacacttagaaaattccatgaatctagcacaaaatatccattcttgcccaagtgtatcccctttctctccagcttaatcttttttttttttttttttttaaagcccaggccaagggtacttttaactggaaactggggaggagggaagaacactagcagggagctaagaggcaggttgctgggtaagccatcctgctcctacctggtgcctgtatctacattgctgagtgctgtgcgccagtgcctttccttcatctgcagatggagcccatctctttccacctgggtgaggagaccctctgctactccaggggtaaaccttaaagaaggtgtcttgaagagcccaaaggacactcacgtgctaaggtgtccattttatgcatctttaaaatattttatttaaaaaaaaaaatagccctgccctgtcttagtgccactaacggcccagttccatccattctgaatggaaaagcggagactgccagcactttccttggtcttccctttgtctcccatgatgtgttgttccctcatccctcccatccatttcactgtgtgtggatggatagcagagggtaccacgcagtccttgaggcagtcctgtgtgattccatgatcagttgtttttgtattttaactattcttccaaaccagcagatgtttggaaattaaggaaaaaattaaattctcatcaatggttgctgttatagttaaatcagtaaagatcttgagtatcaa

SEQ ID NO: 60009 - DNA, 7485 bp, Homo sapiens
ggccgaccagcttccccaactccctctggctcccgccttcgcccgcttccggtcgtcgtcgtcgccgctgctgccgctgctgttgctcctgaggctgctggctgaggccggaggatcgagcggcggcggcggcggcggctgagagggcggcggcgggagcggagcgggacgagggaacgggaggaagcgagcgaggagcgcgcagagcgcgcttttccgtccgcctgaggagccgaagcagccccggccccgccgccgccgcctgcccgccggacaaagccgagagcccgcgcccacagccatgtcctcgtcagccggcagcggccaccagcccagccagagccgcgccatccccacccgcaccgtggccatcagcgacgccgcgcagctacctcatgactattgcaccacgcccggggggacgctcttctccaccacaccgggaggaactcgaatcatttatgacagaaagtttctgttggatcgtcgcaattctcccatggctcagaccccaccctgccacctgcccaatatcccaggagtcactagccctggcaccttaattgaagactccaaagtagaagtaaacaatttgaacaacttgaacaatcacgacaggaaacatgcagttggggatgatgctcagttcgagatggacatctgactctcctgcaaggattagaagaaaagcagcaacactgatacttgtgtgcacctgatttggccaataggatcaacagtgtcttcctctgggtgccaaatgatgggaagatgagcttcatctgaccatttcttctccctgtctcctgttccccttcccagttaaacaggttagattgaaggcccttgctgtatttctgtagagctaagcagcccttagaggaaaacagttcaactctgactttcctagttgtttttttattgagagccaccctcataccctgtaattttgtcccaaatcaaatatcaacctaccaacaactgcctggctgggaagtctggggaagggatacagagcttggtgggcctaacaccattcatattccttaccctctgtctctcctccctgtatcccacctatggttcagtgttgcaagagtctgggcttggggtctttaaaaccagcagggggaaatgataaaaagagagctgctttcccttttaccttgaggtattcgtccctcgggacagagcacagcttgtgcaactctggtagcgttaccctgtgacactgttttgaggtccacttcctttctttcctctgggaggaatgtcttctgtctttggtattatagttcatcttcccattcttttacttagtgcatttgtgcagatatttttaactctgtacatcagaagagagcccttggtaaccagttttgctcttcttctgccactcctccctgcttgcatctcgttgctggcagagtcctcttgtacttcaagaaagcaaagtgattttgtctgctcctagagcaggtccataccaagtaatagaggcactttagcttccacttggtgggtaaggcctgatcatagtattctgtcagataatgcctaagaatgaccgctgaagaacgttgacccatttgagtacccggtctcagtcgtcatttttaagtccagtgagcattgtggtagttgttcttagattgcagtttcttatgttttgagtttgaagttgattttcagaatgttcttagaaaagaactgcatttttttcctttgtggatctgctttgtttggctgctgggatagataagcatgggcttaaaaaatgtgttcctcccagttttcttgcctttcctgttgtactctgaatttctctccctacctccctcactttcttcctctctccttcctttccttcctttttctctaccaggccatttttcaaatttacatcaaagatacctgaagtgttggtatctgagaatatctgtcactcctcttatctgagaagtgaccttttatttttaagatgactacagacctatttttagatatgttttcagtacaattttgaacagcaactttttaattaaacatcttccagtgttaggaagttgagaaacgttcataggcaagtctgctgttctatgtcaccatcttttgtctcccctagtcccccaggagctctttcctttcccctctagttttgggtgtgcatgtttggagtttgtagtgggtggtttgtaaaactggaccattctgccttgctatgggttgttcaagaaagcctcattcttttctgtgaccctttcgcttttgcattcaccctccttcccacctacctgtcctggggctgttgagcagcataataatcccgggagaatgattcccctcatagaaagacaaaagcatccatcccctcatagttaagtagccactggtgtcctgggaatttctggttggatttggtgccctgaacttttttattaagaaatcagatcccagggtgagagtaacaggccatttggccaagaaagaaacctgtttgtttttcttttgaactatgaaaagaccctgtttgtgaatatattttagaaagagaggaaggatgtctgcagaactttgttctgttttctgccacaaaaatgtgaatagttcagagtgaaaaccttttgtgatggttgatgtctcaggaataagctggatctccaatgttttggggatgctttgagtctcaaaaaaaattgataatcagaaaagtaatttttgtttgtttgtttaatgtatccctgttctgtttttaattaaactccaagtctcattttacatattcttggaaaaacctaagttgcgctgtaatttacataagaagcatgctcaggacctctttgtaccccggggagcctgattctttgggaatgaagcttttcattcttcatacactggccttggcatcctgtggaatttgacccaactagcagctagtcagtctgtcagtgagcagaagagtgaactcttcttgatctttattgctatgtgtgaaaacttggcttcctcactgaacggtgaggaatggatttaaagcatgagctttagtagtatcaagatgccattttcctttttcttgctgtcttggggagcttctgcatgtgaccccctaatcagaaggcatgtttttagtatttcttgggagtgtcagctgtataatgcagcagctgttcaatcccttacccttctctgcaaggacttccttacagcttggtgcagttctttcccagaggccaccactactagacagtctttcttttatcttatggagataaattggcatttaaaaaataatttcacaaggcatgagataaactttcaatagatgatacctttgtgtcatgcctcatggaattatttttagaacaagccagagtccattgagtggtttacctctgcatgtttggagggaacctcacagatgaaacccttaatgaataatgtgtccggggttttttagagagaaggagcactcttaagttaccactttgagacagctcttaacatcttagtgaccatttgtagttttctttttatgaggaacccatgcttctatacttgggcggacaatcgagcttaatgagaagtgacttcccttcaaattccaacagcagacatgcattgtcatgattctgtcttctttttagtgtggtttattgagttcagcagttctcatattctgtttaaataggtacagcattttcaagggcacagatacagagaagctggctttctaggtattgggcttccaagccaagagttttgtccttccacctgtattagttatctattgctgtgtaaaaaattaccctaaatttagtatgttaaaatagtaaacattatctgtcagtttctgtgggttaagaatttgggagtagtttaacatgatggttctggcccatggtatcatgaagttacagtcaagattgaacaggggctgcagtcagctggagctggagaaaccacttccaagttctctctttgtggccgttggcaggatgcctcagtttcttcccatgtgggtctctgcgtagggcagcatgagtgtcctcacaccatgacacctggcttctccctgagcagctgattccagagatcatggggcagggccaggagaaagctgcagtgccttttaagacatagtcttggaaaggacacaccgtcacttcttatcctagttgttagaagcaagccactaagttcagcctgcactcaaggagagaggaattacacatacctctaccccaatggagcagtagcaaagaatttatggacatatcttaaaagcaccacaccccaactggggatgaaagtaggtcaacagggaggtaggtttaatctagataagctgaaagatagattgctatcaaaaacagttctccaagatgtgcatagccaaactgggatagaaggcaaactccccaaagctacctgctggttttgagaggggtggtaagacatggcaattcccaggagtagtagaaaataatatgcctgactaccaacagctcaagtatgcttatttgcacatcctagacttggtgtctgtaagactcagttaccacttttattttcctgtagctaggagttagcaaaaggaactggggccttccagccgagccactaaacctgtcttatttggaatggggattgtccagcaaagggagcaaacatgaattagatgttaagctattgagctgaagaaaagaaagcagttcacatttaggtgaaatagatgatgttatcaggaagccaggttcccaccagagtcggtgcttggtacctggtctctccagtctcaacagactcaggtcaggtctctcacccaggaagcaaccactcaataaaatagagaacatctgagaattacaaatgtctatgcttgattgctcctctaaatccagtgcataggttaaccctgcatgcccatttcttcctgggcttcttgatggcaatgtgttcttaaataactggtcttgtgttcatgctaaagacaaacttacatgaagtttttcagtttaagacattctagtgaatggctgctatgtgtttctggcactcattcctaaccaagtctttagagatttcagatgaccttaaagatgcaatatctttttctttctttctttctttctttttttctgagacaagagttgcgccctgtcgcccaggctggggtgctggagtgcagtggtgcgatctcagctcactgcagcctctgcttcccaggttcaagtgtttctcctgcctcagccttccgagtagctgggattacaggcatgtaccactatgcctggctaatttttatttctatatttttagtagagatggggtttcatcatgtttgccaggctggtctcgaactcctggcctcaagtgatccgcccacctcagcctcccaaagtgctgggattacaggcgcgagcgaccgcgcctggccaaagatgcaaattcttgtttggatttatgctctgcctcttcccagcattttcttatctgtagccctgcttgcttgagagtatacttggataagaagtattgctgttgagggagctataagaaaaggattcttcttccagaagtaaagaagctcactcctttagagtacctttaaatgaatttggtttttctttcttattttgaggtggattggtcttctctttttttgggtttccagctcactgggactctcagaccttacctttccagctcaaacaccattagttaaattccttcattctcattagaatgcagcctgctgagtatgtgggtttcactgccggagtccatcatttagccagtatacatagaggaactgcttcgaatcaaggcaactggtgaagggcttagcatgttggcagcaatatcccagagattgaatctgtttgcattttcctcatctaggataacagctgcttgaagccagggctcttagccctttgcattccccttgagcgaggaagccacactgcctttctgtgtctggttcagagctcttccttcttggcatgttttctggactacatgcacatgggcagctatagattaatctgcaaaacctagtcacttacctacccataatatctgggaaggtgtggtatttgttttaaagaaacattgtttctttgggagggcagtttctgtctggactttgaggtggacttagttatccctacagttctttaactctcagcttttaataaaagatgaaatcagatattgatgcagttgggtcacaattctttagaatgcttctaccccagggccgcttcctgttcctagtcatggttttccagtttagtagtggagtttcttgaggctaacttacagaaatttctaactgaaaactttaagagttattgatacttgttttttcagtcagtcacttacatcacctagcctactctctggaatttaaatttatttctctaggctggtcctggaagttgataaccttttggcaaagcttagatttaggagaaggcttgagtccctgttcagcgggtctgtggattctctttgcttatggctctctgcctgcagccctggcagaccatactgtatgtcatggatacccagtggaaatattactgagatgaaacacatttccaagggtatttaaactctcactctgccacctttctaagggtgggaggctggcagagatgctgcaatgcttgataatcatttggccacactgaaatttccaaagggagctcttgccggtgcttaaaaccaaaactcctggacacttagaaaattccatgaatctagcacaaaatatccattcttgcccaagtgtatcccctttctctccagcttaatcttttttttttttttttttttaaagcccaggccaagggtacttttaactggaaactggggaggagggaagaacactagcagggagctaagaggcaggttgctgggtaagccatcctgctcctacctggtgcctgtatctacattgctgagtgctgtgcgccagtgcctttccttcatctgcagatggagcccatctctttccacctgggtgaggagaccctctgctactccaggggtaaaccttaaagaaggtgtcttgaagagcccaaaggacactcacgtgctaaggtgtccattttatgcatctttaaaatattttatttaaaaaaaaaaatagccctgccctgtcttagtgccactaacggcccagttccatccattctgaatggaaaagcggagactgccagcactttccttggtcttccctttgtctcccatgatgtgttgttccctcatccctcccatccatttcactgtgtgtggatggatagcagagggtaccacgcagtccttgaggcagtcctgtgtgattccatgatcagttgtttttgtattttaactattcttccaaaccagcagatgtttggaaattaaggaaaaaattaaattctcatcaatggttgctgttatagttaaatcagtaaagatcttgagtatcaa

SEQ ID NO: 60010 - DNA, 7485 bp, Homo sapiens
ggccgaccagcttccccaactccctctggctcccgccttcgcccgcttccggtcgtcgtcgtcgccgctgctgccgctgctgttgctcctgaggctgctggctgaggccggaggatcgagcggcggcggcggcggcggctgagagggcggcggcgggagcggagcgggacgagggaacgggaggaagcgagcgaggagcgcgcagagcgcgcttttccgtccgcctgaggagccgaagcagccccggccccgccgccgccgcctgcccgccggacaaagccgagagcccgcgcccacagccatgtcctcgtcagccggcagcggccaccagcccagccagagccgcgccatccccacccgcaccgtggccatcagcgacgccgcgcagctacctcatgactattgcaccacgcccggggggacgctcttctccaccacaccgggaggaactcgaatcatttatgacagaaagtttctgttggatcgtcgcaattctcccatggctcagaccccaccctgccacctgcccaatatcccaggagtcactagccctggcaccttaattgaagactccaaagtagaagtaaacaatttgaacaacttgaacaatcacgacaggaaacatgcagttggggatgatgctcagttcgagatggacatctgactctcctgcaaggattagaagaaaagcagcaacactgatacttgtgtgcacctgatttggccaataggatcaacagtgaaaagacagaagaggcaataccagcagtccccattacagtctccacctccccgtcttcctctgggtgccaaatgatgggaagatgagcttcatctgaccatttcttctccctgtctcctgttccccttcccagttaaacaggttagattgaaggcccttgctgtatttctgtagagctaagcagcccttagaggaaaacagttcaactctgactttcctagttgtttttttattgagagccaccctcataccctgtaattttgtcccaaatcaaatatcaacctaccaacaactgcctggctgggaagtctggggaagggatacagagcttggtgggcctaacaccattcatattccttaccctctgtctctcctccctgtatcccacctatggttcagtgttgcaagagtctgggcttggggtctttaaaaccagcagggggaaatgataaaaagagagctgctttcccttttaccttgaggtattcgtccctcgggacagagcacagcttgtgcaactctggtagcgttaccctgtgacactgttttgaggtccacttcctttctttcctctgggaggaatgtcttctgtctttggtattatagttcatcttcccattcttttacttagtgcatttgtgcagatatttttaactctgtacatcagaagagagcccttggtaaccagttttgctcttcttctgccactcctccctgcttgcatctcgttgctggcagagtcctcttgtacttcaagaaagcaaagtgattttgtctgctcctagagcaggtccataccaagtaatagaggcactttagcttccacttggtgggtaaggcctgatcatagtattctgtcagataatgcctaagaatgaccgctgaagaacgttgacccatttgagtacccggtctcagtcgtcatttttaagtccagtgagcattgtggtagttgttcttagattgcagtttcttatgttttgagtttgaagttgattttcagaatgttcttagaaaagaactgcatttttttcctttgtggatctgctttgtttggctgctgggatagataagcatgggcttaaaaaatgtgttcctcccagttttcttgcctttcctgttgtactctgaatttctctccctacctccctcactttcttcctctctccttcctttccttcctttttctctaccaggccatttttcaaatttacatcaaagatacctgaagtgttggtatctgagaatatctgtcactcctcttatctgagaagtgaccttttatttttaagatgactacagacctatttttagatatgttttcagtacaattttgaacagcaactttttaattaaacatcttccagtgttaggaagttgagaaacgttcataggcaagtctgctgttctatgtcaccatcttttgtctcccctagtcccccaggagctctttcctttcccctctagttttgggtgtgcatgtttggagtttgtagtgggtggttttttctgtgaccctttcgcttttgcattcaccctccttcccacctacctgtcctggggctgttgagcagcataataatcccgggagaatgattcccctcatagaaagacaaaagcatccatcccctcatagttaagtagccactggtgtcctgggaatttctggttggatttggtgccctgaacttttttattaagaaatcagatcccagggtgagagtaacaggccatttggccaagaaagaaacctgtttgtttttcttttgaactatgaaaagaccctgtttgtgaatatattttagaaagagaggaaggatgtctgcagaactttgttctgttttctgccacaaaaatgtgaatagttcagagtgaaaaccttttgtgatggttgatgtctcaggaataagctggatctccaatgttttggggatgctttgagtctcaaaaaaaattgataatcagaaaagtaatttttgtttgtttgtttaatgtatccctgttctgtttttaattaaactccaagtctcattttacatattcttggaaaaacctaagttgcgctgtaatttacataagaagcatgctcaggacctctttgtaccccggggagcctgattctttgggaatgaagcttttcattcttcatacactggccttggcatcctgtggaatttgacccaactagcagctagtcagtctgtcagtgagcagaagagtgaactcttcttgatctttattgctatgtgtgaaaacttggcttcctcactgaacggtgaggaatggatttaaagcatgagctttagtagtatcaagatgccattttcctttttcttgctgtcttggggagcttctgcatgtgaccccctaatcagaaggcatgtttttagtatttcttgggagtgtcagctgtataatgcagcagctgttcaatcccttacccttctctgcaaggacttccttacagcttggtgcagttctttcccagaggccaccactactagacagtctttcttttatcttatggagataaattggcatttaaaaaataatttcacaaggcatgagataaactttcaatagatgatacctttgtgtcatgcctcatggaattatttttagaacaagccagagtccattgagtggtttacctctgcatgtttggagggaacctcacagatgaaacccttaatgaataatgtgtccggggttttttagagagaaggagcactcttaagttaccactttgagacagctcttaacatcttagtgaccatttgtagttttctttttatgaggaacccatgcttctatacttgggcggacaatcgagcttaatgagaagtgacttcccttcaaattccaacagcagacatgcattgtcatgattctgtcttctttttagtgtggtttattgagttcagcagttctcatattctgtttaaataggtacagcattttcaagggcacagatacagagaagctggctttctaggtattgggcttccaagccaagagttttgtccttccacctgtattagttatctattgctgtgtaaaaaattaccctaaatttagtatgttaaaatagtaaacattatctgtcagtttctgtgggttaagaatttgggagtagtttaacatgatggttctggcccatggtatcatgaagttacagtcaagattgaacaggggctgcagtcagctggagctggagaaaccacttccaagttctctctttgtggccgttggcaggatgcctcagtttcttcccatgtgggtctctgcgtagggcagcatgagtgtcctcacaccatgacacctggcttctccctgagcagctgattccagagatcatggggcagggccaggagaaagctgcagtgccttttaagacatagtcttggaaaggacacaccgtcacttcttatcctagttgttagaagcaagccactaagttcagcctgcactcaaggagagaggaattacacatacctctaccccaatggagcagtagcaaagaatttatggacatatcttaaaagcaccacaccccaactggggatgaaagtaggtcaacagggaggtaggtttaatctagataagctgaaagatagattgctatcaaaaacagttctccaagatgtgcatagccaaactgggatagaaggcaaactccccaaagctacctgctggttttgagaggggtggtaagacatggcaattcccaggagtagtagaaaataatatgcctgactaccaacagctcaagtatgcttatttgcacatcctagacttggtgtctgtaagactcagttaccacttttattttcctgtagctaggagttagcaaaaggaactggggccttccagccgagccactaaacctgtcttatttggaatggggattgtccagcaaagggagcaaacatgaattagatgttaagctattgagctgaagaaaagaaagcagttcacatttaggtgaaatagatgatgttatcaggaagccaggttcccaccagagtcggtgcttggtacctggtctctccagtctcaacagactcaggtcaggtctctcacccaggaagcaaccactcaataaaatagagaacatctgagaattacaaatgtctatgcttgattgctcctctaaatccagtgcataggttaaccctgcatgcccatttcttcctgggcttcttgatggcaatgtgttcttaaataactggtcttgtgttcatgctaaagacaaacttacatgaagtttttcagtttaagacattctagtgaatggctgctatgtgtttctggcactcattcctaaccaagtctttagagatttcagatgaccttaaagatgcaatatctttttctttctttctttctttctttttttctgagacaagagttgcgccctgtcgcccaggctggggtgctggagtgcagtggtgcgatctcagctcactgcagcctctgcttcccaggttcaagtgtttctcctgcctcagccttccgagtagctgggattacaggcatgtaccactatgcctggctaatttttatttctatatttttagtagagatggggtttcatcatgtttgccaggctggtctcgaactcctggcctcaagtgatccgcccacctcagcctcccaaagtgctgggattacaggcgcgagcgaccgcgcctggccaaagatgcaaattcttgtttggatttatgctctgcctcttcccagcattttcttatctgtagccctgcttgcttgagagtatacttggataagaagtattgctgttgagggagctataagaaaaggattcttcttccagaagtaaagaagctcactcctttagagtacctttaaatgaatttggtttttctttcttattttgaggtggattggtcttctctttttttgggtttccagctcactgggactctcagaccttacctttccagctcaaacaccattagttaaattccttcattctcattagaatgcagcctgctgagtatgtgggtttcactgccggagtccatcatttagccagtatacatagaggaactgcttcgaatcaaggcaactggtgaagggcttagcatgttggcagcaatatcccagagattgaatctgtttgcattttcctcatctaggataacagctgcttgaagccagggctcttagccctttgcattccccttgagcgaggaagccacactgcctttctgtgtctggttcagagctcttccttcttggcatgttttctggactacatgcacatgggcagctatagattaatctgcaaaacctagtcacttacctacccataatatctgggaaggtgtggtatttgttttaaagaaacattgtttctttgggagggcagtttctgtctggactttgaggtggacttagttatccctacagttctttaactctcagcttttaataaaagatgaaatcagatattgatgcagttgggtcacaattctttagaatgcttctaccccagggccgcttcctgttcctagtcatggttttccagtttagtagtggagtttcttgaggctaacttacagaaatttctaactgaaaactttaagagttattgatacttgttttttcagtcagtcacttacatcacctagcctactctctggaatttaaatttatttctctaggctggtcctggaagttgataaccttttggcaaagcttagatttaggagaaggcttgagtccctgttcagcgggtctgtggattctctttgcttatggctctctgcctgcagccctggcagaccatactgtatgtcatggatacccagtggaaatattactgagatgaaacacatttccaagggtatttaaactctcactctgccacctttctaagggtgggaggctggcagagatgctgcaatgcttgataatcatttggccacactgaaatttccaaagggagctcttgccggtgcttaaaaccaaaactcctggacacttagaaaattccatgaatctagcacaaaatatccattcttgcccaagtgtatcccctttctctccagcttaatcttttttttttttttttttttaaagcccaggccaagggtacttttaactggaaactggggaggagggaagaacactagcagggagctaagaggcaggttgctgggtaagccatcctgctcctacctggtgcctgtatctacattgctgagtgctgtgcgccagtgcctttccttcatctgcagatggagcccatctctttccacctgggtgaggagaccctctgctactccaggggtaaaccttaaagaaggtgtcttgaagagcccaaaggacactcacgtgctaaggtgtccattttatgcatctttaaaatattttatttaaaaaaaaaaatagccctgccctgtcttagtgccactaacggcccagttccatccattctgaatggaaaagcggagactgccagcactttccttggtcttccctttgtctcccatgatgtgttgttccctcatccctcccatccatttcactgtgtgtggatggatagcagagggtaccacgcagtccttgaggcagtcctgtgtgattccatgatcagttgtttttgtattttaactattcttccaaaccagcagatgtttggaaattaaggaaaaaattaaattctcatcaatggttgctgttatagttaaatcagtaaagatcttgagtatcaa

SEQ ID NO: 60011 - DNA, 6952 bp, Homo sapiens
ggccgaccagcttccccaactccctctggctcccgccttcgcccgcttccggtcgtcgtcgtcgccgctgctgccgctgctgttgctcctgaggctgctggctgaggccggaggatcgagcggcggcggcggcggcggctgagagggcggcggcgggagcggagcgggacgagggaacgggaggaagcgagcgaggagcgcgcagagcgcgcttttccgtccgcctgaggagccgaagcagccccggccccgccgccgccgcctgcccgccggacaaagccgagagcccgcgcccacagccatgtcctcgtcagccggcagcggccaccagcccagccagagccgcgccatccccacccgcaccgtggccatcagcgacgccgcgcagctacctcatgactattgcaccacgcccggggggacgctcttctccaccacaccgggaggaactcgaatcatttatgacagaaagtttctgttggatcgtcgcaattctcccatggctcagaccccaccctgccacctgcccaatatcccaggagtcactagccctggcaccttaattgaagactccaaagtagaagtaaacaatttgaacaacttgaacaatcacgacaggaaacatgcagttggggatgatgctcagttcgagatggacatctgactctcctgcaaggattagaagaaaagcagcaacactgatacttgtgtgcacctgatttggccaataggatcaacagtgaaaagacagaagaggcaataccagcattcccattcttttacttagtgcatttgtgcagatatttttaactctgtacatcagaagagagcccttggtaaccagttttgctcttcttctgccactcctccctgcttgcatctcgttgctggcagagtcctcttgtacttcaagaaagcaaagtgattttgtctgctcctagagcaggtccataccaagtaatagaggcactttagcttccacttggtgggtaaggcctgatcatagtattctgtcagataatgcctaagaatgaccgctgaagaacgttgacccatttgagtacccggtctcagtcgtcatttttaagtccagtgagcattgtggtagttgttcttagattgcagtttcttatgttttgagtttgaagttgattttcagaatgttcttagaaaagaactgcatttttttcctttgtggatctgctttgtttggctgctgggatagataagcatgggcttaaaaaatgtgttcctcccagttttcttgcctttcctgttgtactctgaatttctctccctacctccctcactttcttcctctctccttcctttccttcctttttctctaccaggccatttttcaaatttacatcaaagatacctgaagtgttggtatctgagaatatctgtcactcctcttatctgagaagtgaccttttatttttaagatgactacagacctatttttagatatgttttcagtacaattttgaacagcaactttttaattaaacatcttccagtgttaggaagttgagaaacgttcataggcaagtctgctgttctatgtcaccatcttttgtctcccctagtcccccaggagctctttcctttcccctctagttttgggtgtgcatgtttggagtttgtagtgggtggtttgtaaaactggaccattctgccttgctatgggttgttcaagaaagcctcattcttttctgtgaccctttcgcttttgcattcaccctccttcccacctacctgtcctggggctgttgagcagcataataatcccgggagaatgattcccctcatagaaagacaaaagcatccatcccctcatagttaagtagccactggtgtcctgggaatttctggttggatttggtgccctgaacttttttattaagaaatcagatcccagggtgagagtaacaggccatttggccaagaaagaaacctgtttgtttttcttttgaactatgaaaagaccctgtttgtgaatatattttagaaagagaggaaggatgtctgcagaactttgttctgttttctgccacaaaaatgtgaatagttcagagtgaaaaccttttgtgatggttgatgtctcaggaataagctggatctccaatgttttggggatgctttgagtctcaaaaaaaattgataatcagaaaagtaatttttgtttgtttgtttaatgtatccctgttctgtttttaattaaactccaagtctcattttacatattcttggaaaaacctaagttgcgctgtaatttacataagaagcatgctcaggacctctttgtaccccggggagcctgattctttgggaatgaagcttttcattcttcatacactggccttggcatcctgtggaatttgacccaactagcagctagtcagtctgtcagtgagcagaagagtgaactcttcttgatctttattgctatgtgtgaaaacttggcttcctcactgaacggtgaggaatggatttaaagcatgagctttagtagtatcaagatgccattttcctttttcttgctgtcttggggagcttctgcatgtgaccccctaatcagaaggcatgtttttagtatttcttgggagtgtcagctgtataatgcagcagctgttcaatcccttacccttctctgcaaggacttccttacagcttggtgcagttctttcccagaggccaccactactagacagtctttcttttatcttatggagataaattggcatttaaaaaataatttcacaaggcatgagataaactttcaatagatgatacctttgtgtcatgcctcatggaattatttttagaacaagccagagtccattgagtggtttacctctgcatgtttggagggaacctcacagatgaaacccttaatgaataatgtgtccggggttttttagagagaaggagcactcttaagttaccactttgagacagctcttaacatcttagtgaccatttgtagttttctttttatgaggaacccatgcttctatacttgggcggacaatcgagcttaatgagaagtgacttcccttcaaattccaacagcagacatgcattgtcatgattctgtcttctttttagtgtggtttattgagttcagcagttctcatattctgtttaaataggtacagcattttcaagggcacagatacagagaagctggctttctaggtattgggcttccaagccaagagttttgtccttccacctgtattagttatctattgctgtgtaaaaaattaccctaaatttagtatgttaaaatagtaaacattatctgtcagtttctgtgggttaagaatttgggagtagtttaacatgatggttctggcccatggtatcatgaagttacagtcaagattgaacaggggctgcagtcagctggagctggagaaaccacttccaagttctctctttgtggccgttggcaggatgcctcagtttcttcccatgtgggtctctgcgtagggcagcatgagtgtcctcacaccatgacacctggcttctccctgagcagctgattccagagatcatggggcagggccaggagaaagctgcagtgccttttaagacatagtcttggaaaggacacaccgtcacttcttatcctagttgttagaagcaagccactaagttcagcctgcactcaaggagagaggaattacacatacctctaccccaatggagcagtagcaaagaatttatggacatatcttaaaagcaccacaccccaactggggatgaaagtaggtcaacagggaggtaggtttaatctagataagctgaaagatagattgctatcaaaaacagttctccaagatgtgcatagccaaactgggatagaaggcaaactccccaaagctacctgctggttttgagaggggtggtaagacatggcaattcccaggagtagtagaaaataatatgcctgactaccaacagctcaagtatgcttatttgcacatcctagacttggtgtctgtaagactcagttaccacttttattttcctgtagctaggagttagcaaaaggaactggggccttccagccgagccactaaacctgtcttatttggaatggggattgtccagcaaagggagcaaacatgaattagatgttaagctattgagctgaagaaaagaaagcagttcacatttaggtgaaatagatgatgttatcaggaagccaggttcccaccagagtcggtgcttggtacctggtctctccagtctcaacagactcaggtcaggtctctcacccaggaagcaaccactcaataaaatagagaacatctgagaattacaaatgtctatgcttgattgctcctctaaatccagtgcataggttaaccctgcatgcccatttcttcctgggcttcttgatggcaatgtgttcttaaataactggtcttgtgttcatgctaaagacaaacttacatgaagtttttcagtttaagacattctagtgaatggctgctatgtgtttctggcactcattcctaaccaagtctttagagatttcagatgaccttaaagatgcaatatctttttctttctttctttctttctttttttctgagacaagagttgcgccctgtcgcccaggctggggtgctggagtgcagtggtgcgatctcagctcactgcagcctctgcttcccaggttcaagtgtttctcctgcctcagccttccgagtagctgggattacaggcatgtaccactatgcctggctaatttttatttctatatttttagtagagatggggtttcatcatgtttgccaggctggtctcgaactcctggcctcaagtgatccgcccacctcagcctcccaaagtgctgggattacaggcgcgagcgaccgcgcctggccaaagatgcaaattcttgtttggatttatgctctgcctcttcccagcattttcttatctgtagccctgcttgcttgagagtatacttggataagaagtattgctgttgagggagctataagaaaaggattcttcttccagaagtaaagaagctcactcctttagagtacctttaaatgaatttggtttttctttcttattttgaggtggattggtcttctctttttttgggtttccagctcactgggactctcagaccttacctttccagctcaaacaccattagttaaattccttcattctcattagaatgcagcctgctgagtatgtgggtttcactgccggagtccatcatttagccagtatacatagaggaactgcttcgaatcaaggcaactggtgaagggcttagcatgttggcagcaatatcccagagattgaatctgtttgcattttcctcatctaggataacagctgcttgaagccagggctcttagccctttgcattccccttgagcgaggaagccacactgcctttctgtgtctggttcagagctcttccttcttggcatgttttctggactacatgcacatgggcagctatagattaatctgcaaaacctagtcacttacctacccataatatctgggaaggtgtggtatttgttttaaagaaacattgtttctttgggagggcagtttctgtctggactttgaggtggacttagttatccctacagttctttaactctcagcttttaataaaagatgaaatcagatattgatgcagttgggtcacaattctttagaatgcttctaccccagggccgcttcctgttcctagtcatggttttccagtttagtagtggagtttcttgaggctaacttacagaaatttctaactgaaaactttaagagttattgatacttgttttttcagtcagtcacttacatcacctagcctactctctggaatttaaatttatttctctaggctggtcctggaagttgataaccttttggcaaagcttagatttaggagaaggcttgagtccctgttcagcgggtctgtggattctctttgcttatggctctctgcctgcagccctggcagaccatactgtatgtcatggatacccagtggaaatattactgagatgaaacacatttccaagggtatttaaactctcactctgccacctttctaagggtgggaggctggcagagatgctgcaatgcttgataatcatttggccacactgaaatttccaaagggagctcttgccggtgcttaaaaccaaaactcctggacacttagaaaattccatgaatctagcacaaaatatccattcttgcccaagtgtatcccctttctctccagcttaatcttttttttttttttttttttaaagcccaggccaagggtacttttaactggaaactggggaggagggaagaacactagcagggagctaagaggcaggttgctgggtaagccatcctgctcctacctggtgcctgtatctacattgctgagtgctgtgcgccagtgcctttccttcatctgcagatggagcccatctctttccacctgggtgaggagaccctctgctactccaggggtaaaccttaaagaaggtgtcttgaagagcccaaaggacactcacgtgctaaggtgtccattttatgcatctttaaaatattttatttaaaaaaaaaaatagccctgccctgtcttagtgccactaacggcccagttccatccattctgaatggaaaagcggagactgccagcactttccttggtcttccctttgtctcccatgatgtgttgttccctcatccctcccatccatttcactgtgtgtggatggatagcagagggtaccacgcagtccttgaggcagtcctgtgtgattccatgatcagttgtttttgtattttaactattcttccaaaccagcagatgtttggaaattaaggaaaaaattaaattctcatcaatggttgctgttatagttaaatcagtaaagatcttgagtatcaa

SEQ ID NO: 60012 - DNA, 7477 bp, Homo sapiens
ggccgaccagcttccccaactccctctggctcccgccttcgcccgcttccggtcgtcgtcgtcgccgctgctgccgctgctgttgctcctgaggctgctggctgaggccggaggatcgagcggcggcggcggcggcggctgagagggcggcggcgggagcggagcgggacgagggaacgggaggaagcgagcgaggagcgcgcagagcgcgcttttccgtccgcctgaggagccgaagcagccccggccccgccgccgccgcctgcccgccggacaaagccgagagcccgcgcccacagccatgtcctcgtcagccggcagcggccaccagcccagccagagccgcgccatccccacccgcaccgtggccatcagcgacgccgcgcagctacctcatgactattgcaccacgcccggggggacgctcttctccaccacaccgggaggaactcgaatcatttatgacagaaagtttctgttggatcgtcgcaattctcccatggctcagaccccaccctgccacctgcccaatatcccaggagtcactagccctggcaccttaattgaagactccaaagtagaagtaaacaatttgaacaacttgaacaatcacgacaggaaacatgcagttggggatgatgctcagttcgagatggacatctgactctcctgcaaggattagaagaaaagcagcaacactgatacttgtgtgcacctgatttggccaataggatcaacagtgaaaagacagaagaggcaataccagcagtccccattacagtctccacctccccgtcttcctctgggtgccaaatgatgggaagatgagcttcatctgaccatttcttctccctgtctcctgttccccttcccagttaaacaggttagattgaaggcccttgctgtatttctgtagagctaagcagcccttagaggaaaacagttcaactctgactttcctagttgtttttttattgagagccaccctcataccctgtaattttgtcccaaatcaaatatcaacctaccaacaactgcctggctgggaagtctggggaagggatacagagcttggtgggcctaacaccattcatattccttaccctctgtctctcctccctgtatcccacctatggttcagtgttgcaagagtctgggcttggggtctttaaaaccagcagggggaaatgataaaaagagagctgctttcccttttaccttgaggtattcgtccctcgggacagagcacagcttgtgcaactctggtagcgttaccctgtgacactgttttgaggtccacttcctttctttcctctgggaggaatgtcttctgtctttggtattatagttcatcttcccattcttttacttagtgcatttgtgcagatatttttaactctgtacatcagaagagagcccttggtaaccagttttgctcttcttctgccactcctccctgcttgcatctcgttgctggcagagtcctcttgtacttcaagaaagcaaagtgattttgtctgctcctagagcaggtccataccaagtaatagaggcactttagcttccacttggtgggtaaggcctgatcatagtattctgtcagataatgcctaagaatgaccgctgaagaacgttgacccatttgagtacccggtctcagtcgtcatttttaagtccagtgagcattgtggtagttgttcttagattgcagtttcttatgttttgagtttgaagttgattttcagaatgttcttagaaaagaactgcatttttttcctttgtggatctgctttgtttggctgctgggatagataagcatgggcttaaaaaatgtgttcctcccagttttcttgcctttcctgttgtactctgaatttctctccctacctccctcactttcttcctctctccttcctttccttcctttttctctaccaggccatttttcaaatttacatcaaagatacctgaagtgttggtatctgagaatatctgtcactcctcttatctgagaagtgaccttttatttttaagatgactacagacctatttttagatatgttttcagtacaattttgaacagcaactttttaattaaacatcttccagtgttaggaagttgagaaacgttcataggcaagtctgctgttctatgtcaccatcttttgtctcccctagtcccccaggagctctttcctttcccctctagttttgggtgtgcatgtttggagtttgtagtgggtggtttgtaaaactggaccattctgccttgctatgggttgttcaagaaagcctcattcttttctgtgaccctttcgcttttgcattcaccctccttcccacctacctgtcctggggctgttgagcagcataataatcccgggagaatgattcccctcatagaaagacttggtgccctgaacttttttattaagaaatcagatcccagggtgagagtaacaggccatttggccaagaaagaaacctgtttgtttttcttttgaactatgaaaagaccctgtttgtgaatatattttagaaagagaggaaggatgtctgcagaactttgttctgttttctgccacaaaaatgtgaatagttcagagtgaaaaccttttgtgatggttgatgtctcaggaataagctggatctccaatgttttggggatgctttgagtctcaaaaaaaattgataatcagaaaagtaatttttgtttgtttgtttaatgtatccctgttctgtttttaattaaactccaagtctcattttacatattcttggaaaaacctaagttgcgctgtaatttacataagaagcatgctcaggacctctttgtaccccggggagcctgattctttgggaatgaagcttttcattcttcatacactggccttggcatcctgtggaatttgacccaactagcagctagtcagtctgtcagtgagcagaagagtgaactcttcttgatctttattgctatgtgtgaaaacttggcttcctcactgaacggtgaggaatggatttaaagcatgagctttagtagtatcaagatgccattttcctttttcttgctgtcttggggagcttctgcatgtgaccccctaatcagaaggcatgtttttagtatttcttgggagtgtcagctgtataatgcagcagctgttcaatcccttacccttctctgcaaggacttccttacagcttggtgcagttctttcccagaggccaccactactagacagtctttcttttatcttatggagataaattggcatttaaaaaataatttcacaaggcatgagataaactttcaatagatgatacctttgtgtcatgcctcatggaattatttttagaacaagccagagtccattgagtggtttacctctgcatgtttggagggaacctcacagatgaaacccttaatgaataatgtgtccggggttttttagagagaaggagcactcttaagttaccactttgagacagctcttaacatcttagtgaccatttgtagttttctttttatgaggaacccatgcttctatacttgggcggacaatcgagcttaatgagaagtgacttcccttcaaattccaacagcagacatgcattgtcatgattctgtcttctttttagtgtggtttattgagttcagcagttctcatattctgtttaaataggtacagcattttcaagggcacagatacagagaagctggctttctaggtattgggcttccaagccaagagttttgtccttccacctgtattagttatctattgctgtgtaaaaaattaccctaaatttagtatgttaaaatagtaaacattatctgtcagtttctgtgggttaagaatttgggagtagtttaacatgatggttctggcccatggtatcatgaagttacagtcaagattgaacaggggctgcagtcagctggagctggagaaaccacttccaagttctctctttgtggccgttggcaggatgcctcagtttcttcccatgtgggtctctgcgtagggcagcatgagtgtcctcacaccatgacacctggcttctccctgagcagctgattccagagatcatggggcagggccaggagaaagctgcagtgccttttaagacatagtcttggaaaggacacaccgtcacttcttatcctagttgttagaagcaagccactaagttcagcctgcactcaaggagagaggaattacacatacctctaccccaatggagcagtagcaaagaatttatggacatatcttaaaagcaccacaccccaactggggatgaaagtaggtcaacagggaggtaggtttaatctagataagctgaaagatagattgctatcaaaaacagttctccaagatgtgcatagccaaactgggatagaaggcaaactccccaaagctacctgctggttttgagaggggtggtaagacatggcaattcccaggagtagtagaaaataatatgcctgactaccaacagctcaagtatgcttatttgcacatcctagacttggtgtctgtaagactcagttaccacttttattttcctgtagctaggagttagcaaaaggaactggggccttccagccgagccactaaacctgtcttatttggaatggggattgtccagcaaagggagcaaacatgaattagatgttaagctattgagctgaagaaaagaaagcagttcacatttaggtgaaatagatgatgttatcaggaagccaggttcccaccagagtcggtgcttggtacctggtctctccagtctcaacagactcaggtcaggtctctcacccaggaagcaaccactcaataaaatagagaacatctgagaattacaaatgtctatgcttgattgctcctctaaatccagtgcataggttaaccctgcatgcccatttcttcctgggcttcttgatggcaatgtgttcttaaataactggtcttgtgttcatgctaaagacaaacttacatgaagtttttcagtttaagacattctagtgaatggctgctatgtgtttctggcactcattcctaaccaagtctttagagatttcagatgaccttaaagatgcaatatctttttctttctttctttctttctttttttctgagacaagagttgcgccctgtcgcccaggctggggtgctggagtgcagtggtgcgatctcagctcactgcagcctctgcttcccaggttcaagtgtttctcctgcctcagccttccgagtagctgggattacaggcatgtaccactatgcctggctaatttttatttctatatttttagtagagatggggtttcatcatgtttgccaggctggtctcgaactcctggcctcaagtgatccgcccacctcagcctcccaaagtgctgggattacaggcgcgagcgaccgcgcctggccaaagatgcaaattcttgtttggatttatgctctgcctcttcccagcattttcttatctgtagccctgcttgcttgagagtatacttggataagaagtattgctgttgagggagctataagaaaaggattcttcttccagaagtaaagaagctcactcctttagagtacctttaaatgaatttggtttttctttcttattttgaggtggattggtcttctctttttttgggtttccagctcactgggactctcagaccttacctttccagctcaaacaccattagttaaattccttcattctcattagaatgcagcctgctgagtatgtgggtttcactgccggagtccatcatttagccagtatacatagaggaactgcttcgaatcaaggcaactggtgaagggcttagcatgttggcagcaatatcccagagattgaatctgtttgcattttcctcatctaggataacagctgcttgaagccagggctcttagccctttgcattccccttgagcgaggaagccacactgcctttctgtgtctggttcagagctcttccttcttggcatgttttctggactacatgcacatgggcagctatagattaatctgcaaaacctagtcacttacctacccataatatctgggaaggtgtggtatttgttttaaagaaacattgtttctttgggagggcagtttctgtctggactttgaggtggacttagttatccctacagttctttaactctcagcttttaataaaagatgaaatcagatattgatgcagttgggtcacaattctttagaatgcttctaccccagggccgcttcctgttcctagtcatggttttccagtttagtagtggagtttcttgaggctaacttacagaaatttctaactgaaaactttaagagttattgatacttgttttttcagtcagtcacttacatcacctagcctactctctggaatttaaatttatttctctaggctggtcctggaagttgataaccttttggcaaagcttagatttaggagaaggcttgagtccctgttcagcgggtctgtggattctctttgcttatggctctctgcctgcagccctggcagaccatactgtatgtcatggatacccagtggaaatattactgagatgaaacacatttccaagggtatttaaactctcactctgccacctttctaagggtgggaggctggcagagatgctgcaatgcttgataatcatttggccacactgaaatttccaaagggagctcttgccggtgcttaaaaccaaaactcctggacacttagaaaattccatgaatctagcacaaaatatccattcttgcccaagtgtatcccctttctctccagcttaatcttttttttttttttttttttaaagcccaggccaagggtacttttaactggaaactggggaggagggaagaacactagcagggagctaagaggcaggttgctgggtaagccatcctgctcctacctggtgcctgtatctacattgctgagtgctgtgcgccagtgcctttccttcatctgcagatggagcccatctctttccacctgggtgaggagaccctctgctactccaggggtaaaccttaaagaaggtgtcttgaagagcccaaaggacactcacgtgctaaggtgtccattttatgcatctttaaaatattttatttaaaaaaaaaaatagccctgccctgtcttagtgccactaacggcccagttccatccattctgaatggaaaagcggagactgccagcactttccttggtcttccctttgtctcccatgatgtgttgttccctcatccctcccatccatttcactgtgtgtggatggatagcagagggtaccacgcagtccttgaggcagtcctgtgtgattccatgatcagttgtttttgtattttaactattcttccaaaccagcagatgtttggaaattaaggaaaaaattaaattctcatcaatggttgctgttatagttaaatcagtaaagatcttgagtatcaa

SEQ ID NO: 60013 - DNA, 5951 bp, Homo sapiens
cggtaccctcataggttcgcaggctaggaatgaccgctgaagaacgttgacccatttgagtacccggtctcagtcgtcatttttaagtccagtgagcattgtggtagttgttcttagattgcagtttcttatgttttgagtttgaagttgattttcagaatgttcttagaaaagaactgcatttttttcctttgtggatctgctttgtttggctgctgggatagataagcatgggcttaaaaaatgtgttcctcccagttttcttgcctttcctgttgtactctgaatttctctccctacctccctcactttcttcctctctccttcctttccttcctttttctctaccaggccatttttcaaatttacatcaaagatacctgaagtgttggtatctgagaatatctgtcactcctcttatctgagaagtgaccttttatttttaagatgactacagacctatttttagatatgttttcagtacaattttgaacagcaactttttaattaaacatcttccagtgttaggaagttgagaaacgttcataggcaagtctgctgttctatgtcaccatcttttgtctcccctagtcccccaggagctctttcctttcccctctagttttgggtgtgcatgtttggagtttgtagtgggtggtttgtaaaactggaccattctgccttgctatgggttgttcaagaaagcctcattcttttctgtgaccctttcgcttttgcattcaccctccttcccacctacctgtcctggggctgttgagcagcataataatcccgggagaatgattcccctcatagaaagacaaaagcatccatcccctcatagttaagtagccactggtgtcctgggaatttctggttggatttggtgccctgaacttttttattaagaaatcagatcccagggtgagagtaacaggccatttggccaagaaagaaacctgtttgtttttcttttgaactatgaaaagaccctgtttgtgaatatattttagaaagagaggaaggatgtctgcagaactttgttctgttttctgccacaaaaatgtgaatagttcagagtgaaaaccttttgtgatggttgatgtctcaggaataagctggatctccaatgttttggggatgctttgagtctcaaaaaaaattgataatcagaaaagtaatttttgtttgtttgtttaatgtatccctgttctgtttttaattaaactccaagtctcattttacatattcttggaaaaacctaagttgcgctgtaatttacataagaagcatgctcaggacctctttgtaccccggggagcctgattctttgggaatgaagcttttcattcttcatacactggccttggcatcctgtggaatttgacccaactagcagctagtcagtctgtcagtgagcagaagagtgaactcttcttgatctttattgctatgtgtgaaaacttggcttcctcactgaacggtgaggaatggatttaaagcatgagctttagtagtatcaagatgccattttcctttttcttgctgtcttggggagcttctgcatgtgaccccctaatcagaaggcatgtttttagtatttcttgggagtgtcagctgtataatgcagcagctgttcaatcccttacccttctctgcaaggacttccttacagcttggtgcagttctttcccagaggccaccactactagacagtctttcttttatcttatggagataaattggcatttaaaaaataatttcacaaggcatgagataaactttcaatagatgatacctttgtgtcatgcctcatggaattatttttagaacaagccagagtccattgagtggtttacctctgcatgtttggagggaacctcacagatgaaacccttaatgaataatgtgtccggggttttttagagagaaggagcactcttaagttaccactttgagacagctcttaacatcttagtgaccatttgtagttttctttttatgaggaacccatgcttctatacttgggcggacaatcgagcttaatgagaagtgacttcccttcaaattccaacagcagacatgcattgtcatgattctgtcttctttttagtgtggtttattgagttcagcagttctcatattctgtttaaataggtacagcattttcaagggcacagatacagagaagctggctttctaggtattgggcttccaagccaagagttttgtccttccacctgtattagttatctattgctgtgtaaaaaattaccctaaatttagtatgttaaaatagtaaacattatctgtcagtttctgtgggttaagaatttgggagtagtttaacatgatggttctggcccatggtatcatgaagttacagtcaagattgaacaggggctgcagtcagctggagctggagaaaccacttccaagttctctctttgtggccgttggcaggatgcctcagtttcttcccatgtgggtctctgcgtagggcagcatgagtgtcctcacaccatgacacctggcttctccctgagcagctgattccagagatcatggggcagggccaggagaaagctgcagtgccttttaagacatagtcttggaaaggacacaccgtcacttcttatcctagttgttagaagcaagccactaagttcagcctgcactcaaggagagaggaattacacatacctctaccccaatggagcagtagcaaagaatttatggacatatcttaaaagcaccacaccccaactggggatgaaagtaggtcaacagggaggtaggtttaatctagataagctgaaagatagattgctatcaaaaacagttctccaagatgtgcatagccaaactgggatagaaggcaaactccccaaagctacctgctggttttgagaggggtggtaagacatggcaattcccaggagtagtagaaaataatatgcctgactaccaacagctcaagtatgcttatttgcacatcctagacttggtgtctgtaagactcagttaccacttttattttcctgtagctaggagttagcaaaaggaactggggccttccagccgagccactaaacctgtcttatttggaatggggattgtccagcaaagggagcaaacatgaattagatgttaagctattgagctgaagaaaagaaagcagttcacatttaggtgaaatagatgatgttatcaggaagccaggttcccaccagagtcggtgcttggtacctggtctctccagtctcaacagactcaggtcaggtctctcacccaggaagcaaccactcaataaaatagagaacatctgagaattacaaatgtctatgcttgattgctcctctaaatccagtgcataggttaaccctgcatgcccatttcttcctgggcttcttgatggcaatgtgttcttaaataactggtcttgtgttcatgctaaagacaaacttacatgaagtttttcagtttaagacattctagtgaatggctgctatgtgtttctggcactcattcctaaccaagtctttagagatttcagatgaccttaaagatgcaatatctttttctttctttctttctttctttttttctgagacaagagttgcgccctgtcgcccaggctggggtgctggagtgcagtggtgcgatctcagctcactgcagcctctgcttcccaggttcaagtgtttctcctgcctcagccttccgagtagctgggattacaggcatgtaccactatgcctggctaatttttatttctatatttttagtagagatggggtttcatcatgtttgccaggctggtctcgaactcctggcctcaagtgatccgcccacctcagcctcccaaagtgctgggattacaggcgcgagcgaccgcgcctggccaaagatgcaaattcttgtttggatttatgctctgcctcttcccagcattttcttatctgtagccctgcttgcttgagagtatacttggataagaagtattgctgttgagggagctataagaaaaggattcttcttccagaagtaaagaagctcactcctttagagtacctttaaatgaatttggtttttctttcttattttgaggtggattggtcttctctttttttgggtttccagctcactgggactctcagaccttacctttccagctcaaacaccattagttaaattccttcattctcattagaatgcagcctgctgagtatgtgggtttcactgccggagtccatcatttagccagtatacatagaggaactgcttcgaatcaaggcaactggtgaagggcttagcatgttggcagcaatatcccagagattgaatctgtttgcattttcctcatctaggataacagctgcttgaagccagggctcttagccctttgcattccccttgagcgaggaagccacactgcctttctgtgtctggttcagagctcttccttcttggcatgttttctggactacatgcacatgggcagctatagattaatctgcaaaacctagtcacttacctacccataatatctgggaaggtgtggtatttgttttaaagaaacattgtttctttgggagggcagtttctgtctggactttgaggtggacttagttatccctacagttctttaactctcagcttttaataaaagatgaaatcagatattgatgcagttgggtcacaattctttagaatgcttctaccccagggccgcttcctgttcctagtcatggttttccagtttagtagtggagtttcttgaggctaacttacagaaatttctaactgaaaactttaagagttattgatacttgttttttcagtcagtcacttacatcacctagcctactctctggaatttaaatttatttctctaggctggtcctggaagttgataaccttttggcaaagcttagatttaggagaaggcttgagtccctgttcagcgggtctgtggattctctttgcttatggctctctgcctgcagccctggcagaccatactgtatgtcatggatacccagtggaaatattactgagatgaaacacatttccaagggtatttaaactctcactctgccacctttctaagggtgggaggctggcagagatgctgcaatgcttgataatcatttggccacactgaaatttccaaagggagctcttgccggtgcttaaaaccaaaactcctggacacttagaaaattccatgaatctagcacaaaatatccattcttgcccaagtgtatcccctttctctccagcttaatcttttttttttttttttttttaaagcccaggccaagggtacttttaactggaaactggggaggagggaagaacactagcagggagctaagaggcaggttgctgggtaagccatcctgctcctacctggtgcctgtatctacattgctgagtgctgtgcgccagtgcctttccttcatctgcagatggagcccatctctttccacctgggtgaggagaccctctgctactccaggggtaaaccttaaagaaggtgtcttgaagagcccaaaggacactcacgtgctaaggtgtccattttatgcatctttaaaatattttatttaaaaaaaaaaatagccctgccctgtcttagtgccactaacggcccagttccatccattctgaatggaaaagcggagactgccagcactttccttggtcttccctttgtctcccatgatgtgttgttccctcatccctcccatccatttcactgtgtgtggatggatagcagagggtaccacgcagtccttgaggcagtcctgtgtgattccatgatcagttgtttttgtattttaactattcttccaaaccagcagatgtttggaaattaaggaaaaaattaaattctcatcaatggttgctgttatagttaaatcagtaaagatcttgagtatcaa

SEQ ID NO: 60014 - DNA, 4581 bp, Homo sapiens
ggccgaccagcttccccaactccctctggctcccgccttcgcccgcttccggtcgtcgtcgtcgccgctgctgccgctgctgttgctcctgaggctgctggctgaggccggaggatcgagcggcggcggcggcggcggctgagagggcggcggcgggagcggagcgggacgagggaacgggaggaagcgagcgaggagcgcgcagagcgcgcttttccgtccgcctgaggagccgaagcagccccggccccgccgccgccgcctgcccgccggacaaagccgagagcccgcgcccacagccatgtcctcgtcagccggcagcggccaccagcccagccagagccgcgccatccccacccgcaccgtggccatcagcgacgccgcgcagctacctcatgactattgcaccacgcccggggggacgctcttctccaccacaccgggaggaactcgaatcatttatgacagaaagtttctgttggatcgtcgcaattctcccatggctcagaccccaccctgccacctgcccaatatcccaggagtcactagccctggcaccttaattgaagactccaaagtagaagtaaacaatttgaacaacttgaacaatcacgacaggaaacatgcagttggggatgatgctcagttcgagatggacatctgactctcctgcaaggattagaagaaaagcagcaacactgatacttgtgtgcacctgatttggccaataggatcaacagtgaaaagacagaagaggcaataccagcagtccccattacagtctccacctccccgtcttcctctgggtgccaaatgatgggaagatgagcttcatctgaccatttcttctccctgtctcctgttccccttcccagttaaacaggttagattgaaggcccttgctgtatttctgtagagctaagcagcccttagaggaaaacagttcaactctgactttcctagttgtttttttattgagagccaccctcataccctgtaattttgtcccaaatcaaatatcaacctaccaacaactgcctggctgggaagtctggggaagggatacagagcttggtgggcctaacaccattcatattccttaccctctgtctctcctccctgtatcccacctatggttcagtgttgcaagagtctgggcttggggtctttaaaaccagcagggggaaatgataaaaagagagctgctttcccttttaccttgaggtattcgtccctcgggacagagcacagcttgtgcaactctggtagcgttaccctgtgacactgttttgaggtccacttcctttctttcctctgggaggaatgtcttctgtctttggtattatagttcatcttcccattcttttacttagtgcatttgtgcagatatttttaactctgtacatcagaagagagcccttggtaaccagttttgctcttcttctgccactcctccctgcttgcatctcgttgctggcagagtcctcttgtacttcaagaaagcaaagtgattttgtctgctcctagagcaggtccataccaagtaatagaggcactttagcttccacttggtgggtaaggcctgatcatagtattctgtcagataatgcctaagaatgaccgctgaagaacgttgacccatttgagtacccggtctcagtcgtcatttttaagtccagtgagcattgtggtagttgttcttagattgcagtttcttatgttttgagtttgaagttgattttcagaatgttcttagaaaagaactgcatttttttcctttgtggatctgctttgtttggctgctgggatagataagcatgggcttaaaaaatgtgttcctcccagttttcttgcctttcctgttgtactctgaatttctctccctacctccctcactttcttcctctctccttcctttccttcctttttctctaccaggccatttttcaaatttacatcaaagatacctgaagtgttggtatctgagaatatctgtcactcctcttatctgagaagtgaccttttatttttaagatgactacagacctatttttagatatgttttcagtacaattttgaacagcaactttttaattaaacatcttccagtgttaggaagttgagaaacgttcataggcaagtctgctgttctatgtcaccatcttttgtctcccctagtcccccaggagctctttcctttcccctctagttttgggtgtgcatgtttggagtttgtagtgggtggtttgtaaaactggaccattctgccttgctatgggttgttcaagaaagcctcattcttttctgtgaccctttcgcttttgcattcaccctccttcccacctacctgtcctggggctgttgagcagcataataatcccgggagaatgattcccctcatagaaagacaaaagcatccatcccctcatagttaagtagccactggtgtcctgggaatttctggttggatttggtgccctgaacttttttattaagaaatcagatcccagggtgagagtaacaggccatttggccaagaaagaaacctgtttgtttttcttttgaactatgaaaagaccctgtttgtgaatatattttagaaagagaggaaggatgtctgcagaactttgttctgttttctgccacaaaaatgtgaatagttcagagtgaaaaccttttgtgatggttgatgtctcaggaataagctggatctccaatgttttggggatgctttgagtctcaaaaaaaattgataatcagaaaagtaatttttgtttgtttgtttaatgtatccctgttctgtttttaattaaactccaagtctcattttacatattcttggaaaaacctaagttgcgctgtaatttacataagaagcatgctcaggacctctttgtaccccggggagcctgattctttgggaatgaagcttttcattcttcatacactggccttggcatcctgtggaatttgacccaactagcagctagtcagtctgtcagtgagcagaagagtgaactcttcttgatctttattgctatgtgtgaaaacttggcttcctcactgaacggtgaggaatggatttaaagcatgagctttagtagtatcaagatgccattttcctttttcttgctgtcttggggagcttctgcatgtgaccccctaatcagaaggcatgtttttagtatttcttgggagtgtcagctgtataatgcagcagctgttcaatcccttacccttctctgcaaggacttccttacagcttggtgcagttctttcccagaggccaccactactagacagtctttcttttatcttatggagataaattggcatttaaaaaataatttcacaaggcatgagataaactttcaatagatgatacctttgtgtcatgcctcatggaattatttttagaacaagccagagtccattgagtggtttacctctgcatgtttggagggaacctcacagatgaaacccttaatgaataatgtgtccggggttttttagagagaaggagcactcttaagttaccactttgagacagctcttaacatcttagtgaccatttgtagttttctttttatgaggaacccatgcttctatacttgggcggacaatcgagcttaatgagaagtgacttcccttcaaattccaacagcagacatgcattgtcatgattctgtcttctttttagtgtggtttattgagttcagcagttctcatattctgtttaaataggtacagcattttcaagggcacagatacagagaagctggctttctaggtattgggcttccaagccaagagttttgtccttccacctgtattagttatctattgctgtgtaaaaaattaccctaaatttagtatgttaaaatagtaaacattatctgtcagtttctgtgggttaagaatttgggagtagtttaacatgatggttctggcccatggtatcatgaagttacagtcaagattgaacaggggctgcagtcagctggagctggagaaaccacttccaagttctctctttgtggccgttggcaggatgcctcagtttcttcccatgtgggtctctgcgtagggcagcatgagtgtcctcacaccatgacacctggcttctccctgagcagctgattccagagatcatggggtaaaccttaaagaaggtgtcttgaagagcccaaaggacactcacgtgctaaggtgtccattttatgcatctttaaaatattttatttaaaaaaaaaaatagccctgccctgtcttagtgccactaacggcccagttccatccattctgaatggaaaagcggagactgccagcactttccttggtcttccctttgtctcccatgatgtgttgttccctcatccctcccatccatttcactgtgtgtggatggatagcagagggtaccacgcagtccttgaggcagtcctgtgtgattccatgatcagttgtttttgtattttaactattcttccaaaccagcagatgtttggaaattaaggaaaaaattaaattctcatcaatggttgctgttatagttaaatcagtaaagatcttgagtatcaa

SEQ ID NO: 60015 - DNA, 4633 bp, Homo sapiens
ggccgaccagcttccccaactccctctggctcccgccttcgcccgcttccggtcgtcgtcgtcgccgctgctgccgctgctgttgctcctgaggctgctggctgaggccggaggatcgagcggcggcggcggcggcggctgagagggcggcggcgggagcggagcgggacgagggaacgggaggaagcgagcgaggagcgcgcagagcgcgcttttccgtccgcctgaggagccgaagcagccccggccccgccgccgccgcctgcccgccggacaaagccgagagcccgcgcccacagccatgtcctcgtcagccggcagcggccaccagcccagccagagccgcgccatccccacccgcaccgtggccatcagcgacgccgcgcagctacctcatgactattgcaccacgcccggggggacgctcttctccaccacaccgggaggaactcgaatcatttatgacagaaagtttctgttggatcgtcgcaattctcccatggctcagaccccaccctgccacctgcccaatatcccaggagtcactagccctggcaccttaattgaagactccaaagtagaagtaaacaatttgaacaacttgaacaatcacgacaggaaacatgcagttggggatgatgctcagttcgagatggacatctgactctcctgcaaggattagaagaaaagcagcaacactgatacttgtgtgcacctgatttggccaataggatcaacagtgaaaagacagaagaggcaataccagcagtccccattacagtctccacctccccgtcttcctctgggtgccaaatgatgggaagatgagcttcatctgaccatttcttctccctgtctcctgttccccttcccagttaaacaggttagattgaaggcccttgctgtatttctgtagagctaagcagcccttagaggaaaacagttcaactctgactttcctagttgtttttttattgagagccaccctcataccctgtaattttgtcccaaatcaaatatcaacctaccaacaactgcctggctgggaagtctggggaagggatacagagcttggtgggcctaacaccattcatattccttaccctctgtctctcctccctgtatcccacctatggttcagtgttgcaagagtctgggcttggggtctttaaaaccagcagggggaaatgataaaaagagagctgctttcccttttaccttgaggtattcgtccctcgggacagagcacagcttgtgcaactctggtagcgttaccctgtgacactgttttgaggtccacttcctttctttcctctgggaggaatgtcttctgtctttggtattatagttcatcttcccattcttttacttagtgcatttgtgcagatatttttaactctgtacatcagaagagagcccttggtaaccagttttgctcttcttctgccactcctccctgcttgcatctcgttgctggcagagtcctcttgtacttcaagaaagcaaagtgattttgtctgctcctagagcaggtccataccaagtaatagaggcactttagcttccacttggtgggtaaggcctgatcatagtattctgtcagataatgcctaagaatgaccgctgaagaacgttgacccatttgagtacccggtctcagtcgtcatttttaagtccagtgagcattgtggtagttgttcttagattgcagtttcttatgttttgagtttgaagttgattttcagaatgttcttagaaaagaactgcatttttttcctttgtggatctgctttgtttggctgctgggatagataagcatgggcttaaaaaatgtgttcctcccagttttcttgcctttcctgttgtactctgaatttctctccctacctccctcactttcttcctctctccttcctttccttcctttttctctaccaggccatttttcaaatttacatcaaagatacctgaagtgttggtatctgagaatatctgtcactcctcttatctgagaagtgaccttttatttttaagatgactacagacctatttttagatatgttttcagtacaattttgaacagcaactttttaattaaacatcttccagtgttaggaagttgagaaacgttcataggcaagtctgctgttctatgtcaccatcttttgtctcccctagtcccccaggagctctttcctttcccctctagttttgggtgtgcatgtttggagtttgtagtgggtggtttgtaaaactggaccattctgccttgctatgggttgttcaagaaagcctcattcttttctgtgaccctttcgcttttgcattcaccctccttcccacctacctgtcctggggctgttgagcagcataataatcccgggagaatgattcccctcatagaaagacaaaagcatccatcccctcatagttaagtagccactggtgtcctgggaatttctggttggatttggtgccctgaacttttttattaagaaatcagatcccagggtgagagtaacaggccatttggccaagaaagaaacctgtttgtttttcttttgaactatgaaaagaccctgtttgtgaatatattttagaaagagaggaaggatgtctgcagaactttgttctgttttctgccacaaaaatgtgaatagttcagagtgaaaaccttttgtgatggttgatgtctcaggaataagctggatctccaatgttttggggatgctttgagtctcaaaaaaaattgataatcagaaaagtaatttttgtttgtttgtttaatgtatccctgttctgtttttaattaaactccaagtctcattttacatattcttggaaaaacctaagttgcgctgtaatttacataagaagcatgctcaggacctctttgtaccccggggagcctgattctttgggaatgaagcttttcattcttcatacactggccttggcatcctgtggaatttgacccaactagcagctagtcagtctgtcagtgagcagaagagtgaactcttcttgatctttattgctatgtgtgaaaacttggcttcctcactgaacggtgaggaatggatttaaagcatgagctttagtagtatcaagatgccattttcctttttcttgctgtcttggggagcttctgcatgtgaccccctaatcagaaggcatgtttttagtatttcttgggagtgtcagctgtataatgcagcagctgttcaatcccttacccttctctgcaaggacttccttacagcttggtgcagttctttcccagaggccaccactactagacagtctttcttttatcttatggagataaattggcatttaaaaaataatttcacaaggcatgagataaactttcaatagatgatacctttgtgtcatgcctcatggaattatttttagaacaagccagagtccattgagtggtttacctctgcatgtttggagggaacctcacagatgaaacccttaatgaataatgtgtccggggttttttagagagaaggagcactcttaagttaccactttgagacagctcttaacatcttagtgaccatttgtagttttctttttatgaggaacccatgcttctatacttgggcggacaatcgagcttaatgagaagtgacttcccttcaaattccaacagcagacatgcattgtcatgattctgtcttctttttagtgtggtttattgagttcagcagttctcatattctgtttaaataggtacagcattttcaagggcacagatacagagaagctggctttctaggtattgggcttccaagccaagagttttgtccttccacctgtattagttatctattgctgtgtaaaaaattaccctaaatttagtatgttaaaatagtaaacattatctgtcagtttctgtgggttaagaatttgggagtagtttaacatgatggttctggcccatggtatcatgaagttacagtcaagattgaacaggggctgcagtcagctggagctggagaaaccacttccaagttctctctttgtggccgttggcaggatgcctcagtttcttcccatgtgggtctctgcgtagggcagcatgagtgtcctcacaccatgacacctggcttctccctgagcagctgattccagagatcatggggtaaaccttaaagaaggtgtcttgaagagcccaaaggacactcacgtgctaaggtgtccattttatgcatctttaaaatattttatttaaaaaaaaaaatagccctgccctgtcttagtgccactaacggcccagttccatccattctgaatggaaaagcggagactgccagcactttccttggtcttccctttgtctcccatgatgtgttgttccctcatccctcccatccatttcactgtgtgtggatggatagcagagggtaccacgcagtccttgaggcagtcctgtgtgattccatgatcagttgtttttgtattttaactattcttccaaaccagcagatgtttggaaattaaggaaaaaattaaattctcatcaatggttgctgttatagttaaatcagtaaagatcttgagtatcaaaaaaaaaaaataaagtcgagcggccgcgaatttagtagtagtaggcggccgc

SEQ ID NO: 60016 - DNA, 5800 bp, Homo sapiens
gatcgaagcggatgccattcaaagcattctttgcagcctctgcttctccattcagccgaggctgctgggatagataagcatgggcttaaaaaatgtgttcctcccagttttcttgcctttcctgttgtactctgaatttctctccctacctccctcactttcttcctctctccttcctttccttcctttttctctaccaggccatttttcaaatttacatcaaagatacctgaagtgttggtatctgagaatatctgtcactcctcttatctgagaagtgaccttttatttttaagatgactacagacctatttttagatatgttttcagtacaattttgaacagcaactttttaattaaacatcttccagtgttaggaagttgagaaacgttcataggcaagtctgctgttctatgtcaccatcttttgtctcccctagtcccccaggagctctttcctttcccctctagttttgggtgtgcatgtttggagtttgtagtgggtggtttgtaaaactggaccattctgccttgctatgggttgttcaagaaagcctcattcttttctgtgaccctttcgcttttgcattcaccctccttcccacctacctgtcctggggctgttgagcagcataataatcccgggagaatgattcccctcatagaaagacaaaagcatccatcccctcatagttaagtagccactggtgtcctgggaatttctggttggatttggtgccctgaacttttttattaagaaatcagatcccagggtgagagtaacaggccatttggccaagaaagaaacctgtttgtttttcttttgaactatgaaaagaccctgtttgtgaatatattttagaaagagaggaaggatgtctgcagaactttgttctgttttctgccacaaaaatgtgaatagttcagagtgaaaaccttttgtgatggttgatgtctcaggaataagctggatctccaatgttttggggatgctttgagtctcaaaaaaaattgataatcagaaaagtaatttttgtttgtttgtttaatgtatccctgttctgtttttaattaaactccaagtctcattttacatattcttggaaaaacctaagttgcgctgtaatttacataagaagcatgctcaggacctctttgtaccccggggagcctgattctttgggaatgaagcttttcattcttcatacactggccttggcatcctgtggaatttgacccaactagcagctagtcagtctgtcagtgagcagaagagtgaactcttcttgatctttattgctatgtgtgaaaacttggcttcctcactgaacggtgaggaatggatttaaagcatgagctttagtagtatcaagatgccattttcctttttcttgctgtcttggggagcttctgcatgtgaccccctaatcagaaggcatgtttttagtatttcttgggagtgtcagctgtataatgcagcagctgttcaatcccttacccttctctgcaaggacttccttacagcttggtgcagttctttcccagaggccaccactactagacagtctttcttttatcttatggagataaattggcatttaaaaaataatttcacaaggcatgagataaactttcaatagatgatacctttgtgtcatgcctcatggaattatttttagaacaagccagagtccattgagtggtttacctctgcatgtttggagggaacctcacagatgaaacccttaatgaataatgtgtccggggttttttagagagaaggagcactcttaagttaccactttgagacagctcttaacatcttagtgaccatttgtagttttctttttatgaggaacccatgcttctatacttgggcggacaatcgagcttaatgagaagtgacttcccttcaaattccaacagcagacatgcattgtcatgattctgtcttctttttagtgtggtttattgagttcagcagttctcatattctgtttaaataggtacagcattttcaagggcacagatacagagaagctggctttctaggtattgggcttccaagccaagagttttgtccttccacctgtattagttatctattgctgtgtaaaaaattaccctaaatttagtatgttaaaatagtaaacattatctgtcagtttctgtgggttaagaatttgggagtagtttaacatgatggttctggcccatggtatcatgaagttacagtcaagattgaacaggggctgcagtcagctggagctggagaaaccacttccaagttctctctttgtggccgttggcaggatgcctcagtttcttcccatgtgggtctctgcgtagggcagcatgagtgtcctcacaccatgacacctggcttctccctgagcagctgattccagagatcatggggcagggccaggagaaagctgcagtgccttttaagacatagtcttggaaaggacacaccgtcacttcttatcctagttgttagaagcaagccactaagttcagcctgcactcaaggagagaggaattacacatacctctaccccaatggagcagtagcaaagaatttatggacatatcttaaaagcaccacaccccaactggggatgaaagtaggtcaacagggaggtaggtttaatctagataagctgaaagatagattgctatcaaaaacagttctccaagatgtgcatagccaaactgggatagaaggcaaactccccaaagctacctgctggttttgagaggggtggtaagacatggcaattcccaggagtagtagaaaataatatgcctgactaccaacagctcaagtatgcttatttgcacatcctagacttggtgtctgtaagactcagttaccacttttattttcctgtagctaggagttagcaaaaggaactggggccttccagccgagccactaaacctgtcttatttggaatggggattgtccagcaaagggagcaaacatgaattagatgttaagctattgagctgaagaaaagaaagcagttcacatttaggtgaaatagatgatgttatcaggaagccaggttcccaccagagtcggtgcttggtacctggtctctccagtctcaacagactcaggtcaggtctctcacccaggaagcaaccactcaataaaatagagaacatctgagaattacaaatgtctatgcttgattgctcctctaaatccagtgcataggttaaccctgcatgcccatttcttcctgggcttcttgatggcaatgtgttcttaaataactggtcttgtgttcatgctaaagacaaacttacatgaagtttttcagtttaagacattctagtgaatggctgctatgtgtttctggcactcattcctaaccaagtctttagagatttcagatgaccttaaagatgcaatatctttttctttctttctttctttctttttttctgagacaagagttgcgccctgtcgcccaggctggggtgctggagtgcagtggtgcgatctcagctcactgcagcctctgcttcccaggttcaagtgtttctcctgcctcagccttccgagtagctgggattacaggcatgtaccactatgcctggctaatttttatttctatatttttagtagagatggggtttcatcatgtttgccaggctggtctcgaactcctggcctcaagtgatccgcccacctcagcctcccaaagtgctgggattacaggcgcgagcgaccgcgcctggccaaagatgcaaattcttgtttggatttatgctctgcctcttcccagcattttcttatctgtagccctgcttgcttgagagtatacttggataagaagtattgctgttgagggagctataagaaaaggattcttcttccagaagtaaagaagctcactcctttagagtacctttaaatgaatttggtttttctttcttattttgaggtggattggtcttctctttttttgggtttccagctcactgggactctcagaccttacctttccagctcaaacaccattagttaaattccttcattctcattagaatgcagcctgctgagtatgtgggtttcactgccggagtccatcatttagccagtatacatagaggaactgcttcgaatcaaggcaactggtgaagggcttagcatgttggcagcaatatcccagagattgaatctgtttgcattttcctcatctaggataacagctgcttgaagccagggctcttagccctttgcattccccttgagcgaggaagccacactgcctttctgtgtctggttcagagctcttccttcttggcatgttttctggactacatgcacatgggcagctatagattaatctgcaaaacctagtcacttacctacccataatatctgggaaggtgtggtatttgttttaaagaaacattgtttctttgggagggcagtttctgtctggactttgaggtggacttagttatccctacagttctttaactctcagcttttaataaaagatgaaatcagatattgatgcagttgggtcacaattctttagaatgcttctaccccagggccgcttcctgttcctagtcatggttttccagtttagtagtggagtttcttgaggctaacttacagaaatttctaactgaaaactttaagagttattgatacttgttttttcagtcagtcacttacatcacctagcctactctctggaatttaaatttatttctctaggctggtcctggaagttgataaccttttggcaaagcttagatttaggagaaggcttgagtccctgttcagcgggtctgtggattctctttgcttatggctctctgcctgcagccctggcagaccatactgtatgtcatggatacccagtggaaatattactgagatgaaacacatttccaagggtatttaaactctcactctgccacctttctaagggtgggaggctggcagagatgctgcaatgcttgataatcatttggccacactgaaatttccaaagggagctcttgccggtgcttaaaaccaaaactcctggacacttagaaaattccatgaatctagcacaaaatatccattcttgcccaagtgtatcccctttctctccagcttaatcttttttttttttttttttttaaagcccaggccaagggtacttttaactggaaactggggaggagggaagaacactagcagggagctaagaggcaggttgctgggtaagccatcctgctcctacctggtgcctgtatctacattgctgagtgctgtgcgccagtgcctttccttcatctgcagatggagcccatctctttccacctgggtgaggagaccctctgctactccaggggtaaaccttaaagaaggtgtcttgaagagcccaaaggacactcacgtgctaaggtgtccattttatgcatctttaaaatattttatttaaaaaaaaaaatagccctgccctgtcttagtgccactaacggcccagttccatccattctgaatggaaaagcggagactgccagcactttccttggtcttccctttgtctcccatgatgtgttgttccctcatccctcccatccatttcactgtgtgtggatggatagcagagggtaccacgcagtccttgaggcagtcctgtgtgattccatgatcagttgtttttgtattttaactattcttccaaaccagcagatgtttggaaattaaggaaaaaattaaattctcatcaatggttgctgttatagttaaatcagtaaagatcttgagtatcaa

SEQ ID NO: 60017 - DNA, 3121 bp, Homo sapiens
ggccgaccagcttccccaactccctctggctcccgccttcgcccgcttccggtcgtcgtcgtcgccgctgctgccgctgctgttgctcctgaggctgctggctgaggccggaggatcgagcggcggcggcggcggcggctgagagggcggcggcgggagcggagcgggacgagggaacgggaggaagcgagcgaggagcgcgcagagcgcgcttttccgtccgcctgaggagccgaagcagccccggccccgccgccgccgcctgcccgccggacaaagccgagagcccgcgcccacagccatgtcctcgtcagccggcagcggccaccagcccagccagagccgcgccatccccacccgcaccgtggccatcagcgacgccgcgcagctacctcatgactattgcaccacgcccggggggacgctcttctccaccacaccgggaggaactcgaatcatttatgacagaaagtttctgttggatcgtcgcaattctcccatggctcagaccccaccctgccacctgcccaatatcccaggagtcactagccctggcaccttaattgaagactccaaagtagaagtaaacaatttgaacaacttgaacaatcacgacaggaaacatgcagttggggatgatgctcagttcgagatggacatctgactctcctgcaaggattagaagaaaagcagcaacactgatacttgtgtgcacctgatttggccaataggatcaacagtgaaaagacagaagaggcaataccagcagtccccattacagtctccacctccccgtcttcctctgggtgccaaatgatgggaagatgagcttcatctgaccatttcttctccctgtctcctgttccccttcccagttaaacaggttagattgaaggcccttgctgtatttctgtagagctaagcagcccttagaggaaaacagttcaactctgactttcctagttgtttttttattgagagccaccctcataccctgtaattttgtcccaaatcaaatatcaacctaccaacaactgcctggctgggaagtctggggaagggatacagagcttggtgggcctaacaccattcatattccttaccctctgtctctcctccctgtatcccacctatggttcagtgttgcaagagtctgggcttggggtctttaaaaccagcagggggaaatgataaaaagagagctgctttcccttttaccttgaggtattcgtccctcgggacagagcacagcttgtgcaactctggtagcgttaccctgtgacactgttttgaggtccacttcctttctttcctctgggaggaatgtcttctgtctttggtattatagttcatcttcccattcttttacttagtgcatttgtgcagatatttttaactctgtacatcagaagagagcccttggtaaccagttttgctcttcttctgccactcctccctgcttgcatctcgttgctggcagagtcctcttgtacttcaagaaagcaaagtgattttgtctgctcctagagcaggtccataccaagtaatagaggcactttagcttccacttggtgggtaaggcctgatcatagtattctgtcagataatgcctaagaatgaccgctgaagaacgttgacccatttgagtacccggtctcagtcgtcatttttaagtccagtgagcattgtggtagttgttcttagattgcagtttcttatgttttgagtttgaagttgattttcagaatgttcttagaaaagaactgcatttttttcctttgtggatctgctttgtttggctgctgggatagataagcatgggcttaaaaaatgtgttcctcccagttttcttgcctttcctgttgtactctgaatttctctccctacctccctcactttcttcctctctccttcctttccttcctttttctctaccaggccatttttcaaatttacatcaaagatacctgaagtgttggtatctgagaatatctgtcactcctcttatctgagaagtgaccttttatttttaagatgactacagacctatttttagatatgttttcagtacaattttgaacagcaactttttaattaaacatcttccagtgttaggaagttgagaaacgttcataggcaagtctgctgttctatgtcaccatcttttgtctcccctagtcccccaggagctctttcctttcccctctagttttgggtgtgcatgtttggagtttgtagtgggtggtttgtaaaactggaccattctgccttgctatgggttgttcaagaaagcctcattcttttctgtgaccctttcgcttttgcattcaccctccttcccacctacctgtcctggggctgttgagcagcataataatcccgggagaatgattcccctcatagaaagacaaaagcatccatcccctcatagttaagtagccactggtgtcctgggaatttctggttggatttggtgccctgaacttttttattaagaaatcagatcccagggtgagagtaacaggccatttggccaagaaagaaacctgtttgtttttcttttgaactatgaaaagaccctgtttgtgaatatattttagaaagagaggaaggatgtctgcagaactttgttctgttttctgccacaaaaatgtgaatagttcagagtgaaaaccttttgtgatggttgatgtctcaggaataagctggatctccaatgttttggggatgctttgagtctcaaaaaaaattgataatcagaaaagtaatttttgtttgtttgtttaatgtatccctgttctgtttttaattaaactccaagtctcattttaaaaaaaaaaaaaaaaaaaaaaaaaaaaaaaactttggggggggcttgggccccggaaaaagtttctctaaaccatcggtgggggccgggggcccaggtgggcacgcgtgaccgtgggcacaaagcgtgtcccgaggaagaacccgggccagagacaggggggcgggatttcccccccaagaaaaaagccccgggggggaacccccaggctcttggaacaatcccaaggggaggccggaggcacaaagggatgcctaccacaggggcccccagggaatccgaattaaatac

SEQ ID NO: 60018 - DNA, 2975 bp, Homo sapiens
ggccgaccagcttccccaactccctctggctcccgccttcgcccgcttccggtcgtcgtcgtcgccgctgctgccgctgctgttgctcctgaggctgctggctgaggccggaggatcgagcggcggcggcggcggcggctgagagggcggcggcgggagcggagcgggacgagggaacgggaggaagcgagcgaggagcgcgcagagcgcgcttttccgtccgcctgaggagccgaagcagccccggccccgccgccgccgcctgcccgccggacaaagccgagagcccgcgcccacagccatgtcctcgtcagccggcagcggccaccagcccagccagagccgcgccatccccacccgcaccgtggccatcagcgacgccgcgcagctacctcatgactattgcaccacgcccggggggacgctcttctccaccacaccgggaggaactcgaatcatttatgacagaaagtttctgttggatcgtcgcaattctcccatggctcagaccccaccctgccacctgcccaatatcccaggagtcactagccctggcaccttaattgaagactccaaagtagaagtaaacaatttgaacaacttgaacaatcacgacaggaaacatgcagttggggatgatgctcagttcgagatggacatctgactctcctgcaaggattagaagaaaagcagcaacactgatacttgtgtgcacctgatttggccaataggatcaacagtgaaaagacagaagaggcaataccagcagtccccattacagtctccacctccccgtcttcctctgggtgccaaatgatgggaagatgagcttcatctgaccatttcttctccctgtctcctgttccccttcccagttaaacaggttagattgaaggcccttgctgtatttctgtagagctaagcagcccttagaggaaaacagttcaactctgactttcctagttgtttttttattgagagccaccctcataccctgtaattttgtcccaaatcaaatatcaacctaccaacaactgcctggctgggaagtctggggaagggatacagagcttggtgggcctaacaccattcatattccttaccctctgtctctcctccctgtatcccacctatggttcagtgttgcaagagtctgggcttggggtctttaaaaccagcagggggaaatgataaaaagagagctgctttcccttttaccttgaggtattcgtccctcgggacagagcacagcttgtgcaactctggtagcgttaccctgtgacactgttttgaggtccacttcctttctttcctctgggaggaatgtcttctgtctttggtattatagttcatcttcccattcttttacttagtgcatttgtgcagatatttttaactctgtacatcagaagagagcccttggtaaccagttttgctcttcttctgccactcctccctgcttgcatctcgttgctggcagagtcctcttgtacttcaagaaagcaaagtgattttgtctgctcctagagcaggtccataccaagtaatagaggcactttagcttccacttggtgggtaaggcctgatcatagtattctgtcagataatgcctaagaatgaccgctgaagaacgttgacccatttgagtacccggtctcagtcgtcatttttaagtccagtgagcattgtggtagttgttcttagattgcagtttcttatgttttgagtttgaagttgattttcagaatgttcttagaaaagaactgcatttttttcctttgtggatctgctttgtttggctgctgggatagataagcatgggcttaaaaaatgtgttcctcccagttttcttgcctttcctgttgtactctgaatttctctccctacctccctcactttcttcctctctccttcctttccttcctttttctctaccaggccatttttcaaatttacatcaaagatacctgaagtgttggtatctgagaatatctgtcactcctcttatctgagaagtgaccttttatttttaagatgactacagacctatttttagatatgttttcagtacaattttgaacagcaactttttaattaaacatcttccagtgttaggaagttgagaaacgttcataggcaagtctgctgttctatgtcaccatcttttgtctcccctagtcccccaggagctctttcctttcccctctagttttgggtgtgcatgtttggagtttgtagtgggtggtttgtaaaactggaccattctgccttgctatgggttgttcaagaaagcctcattcttttctgtgaccctttcgcttttgcattcaccctccttcccacctacctgtcctggggctgttgagcagcataataatcccgggagaatgattcccctcatagaaagacaaaagcatccatcccctcatagttaagtagccactggtgtcctgggaatttctggttggatttggtgccctgaacttttttattaagaaatcagatcccagggtgagagtaacaggccatttggccaagaaagaaacctgtttgtttttcttttgaactatgaaaagaccctgtttgtgaatatattttagaaagagaggaaggatgtctgcagaactttgttctgttttctgccacaaaaatgtgaatagttcagagtgaaaaccttttgtgatggttgatgtctcaggaataagctggatctccaatgttttggggatgctttgagtctcaaaaaaaattgataatcagaaaagtaatttttgtttgtttgtttaatgtatccctgttctgtttttaattaaactccaagtctcattttaaacgcgagggaggagaggacacacagagaaggagcgaggagcgcggccgcgcggcgagagggccgcgcagcagggggggggcggcggcggcgagccccggcaggccgagggggcggggaggacgagggagagggagagagagag

SEQ ID NO: 60019 - DNA, 4298 bp, Homo sapiens
ataaaagaaagactgtctagtagtggtggcctctgggaaagaactgccaccactactagacagtctttcttttatcttatggagataaattggcatttaaaaaataatttcacaaggcatgagataaactttcaatagatgatacctttgtgtcatgcctcatggaattatttttagaacaagccagagtccattgagtggtttacctctgcatgtttggagggaacctcacagatgaaacccttaatgaataatgtgtccggggttttttagagagaaggagcactcttaagttaccactttgagacagctcttaacatcttagtgaccatttgtagttttctttttatgaggaacccatgcttctatacttgggcggacaatcgagcttaatgagaagtgacttcccttcaaattccaacagcagacatgcattgtcatgattctgtcttctttttagtgtggtttattgagttcagcagttctcatattctgtttaaataggtacagcattttcaagggcacagatacagagaagctggctttctaggtattgggcttccaagccaagagttttgtccttccacctgtattagttatctattgctgtgtaaaaaattaccctaaatttagtatgttaaaatagtaaacattatctgtcagtttctgtgggttaagaatttgggagtagtttaacatgatggttctggcccatggtatcatgaagttacagtcaagattgaacaggggctgcagtcagctggagctggagaaaccacttccaagttctctctttgtggccgttggcaggatgcctcagtttcttcccatgtgggtctctgcgtagggcagcatgagtgtcctcacaccatgacacctggcttctccctgagcagctgattccagagatcatggggcagggccaggagaaagctgcagtgccttttaagacatagtcttggaaaggacacaccgtcacttcttatcctagttgttagaagcaagccactaagttcagcctgcactcaaggagagaggaattacacatacctctaccccaatggagcagtagcaaagaatttatggacatatcttaaaagcaccacaccccaactggggatgaaagtaggtcaacagggaggtaggtttaatctagataagctgaaagatagattgctatcaaaaacagttctccaagatgtgcatagccaaactgggatagaaggcaaactccccaaagctacctgctggttttgagaggggtggtaagacatggcaattcccaggagtagtagaaaataatatgcctgactaccaacagctcaagtatgcttatttgcacatcctagacttggtgtctgtaagactcagttaccacttttattttcctgtagctaggagttagcaaaaggaactggggccttccagccgagccactaaacctgtcttatttggaatggggattgtccagcaaagggagcaaacatgaattagatgttaagctattgagctgaagaaaagaaagcagttcacatttaggtgaaatagatgatgttatcaggaagccaggttcccaccagagtcggtgcttggtacctggtctctccagtctcaacagactcaggtcaggtctctcacccaggaagcaaccactcaataaaatagagaacatctgagaattacaaatgtctatgcttgattgctcctctaaatccagtgcataggttaaccctgcatgcccatttcttcctgggcttcttgatggcaatgtgttcttaaataactggtcttgtgttcatgctaaagacaaacttacatgaagtttttcagtttaagacattctagtgaatggctgctatgtgtttctggcactcattcctaaccaagtctttagagatttcagatgaccttaaagatgcaatatctttttctttctttctttctttctttttttctgagacaagagttgcgccctgtcgcccaggctggggtgctggagtgcagtggtgcgatctcagctcactgcagcctctgcttcccaggttcaagtgtttctcctgcctcagccttccgagtagctgggattacaggcatgtaccactatgcctggctaatttttatttctatatttttagtagagatggggtttcatcatgtttgccaggctggtctcgaactcctggcctcaagtgatccgcccacctcagcctcccaaagtgctgggattacaggcgcgagcgaccgcgcctggccaaagatgcaaattcttgtttggatttatgctctgcctcttcccagcattttcttatctgtagccctgcttgcttgagagtatacttggataagaagtattgctgttgagggagctataagaaaaggattcttcttccagaagtaaagaagctcactcctttagagtacctttaaatgaatttggtttttctttcttattttgaggtggattggtcttctctttttttgggtttccagctcactgggactctcagaccttacctttccagctcaaacaccattagttaaattccttcattctcattagaatgcagcctgctgagtatgtgggtttcactgccggagtccatcatttagccagtatacatagaggaactgcttcgaatcaaggcaactggtgaagggcttagcatgttggcagcaatatcccagagattgaatctgtttgcattttcctcatctaggataacagctgcttgaagccagggctcttagccctttgcattccccttgagcgaggaagccacactgcctttctgtgtctggttcagagctcttccttcttggcatgttttctggactacatgcacatgggcagctatagattaatctgcaaaacctagtcacttacctacccataatatctgggaaggtgtggtatttgttttaaagaaacattgtttctttgggagggcagtttctgtctggactttgaggtggacttagttatccctacagttctttaactctcagcttttaataaaagatgaaatcagatattgatgcagttgggtcacaattctttagaatgcttctaccccagggccgcttcctgttcctagtcatggttttccagtttagtagtggagtttcttgaggctaacttacagaaatttctaactgaaaactttaagagttattgatacttgttttttcagtcagtcacttacatcacctagcctactctctggaatttaaatttatttctctaggctggtcctggaagttgataaccttttggcaaagcttagatttaggagaaggcttgagtccctgttcagcgggtctgtggattctctttgcttatggctctctgcctgcagccctggcagaccatactgtatgtcatggatacccagtggaaatattactgagatgaaacacatttccaagggtatttaaactctcactctgccacctttctaagggtgggaggctggcagagatgctgcaatgcttgataatcatttggccacactgaaatttccaaagggagctcttgccggtgcttaaaaccaaaactcctggacacttagaaaattccatgaatctagcacaaaatatccattcttgcccaagtgtatcccctttctctccagcttaatcttttttttttttttttttttaaagcccaggccaagggtacttttaactggaaactggggaggagggaagaacactagcagggagctaagaggcaggttgctgggtaagccatcctgctcctacctggtgcctgtatctacattgctgagtgctgtgcgccagtgcctttccttcatctgcagatggagcccatctctttccacctgggtgaggagaccctctgctactccaggggtaaaccttaaagaaggtgtcttgaagagcccaaaggacactcacgtgctaaggtgtccattttatgcatctttaaaatattttatttaaaaaaaaaaatagccctgccctgtcttagtgccactaacggcccagttccatccattctgaatggaaaagcggagactgccagcactttccttggtcttccctttgtctcccatgatgtgttgttccctcatccctcccatccatttcactgtgtgtggatggatagcagagggtaccacgcagtccttgaggcagtcctgtgtgattccatgatcagttgtttttgtattttaactattcttccaaaccagcagatgtttggaaattaaggaaaaaattaaattctcatcaatggttgctgttatagttaaatcagtaaagatcttgagtatcaa

SEQ ID NO: 60020 - DNA, 2964 bp, Homo sapiens
aaagtgtgaagcaggaagtgagcactgtgcagacttacatgtacttttattttcctgtagctaggagttagcaaaaggaactggggccttccagccgagccactaaacctgtcttatttggaatggggattgtccagcaaagggagcaaacatgaattagatgttaagctattgagctgaagaaaagaaagcagttcacatttaggtgaaatagatgatgttatcaggaagccaggttcccaccagagtcggtgcttggtacctggtctctccagtctcaacagactcaggtcaggtctctcacccaggaagcaaccactcaataaaatagagaacatctgagaattacaaatgtctatgcttgattgctcctctaaatccagtgcataggttaaccctgcatgcccatttcttcctgggcttcttgatggcaatgtgttcttaaataactggtcttgtgttcatgctaaagacaaacttacatgaagtttttcagtttaagacattctagtgaatggctgctatgtgtttctggcactcattcctaaccaagtctttagagatttcagatgaccttaaagatgcaatatctttttctttctttctttctttctttttttctgagacaagagttgcgccctgtcgcccaggctggggtgctggagtgcagtggtgcgatctcagctcactgcagcctctgcttcccaggttcaagtgtttctcctgcctcagccttccgagtagctgggattacaggcatgtaccactatgcctggctaatttttatttctatatttttagtagagatggggtttcatcatgtttgccaggctggtctcgaactcctggcctcaagtgatccgcccacctcagcctcccaaagtgctgggattacaggcgcgagcgaccgcgcctggccaaagatgcaaattcttgtttggatttatgctctgcctcttcccagcattttcttatctgtagccctgcttgcttgagagtatacttggataagaagtattgctgttgagggagctataagaaaaggattcttcttccagaagtaaagaagctcactcctttagagtacctttaaatgaatttggtttttctttcttattttgaggtggattggtcttctctttttttgggtttccagctcactgggactctcagaccttacctttccagctcaaacaccattagttaaattccttcattctcattagaatgcagcctgctgagtatgtgggtttcactgccggagtccatcatttagccagtatacatagaggaactgcttcgaatcaaggcaactggtgaagggcttagcatgttggcagcaatatcccagagattgaatctgtttgcattttcctcatctaggataacagctgcttgaagccagggctcttagccctttgcattccccttgagcgaggaagccacactgcctttctgtgtctggttcagagctcttccttcttggcatgttttctggactacatgcacatgggcagctatagattaatctgcaaaacctagtcacttacctacccataatatctgggaaggtgtggtatttgttttaaagaaacattgtttctttgggagggcagtttctgtctggactttgaggtggacttagttatccctacagttctttaactctcagcttttaataaaagatgaaatcagatattgatgcagttgggtcacaattctttagaatgcttctaccccagggccgcttcctgttcctagtcatggttttccagtttagtagtggagtttcttgaggctaacttacagaaatttctaactgaaaactttaagagttattgatacttgttttttcagtcagtcacttacatcacctagcctactctctggaatttaaatttatttctctaggctggtcctggaagttgataaccttttggcaaagcttagatttaggagaaggcttgagtccctgttcagcgggtctgtggattctctttgcttatggctctctgcctgcagccctggcagaccatactgtatgtcatggatacccagtggaaatattactgagatgaaacacatttccaagggtatttaaactctcactctgccacctttctaagggtgggaggctggcagagatgctgcaatgcttgataatcatttggccacactgaaatttccaaagggagctcttgccggtgcttaaaaccaaaactcctggacacttagaaaattccatgaatctagcacaaaatatccattcttgcccaagtgtatcccctttctctccagcttaatcttttttttttttttttttttaaagcccaggccaagggtacttttaactggaaactggggaggagggaagaacactagcagggagctaagaggcaggttgctgggtaagccatcctgctcctacctggtgcctgtatctacattgctgagtgctgtgcgccagtgcctttccttcatctgcagatggagcccatctctttccacctgggtgaggagaccctctgctactccaggggtaaaccttaaagaaggtgtcttgaagagcccaaaggacactcacgtgctaaggtgtccattttatgcatctttaaaatattttatttaaaaaaaaaaatagccctgccctgtcttagtgccactaacggcccagttccatccattctgaatggaaaagcggagactgccagcactttccttggtcttccctttgtctcccatgatgtgttgttccctcatccctcccatccatttcactgtgtgtggatggatagcagagggtaccacgcagtccttgaggcagtcctgtgtgattccatgatcagttgtttttgtattttaactattcttccaaaccagcagatgtttggaaattaaggaaaaaattaaattctcatcaatggttgctgttatagttaaatcagtaaagatcttgagtatcaa

SEQ ID NO: 60021 - DNA, 2601 bp, Homo sapiens
ggaaggccgggtgttaatcggccgagggttaaccctgcatgcccatttcttcctgggcttcttgatggcaatgtgttcttaaataactggtcttgtgttcatgctaaagacaaacttacatgaagtttttcagtttaagacattctagtgaatggctgctatgtgtttctggcactcattcctaaccaagtctttagagatttcagatgaccttaaagatgcaatatctttttctttctttctttctttctttttttctgagacaagagttgcgccctgtcgcccaggctggggtgctggagtgcagtggtgcgatctcagctcactgcagcctctgcttcccaggttcaagtgtttctcctgcctcagccttccgagtagctgggattacaggcatgtaccactatgcctggctaatttttatttctatatttttagtagagatggggtttcatcatgtttgccaggctggtctcgaactcctggcctcaagtgatccgcccacctcagcctcccaaagtgctgggattacaggcgcgagcgaccgcgcctggccaaagatgcaaattcttgtttggatttatgctctgcctcttcccagcattttcttatctgtagccctgcttgcttgagagtatacttggataagaagtattgctgttgagggagctataagaaaaggattcttcttccagaagtaaagaagctcactcctttagagtacctttaaatgaatttggtttttctttcttattttgaggtggattggtcttctctttttttgggtttccagctcactgggactctcagaccttacctttccagctcaaacaccattagttaaattccttcattctcattagaatgcagcctgctgagtatgtgggtttcactgccggagtccatcatttagccagtatacatagaggaactgcttcgaatcaaggcaactggtgaagggcttagcatgttggcagcaatatcccagagattgaatctgtttgcattttcctcatctaggataacagctgcttgaagccagggctcttagccctttgcattccccttgagcgaggaagccacactgcctttctgtgtctggttcagagctcttccttcttggcatgttttctggactacatgcacatgggcagctatagattaatctgcaaaacctagtcacttacctacccataatatctgggaaggtgtggtatttgttttaaagaaacattgtttctttgggagggcagtttctgtctggactttgaggtggacttagttatccctacagttctttaactctcagcttttaataaaagatgaaatcagatattgatgcagttgggtcacaattctttagaatgcttctaccccagggccgcttcctgttcctagtcatggttttccagtttagtagtggagtttcttgaggctaacttacagaaatttctaactgaaaactttaagagttattgatacttgttttttcagtcagtcacttacatcacctagcctactctctggaatttaaatttatttctctaggctggtcctggaagttgataaccttttggcaaagcttagatttaggagaaggcttgagtccctgttcagcgggtctgtggattctctttgcttatggctctctgcctgcagccctggcagaccatactgtatgtcatggatacccagtggaaatattactgagatgaaacacatttccaagggtatttaaactctcactctgccacctttctaagggtgggaggctggcagagatgctgcaatgcttgataatcatttggccacactgaaatttccaaagggagctcttgccggtgcttaaaaccaaaactcctggacacttagaaaattccatgaatctagcacaaaatatccattcttgcccaagtgtatcccctttctctccagcttaatcttttttttttttttttttttaaagcccaggccaagggtacttttaactggaaactggggaggagggaagaacactagcagggagctaagaggcaggttgctgggtaagccatcctgctcctacctggtgcctgtatctacattgctgagtgctgtgcgccagtgcctttccttcatctgcagatggagcccatctctttccacctgggtgaggagaccctctgctactccaggggtaaaccttaaagaaggtgtcttgaagagcccaaaggacactcacgtgctaaggtgtccattttatgcatctttaaaatattttatttaaaaaaaaaaatagccctgccctgtcttagtgccactaacggcccagttccatccattctgaatggaaaagcggagactgccagcactttccttggtcttccctttgtctcccatgatgtgttgttccctcatccctcccatccatttcactgtgtgtggatggatagcagagggtaccacgcagtccttgaggcagtcctgtgtgattccatgatcagttgtttttgtattttaactattcttccaaaccagcagatgtttggaaattaaggaaaaaattaaattctcatcaatggttgctgttatagttaaatcagtaaagatcttgagtatcaa

SEQ ID NO: 60022 - DNA, 2230 bp, Homo sapiens
ggccgaccagcttccccaactccctctggctcccgccttcgcccgcttccggtcgtcgtcgtcgccgctgctgccgctgctgttgctcctgaggctgctggctgaggccggaggatcgagcggcggcggcggcggcggctgagagggcggcggcgggagcggagcgggacgagggaacgggaggaagcgagcgaggagcgcgcagagcgcgcttttccgtccgcctgaggagccgaagcagccccggccccgccgccgccgcctgcccgccggacaaagccgagagcccgcgcccacagccatgtcctcgtcagccggcagcggccaccagcccagccagagccgcgccatccccacccgcaccgtggccatcagcgacgccgcgcagctacctcatgactattgcaccacgcccggggggacgctcttctccaccacaccgggaggaactcgaatcatttatgacagaaagtttctgttggatcgtcgcaattctcccatggctcagaccccaccctgccacctgcccaatatcccaggagtcactagccctggcaccttaattgaagactccaaagtagaagtaaacaatttgaacaacttgaacaatcacgacaggaaacatgcagttggggatgatgctcagttcgagatggacatctgactctcctgcaaggattagaagaaaagcagcaacactgatacttgtgtgcacctgatttggccaataggatcaacagtgaaaagacagaagaggcaataccagcagtccccattacagtctccacctccccgtcttcctctgggtgccaaatgatgggaagatgagcttcatctgaccatttcttctccctgtctcctgttccccttcccagttaaacaggttagattgaaggcccttgctgtatttctgtagagctaagcagcccttagaggaaaacagttcaactctgactttcctagttgtttttttattgagagccaccctcataccctgtaattttgtcccaaatcaaatatcaacctaccaacaactgcctggctgggaagtctggggaagggatacagagcttggtgggcctaacaccattcatattccttaccctctgtctctcctccctgtatcccacctatggttcagtgttgcaagagtctgggcttggggtctttaaaaccagcagggggaaatgataaaaagagagctgctttcccttttaccttgaggtattcgtccctcgggacagagcacagcttgtgcaactctggtagcgttaccctgtgacactgttttgaggtccacttcctttctttcctctgggaggaatgtcttctgtctttggtattatagttcatcttcccattcttttacttagtgcatttgtgcagatatttttaactctgtacatcagaagagagcccttggtaaccagttttgctcttcttctgccactcctccctgcttgcatctcgttgctggcagagtcctcttgtacttcaagaaagcaaagtgattttgtctgctcctagagcaggtccataccaagtaatagaggcactttagcttccacttggtgggtaaggcctgatcatagtattctgtcagataatgcctaagaatgaccgctgaagaacgttgacccatttgagtacccggtctcagtcgtcatttttaagtccagtgagcattgtggtagttgttcttagattgcagtttcttatgttttgagtttgaagttgattttcagaatgttcttagaaaagaactgcatttttttcctttgtggatctgctttgtttggctgctgggatagataagcatgggcttaaaaaatgtgttcctcccagttttcttgcctttcctgttgtactttggtgccctgaacttttttattaagaaatcagatcccagggtgagagtaacaggccatttggccaagaaagaaacctgtttgtttttcttttgaactatgaaaagaccctgtttgtgaatatattttagaaagagaggaaggatgtctgcagaactttgttctgttttctgccacaaaaatgtgaatagttcagagtgaaaaccttttgtgatggttgatgtctcaggaataagctggatctccaatgttttggggatgctttgagtctcaaaaaaaattgataatcagaaaagtaatttttgtttgtttgtttaatgtatccctgttctgtttttaattaaactccaagtctcatttta

SEQ ID NO: 60023 - DNA, 1518 bp, Homo sapiens
ggccgaccagcttccccaactccctctggctcccgccttcgcccgcttccggtcgtcgtcgtcgccgctgctgccgctgctgttgctcctgaggctgctggctgaggccggaggatcgagcggcggcggcggcggcggctgagagggcggcggcgggagcggagcgggacgagggaacgggaggaagcgagcgaggagcgcgcagagcgcgcttttccgtccgcctgaggagccgaagcagccccggccccgccgccgccgcctgcccgccggacaaagccgagagcccgcgcccacagccatgtcctcgtcagccggcagcggccaccagcccagccagagccgcgccatccccacccgcaccgtggccatcagcgacgccgcgcagctacctcatgactattgcaccacgcccggggggacgctcttctccaccacaccgggaggaactcgaatcatttatgacagaaagtttctgttggatcgtcgcaattctcccatggctcagaccccaccctgccacctgcccaatatcccaggagtcactagccctggcaccttaattgaagactccaaagtagaagtaaacaatttgaacaacttgaacaatcacgacaggaaacatgcagttggggatgatgctcagttcgagatggacatctgactctcctgcaaggattagaagaaaagcagcaacactgatacttgtgtgcacctgatttggccaataggatcaacagtgaaaagacagaagaggcaataccagcagtccccattacagtctccacctccccgtcttcctctgggtgccaaatgatgggaagatgagcttcatctgaccatttcttctccctgtctcctgttccccttcccagttaaacagcccaggccaagggtacttttaactggaaactggggaggagggaagaacactagcagggagctaagaggcaggttgctgggtaagccatcctgctcctacctggtgcctgtatctacattgctgagtgctgtgcgccagtgcctttccttcatctgcagatggagcccatctctttccacctgggtgaggagaccctctgctactccaggggtaaaccttaaagaaggtgtcttgaagagcccaaaggacactcacgtgctaaggtgtccattttatgcatctttaaaatattttatttaaaaaaaaaaatagccctgccctgtcttagtgccactaacggcccagttccatccattctgaatggaaaagcggagactgccagcactttccttggtcttccctttgtctcccatgatgtgttgttccctcatccctcccatccatttcactgtgtgtggatggatagcagagggtaccacgcagtccttgaggcagtcctgtgtgattccatgatcagttgtttttgtattttaactattcttccaaaccagcagatgtttggaaattaaggaaaaaattaaattctcatcaatggttgctgttatagttaaatcagtaaagatcttgagtatcaa

SEQ ID NO: 60024 - DNA, 275 bp, Homo sapiens
ggaagtgatggttggagctgagtcttgaaggatcaacaggagtgtccctggcagaagagaaagggcattccagatggcagaagagcctgtttacaggcagagaggttagagattatgctttcaacttgaattgtaaaatccttaaaagttaggattacatgggatttaaattaaattcctgggtggtattatatgttgataaccccttaaattgtttcaaactctttttaaccctgttttccaggaactcgaatcatttatgacagaaagtttct

SEQ ID NO: 60025 - DNA, 5287 bp, Homo sapiens
  misc_feature (5257)..(5257): n is a, c, g, or t
ggccgaccagcttccccaactccctctggctcccgccttcgcccgcttccggtcgtcgtcgtcgccgctgctgccgctgctgttgctcctgaggctgctggctgaggccggaggatcgagcggcggcggcggcggcggctgagagggcggcggcgggagcggagcgggacgagggaacgggaggaagcgagcgaggagcgcgcagagcgcgcttttccgtccgcctgaggagccgaagcagccccggccccgccgccgccgcctgcccgccggacaaagccgagagcccgcgcccacagccatgtcctcgtcagccggcagcggccaccagcccagccagagccgcgccatccccacccgcaccgtggccatcagcgacgccgcgcagctacctcatgactattgcaccacgcccggggggacgctcttctccaccacaccgggaggaactcgaatcatttatgacagaaagtttctgttggatcgtcgcaattctcccatggctcagaccccaccctgccacctgcccaatatcccaggagtcactagccctggcaccttaattgaagactccaaagtagaagtaaacaatttgaacaacttgaacaatcacgacaggaaacatgcagttggggatgatgctcagttcgagatggacatctgactctcctgcaaggattagaagaaaagcagcaacactgatacttgtgtgcacctgatttggccaataggatcaacagtgaaaagacagaagaggcaataccagcagtccccattacagtctccacctccccgtcttcctctgggtgccaaatgatgggaagatgagcttcatctgaccatttcttctccctgtctcctgttccccttcccagttaaacaggttagattgaaggcccttgctgtatttctgtagagctaagcagcccttagaggaaaacagttcaactctgactttcctagttgtttttttattgagagccaccctcataccctgtaattttgtcccaaatcaaatatcaacctaccaacaactgcctggctgggaagtctggggaagggatacagagcttggtgggcctaacaccattcatattccttaccctctgtctctcctccctgtatcccacctatggttcagtgttgcaagagtctgggcttggggtctttaaaaccagcagggggaaatgataaaaagagagctgctttcccttttaccttgaggtattcgtccctcgggacagagcacagcttgtgcaactctggtagcgttaccctgtgacactgttttgaggtccacttcctttctttcctctgggaggaatgtcttctgtctttggtattatagttcatcttcccattcttttacttagtgcatttgtgcagatatttttaactctgtacatcagaagagagcccttggtaaccagttttgctcttcttctgccactcctccctgcttgcatctcgttgctggcagagtcctcttgtacttcaagaaagcaaagtgattttgtctgctcctagagcaggtccataccaagtaatagaggcactttagcttccacttggtgggtaaggcctgatcatagtattctgtcagataatgcctaagaatgaccgctgaagaacgttgacccatttgagtacccggtctcagtcgtcatttttaagtccagtgagcattgtggtagttgttcttagattgcagtttcttatgttttgagtttgaagttgattttcagaatgttcttagaaaagaactgcatttttttcctttgtggatctgctttgtttggctgctgggatagataagcatgggcttaaaaaatgtgttcctcccagttttcttgcctttcctgttgtactctgaatttctctccctacctccctcactttcttcctctctccttcctttccttcctttttctctaccaggccatttttcaaatttacatcaaagatacctgaagtgttggtatctgagaatatctgtcactcctcttatctgagaagtgaccttttatttttaagatgactacagacctatttttagatatgttttcagtacaattttgaacagcaactttttaattaaacatcttccagtgttaggaagttgagaaacgttcataggcaagtctgctgttctatgtcaccatcttttgtctcccctagtcccccaggagctctttcctttcccctctagttttgggtgtgcatgtttggagtttgtagtgggtggtttgtaaaactggaccattctgccttgctatgggttgttcaagaaagcctcattcttttctgtgaccctttcgcttttgcattcaccctccttcccacctacctgtcctggggctgttgagcagcataataatcccgggagaatgattcccctcatagaaagacaaaagcatccatcccctcatagttaagtagccactggtgtcctgggaatttctggttggatttggtgccctgaacttttttattaagaaatcagatcccagggtgagagtaacaggccatttggccaagaaagaaacctgtttgtttttcttttgaactatgaaaagaccctgtttgtgaatatattttagaaagagaggaaggatgtctgcagaactttgttctgttttctgccacaaaaatgtgaatagttcagagtgaaaaccttttgtgatggttgatgtctcaggaataagctggatctccaatgttttggggatgctttgagtctcaaaaaaaattgataatcagaaaagtaatttttgtttgtttgtttaatgtatccctgttctgtttttaattaaactccaagtctcattttacatattcttggaaaaacctaagttgcgctgtaatttacataagaagcatgctcaggacctctttgtaccccggggagcctgattctttgggaatgaagcttttcattcttcatacactggccttggcatcctgtggaatttgacccaactagcagctagtcagtctgtcagtgagcagaagagtgaactcttcttgatctttattgctatgtgtgaaaacttggcttcctcactgaacggtgaggaatggatttaaagcatgagctttagtagtatcaagatgccattttcctttttcttgctgtcttggggagcttctgcatgtgaccccctaatcagaaggcatgtttttagtatttcttgggagtgtcagctgtataatgcagcagctgttcaatcccttacccttctctgcaaggacttccttacagcttggtgcagttctttcccagaggccaccactactagacagtctttcttttatcttatggagataaattggcatttaaaaaataatttcacaaggcatgagataaactttcaatagatgatacctttgtgtcatgcctcatggaattatttttagaacaagccagagtccattgagtggtttacctctgcatgtttggagggaacctcacagatgaaacccttaatgaataatgtgtccggggttttttagagagaaggagcactcttaagttaccactttgagacagctcttaacatcttagtgaccatttgtagttttctttttatgaggaacccatgcttctatacttgggcggacaatcgagcttaatgagaagtgacttcccttcaaattccaacagcagacatgcattgtcatgattctgtcttctttttagtgtggtttattgagttcagcagttctcatattctgtttaaataggtacagcattttcaagggcacagatacagagaagctggctttctaggtattgggcttccaagccaagagttttgtccttccacctgtattagttatctattgctgtgtaaaaaattaccctaaatttagtatgttaaaatagtaaacattatctgtcagtttctgtgggttaagaatttgggagtagtttaacatgatggttctggcccatggtatcatgaagttacagtcaagattgaacaggggctgcagtcagctggagctggagaaaccacttccaagttctctctttgtggccgttggcaggatgcctcagtttcttcccatgtgggtctctgcgtagggcagcatgagtgtcctcacaccatgacacctggcttctccctgagcagctgattccagagatcatggggcagggccaggagaaagctgcagtgccttttaagacatagtcttggaaaggacacaccgtcacttcttatcctagttgttagaagcaagccactaagttcagcctgcactcaaggagagaggaattacacatacctctaccccaatggagcagtagcaaagaatttatggacatatcttaaaagcaccacaccccaactggggatgaaagtaggtcaacagggaggtaggtttaatctagataagctgaaagatagattgctatcaaaaacagttctccaagatgtgcatagccaaactgggatagaaggcaaactccccaaagctacctgctggttttgagaggggtggtaagacatggcaattcccaggagtagtagaaaataatatgcctgactaccaacagctcaagtatgcttatttgcacatcctagacttggtgtctgtaagactcagttaccacttttattttcctgtagctaggagttagcaaaaggaactggggccttccagccgagccactaaacctgtcttatttggaatggggattgtccagcaaagggagcaaacatgaattagatgttaagctattgagctgaagaaaagaaagcagttcacatttaggtgaaatagatgatgttatcaggaagccaggttcccaccagagtcggtgcttggtacctggtctctccagtctcaacagactcaggtcaggtctctcacccaggaagcaaccactcaataaaatagagaacatctgagaattacaaatgtctatgcttgattgctcctctaaatccagtgcataggttaaccctgcatgcccatttcttcctgggcttcttgatggcaatgtgttcttaaataactggtcttgtgttcatgctaaagacaaacttacatgaagtttttcagtttaagacattctagtgaatggctgctatgtgtttctggcactcattcctaaccaagtctttagagatttcagatgaccttaaagatgcaatatctttttctttctttctttctttctttttttctgagacaagagttgcgccactgaactccagcccgggcaacagagcgtgactccgtctcaaancaaacaaacaaacaaacaaaaaacatttta

SEQ ID NO: 60026 - DNA, 4893 bp, Homo sapiens
ggccgaccagcttccccaactccctctggctcccgccttcgcccgcttccggtcgtcgtcgtcgccgctgctgccgctgctgttgctcctgaggctgctggctgaggccggaggatcgagcggcggcggcggcggcggctgagagggcggcggcgggagcggagcgggacgagggaacgggaggaagcgagcgaggagcgcgcagagcgcgcttttccgtccgcctgaggagccgaagcagccccggccccgccgccgccgcctgcccgccggacaaagccgagagcccgcgcccacagccatgtcctcgtcagccggcagcggccaccagcccagccagagccgcgccatccccacccgcaccgtggccatcagcgacgccgcgcagctacctcatgactattgcaccacgcccggggggacgctcttctccaccacaccgggaggaactcgaatcatttatgacagaaagtttctgttggatcgtcgcaattctcccatggctcagaccccaccctgccacctgcccaatatcccaggagtcactagccctggcaccttaattgaagactccaaagtagaagtaaacaatttgaacaacttgaacaatcacgacaggaaacatgcagttggggatgatgctcagttcgagatggacatctgactctcctgcaaggattagaagaaaagcagcaacactgatacttgtgtgcacctgatttggccaataggatcaacagtgaaaagacagaagaggcaataccagcagtccccattacagtctccacctccccgtcttcctctgggtgccaaatgatgggaagatgagcttcatctgaccatttcttctccctgtctcctgttccccttcccagttaaacaggttagattgaaggcccttgctgtatttctgtagagctaagcagcccttagaggaaaacagttcaactctgactttcctagttgtttttttattgagagccaccctcataccctgtaattttgtcccaaatcaaatatcaacctaccaacaactgcctggctgggaagtctggggaagggatacagagcttggtgggcctaacaccattcatattccttaccctctgtctctcctccctgtatcccacctatggttcagtgttgcaagagtctgggcttggggtctttaaaaccagcagggggaaatgataaaaagagagctgctttcccttttaccttgaggtattcgtccctcgggacagagcacagcttgtgcaactctggtagcgttaccctgtgacactgttttgaggtccacttcctttctttcctctgggaggaatgtcttctgtctttggtattatagttcatcttcccattcttttacttagtgcatttgtgcagatatttttaactctgtacatcagaagagagcccttggtaaccagttttgctcttcttctgccactcctccctgcttgcatctcgttgctggcagagtcctcttgtacttcaagaaagcaaagtgattttgtctgctcctagagcaggtccataccaagtaatagaggcactttagcttccacttggtgggtaaggcctgatcatagtattctgtcagataatgcctaagaatgaccgctgaagaacgttgacccatttgagtacccggtctcagtcgtcatttttaagtccagtgagcattgtggtagttgttcttagattgcagtttcttatgttttgagtttgaagttgattttcagaatgttcttagaaaagaactgcatttttttcctttgtggatctgctttgtttggctgctgggatagataagcatgggcttaaaaaatgtgttcctcccagttttcttgcctttcctgttgtactctgaatttctctccctacctccctcactttcttcctctctccttcctttccttcctttttctctaccaggccatttttcaaatttacatcaaagatacctgaagtgttggtatctgagaatatctgtcactcctcttatctgagaagtgaccttttatttttaagatgactacagacctatttttagatatgttttcagtacaattttgaacagcaactttttaattaaacatcttccagtgttaggaagttgagaaacgttcataggcaagtctgctgttctatgtcaccatcttttgtctcccctagtcccccaggagctctttcctttcccctctagttttgggtgtgcatgtttggagtttgtagtgggtggtttgtaaaactggaccattctgccttgctatgggttgttcaagaaagcctcattcttttctgtgaccctttcgcttttgcattcaccctccttcccacctacctgtcctggggctgttgagcagcataataatcccgggagaatgattcccctcatagaaagacaaaagcatccatcccctcatagttaagtagccactggtgtcctgggaatttctggttggatttggtgccctgaacttttttattaagaaatcagatcccagggtgagagtaacaggccatttggccaagaaagaaacctgtttgtttttcttttgaactatgaaaagaccctgtttgtgaatatattttagaaagagaggaaggatgtctgcagaactttgttctgttttctgccacaaaaatgtgaatagttcagagtgaaaaccttttgtgatggttgatgtctcaggaataagctggatctccaatgttttggggatgctttgagtctcaaaaaaaattgataatcagaaaagtaatttttgtttgtttgtttaatgtatccctgttctgtttttaattaaactccaagtctcattttacatattcttggaaaaacctaagttgcgctgtaatttacataagaagcatgctcaggacctctttgtaccccggggagcctgattctttgggaatgaagcttttcattcttcatacactggccttggcatcctgtggaatttgacccaactagcagctagtcagtctgtcagtgagcagaagagtgaactcttcttgatctttattgctatgtgtgaaaacttggcttcctcactgaacggtgaggaatggatttaaagcatgagctttagtagtatcaagatgccattttcctttttcttgctgtcttggggagcttctgcatgtgaccccctaatcagaaggcatgtttttagtatttcttgggagtgtcagctgtataatgcagcagctgttcaatcccttacccttctctgcaaggacttccttacagcttggtgcagttctttcccagaggccaccactactagacagtctttcttttatcttatggagataaattggcatttaaaaaataatttcacaaggcatgagataaactttcaatagatgatacctttgtgtcatgcctcatggaattatttttagaacaagccagagtccattgagtggtttacctctgcatgtttggagggaacctcacagatgaaacccttaatgaataatgtgtccggggttttttagagagaaggagcactcttaagttaccactttgagacagctcttaacatcttagtgaccatttgtagttttctttttatgaggaacccatgcttctatacttgggcggacaatcgagcttaatgagaagtgacttcccttcaaattccaacagcagacatgcattgtcatgattctgtcttctttttagtgtggtttattgagttcagcagttctcatattctgtttaaataggtacagcattttcaagggcacagatacagagaagctggctttctaggtattgggcttccaagccaagagttttgtccttccacctgtattagttatctattgctgtgtaaaaaattaccctaaatttagtatgttaaaatagtaaacattatctgtcagtttctgtgggttaagaatttgggagtagtttaacatgatggttctggcccatggtatcatgaagttacagtcaagattgaacaggggctgcagtcagctggagctggagaaaccacttccaagttctctctttgtggccgttggcaggatgcctcagtttcttcccatgtgggtctctgcgtagggcagcatgagtgtcctcacaccatgacacctggcttctccctgagcagctgattccagagatcatggggcagggccaggagaaagctgcagtgccttttaagacatagtcttggaaaggacacaccgtcacttcttatcctagttgttagaagcaagccactaagttcagcctgcactcaaggagagaggaattacacatacctctaccccaatggagcagtagcaaagaatttatggacatatcttaaaagcaccacaccccaactggggatgaaagtaggtcaacagggaggtaggtttaatctagataagctgaaagatagattgctatcaaaaacagttctccaagatgtgcatagccaaactgggatagaaggcaaactccccaaagctacctgctggttttgagaggggtggtaagacatggcaattcccaggagtagtagaaaataatatgcctgactaccaacagctcaagtatgcttatttgcacatcctagacttggtgtctgtaagactcagttaccacttttattttcctgtagctaggagttagcaaaaggaactggggccttccagccgagccactaaacctgtcttatttggaatggggattgtccagcaaagggagcaaacatgaattagatgttaagctattgagctgaagaaaagaaagcagttcacatttaggtgaaatagatgatgttatcaggaagccaggttcccaccagagtcggtgcttggtacctggtctctccagtctcaacagactcagatgttctctattttattgagtggttgctt

SEQ ID NO: 60027 - DNA, 2831 bp, Homo sapiens
ggccgaccagcttccccaactccctctggctcccgccttcgcccgcttccggtcgtcgtcgtcgccgctgctgccgctgctgttgctcctgaggctgctggctgaggccggaggatcgagcggcggcggcggcggcggctgagagggcggcggcgggagcggagcgggacgagggaacgggaggaagcgagcgaggagcgcgcagagcgcgcttttccgtccgcctgaggagccgaagcagccccggccccgccgccgccgcctgcccgccggacaaagccgagagcccgcgcccacagccatgtcctcgtcagccggcagcggccaccagcccagccagagccgcgccatccccacccgcaccgtggccatcagcgacgccgcgcagctacctcatgactattgcaccacgcccggggggacgctcttctccaccacaccgggaggaactcgaatcatttatgacagaaagtttctgttggatcgtcgcaattctcccatggctcagaccccaccctgccacctgcccaatatcccaggagtcactagccctggcaccttaattgaagactccaaagtagaagtaaacaatttgaacaacttgaacaatcacgacaggaaacatgcagttggggatgatgctcagttcgagatggacatctgactctcctgcaaggattagaagaaaagcagcaacactgatacttgtgtgcacctgatttggccaataggatcaacagtgaaaagacagaagaggcaataccagcagtccccattacagtctccacctccccgtcttcctctgggtgccaaatgatgggaagatgagcttcatctgaccatttcttctccctgtctcctgttccccttcccagttaaacaggttagattgaaggcccttgctgtatttctgtagagctaagcagcccttagaggaaaacagttcaactctgactttcctagttgtttttttattgagagccaccctcataccctgtaattttgtcccaaatcaaatatcaacctaccaacaactgcctggctgggaagtctggggaagggatacagagcttggtgggcctaacaccattcatattccttaccctctgtctctcctccctgtatcccacctatggttcagtgttgcaagagtctgggcttggggtctttaaaaccagcagggggaaatgataaaaagagagctgctttcccttttaccttgaggtattcgtccctcgggacagagcacagcttgtgcaactctggtagcgttaccctgtgacactgttttgaggtccacttcctttctttcctctgggaggaatgtcttctgtctttggtattatagttcatcttcccattcttttacttagtgcatttgtgcagatatttttaactctgtacatcagaagagagcccttggtaaccagttttgctcttcttctgccactcctccctgcttgcatctcgttgctggcagagtcctcttgtacttcaagaaagcaaagtgattttgtctgctcctagagcaggtccataccaagtaatagaggcactttagcttccacttggtgggtaaggcctgatcatagtattctgtcagataatgcctaagaatgaccgctgaagaacgttgacccatttgagtacccggtctcagtcgtcatttttaagtccagtgagcattgtggtagttgttcttagattgcagtttcttatgttttgagtttgaagttgattttcagaatgttcttagaaaagaactgcatttttttcctttgtggatctgctttgtttggctgctgggatagataagcatgggcttaaaaaatgtgttcctcccagttttcttgcctttcctgttgtactctgaatttctctccctacctccctcactttcttcctctctccttcctttccttcctttttctctaccaggccatttttcaaatttacatcaaagatacctgaagtgttggtatctgagaatatctgtcactcctcttatctgagaagtgaccttttatttttaagatgactacagacctatttttagatatgttttcagtacaattttgaacagcaactttttaattaaacatcttccagtgttaggaagttgagaaacgttcataggcaagtctgctgttctatgtcaccatcttttgtctcccctagtcccccaggagctctttcctttcccctctagttttgggtgtgcatgtttggagtttgtagtgggtggtttgtaaaactggaccattctgccttgctatgggttgttcaagaaagcctcattcttttctgtgaccctttcgcttttgcattcaccctccttcccacctacctgtcctggggctgttgagcagcataataatcccgggagaatgattcccctcatagaaagacaaaagcatccatcccctcatagttaagtagccactggtgtcctgggaatttctggttggatttggtgccctgaacttttttattaagaaatcagatcccagggtgagagtaacaggccatttggccaagaaagaaacctgtttgtttttcttttgaactatgaaaagaccctgtttgtgaatatattttagaaagagaggaaggatgtctgcagaactttgttctgttttctgccacaaaaatgtgaatagttcagagtgaaaaccttttgtgatggttgatgtctcaggaataagctggatctccaatgttttggggatgctttgagtctcaaaaaaaattgataatcagaaaagtaatttttgtttgtttgtttaatgtatccctgttctgtttttaattaaactccaagtctcatttta

SEQ ID NO: 60028 - DNA, 2402 bp, Homo sapiens
ggccgaccagcttccccaactccctctggctcccgccttcgcccgcttccggtcgtcgtcgtcgccgctgctgccgctgctgttgctcctgaggctgctggctgaggccggaggatcgagcggcggcggcggcggcggctgagagggcggcggcgggagcggagcgggacgagggaacgggaggaagcgagcgaggagcgcgcagagcgcgcttttccgtccgcctgaggagccgaagcagccccggccccgccgccgccgcctgcccgccggacaaagccgagagcccgcgcccacagccatgtcctcgtcagccggcagcggccaccagcccagccagagccgcgccatccccacccgcaccgtggccatcagcgacgccgcgcagctacctcatgactattgcaccacgcccggggggacgctcttctccaccacaccgggaggaactcgaatcatttatgacagaaagtttctgttggatcgtcgcaattctcccatggctcagaccccaccctgccacctgcccaatatcccaggagtcactagccctggcaccttaattgaagactccaaagtagaagtaaacaatttgaacaacttgaacaatcacgacaggaaacatgcagttggggatgatgctcagttcgagatggacatctgactctcctgcaaggattagaagaaaagcagcaacactgatacttgtgtgcacctgatttggccaataggatcaacagtgaaaagacagaagaggcaataccagcagtccccattacagtctccacctccccgtcttcctctgggtgccaaatgatgggaagatgagcttcatctgaccatttcttctccctgtctcctgttccccttcccagttaaacaggttagattgaaggcccttgctgtatttctgtagagctaagcagcccttagaggaaaacagttcaactctgactttcctagttgtttttttattgagagccaccctcataccctgtaattttgtcccaaatcaaatatcaacctaccaacaactgcctggctgggaagtctggggaagggatacagagcttggtgggcctaacaccattcatattccttaccctctgtctctcctccctgtatcccacctatggttcagtgttgcaagagtctgggcttggggtctttaaaaccagcagggggaaatgataaaaagagagctgctttcccttttaccttgaggtattcgtccctcgggacagagcacagcttgtgcaactctggtagcgttaccctgtgacactgttttgaggtccacttcctttctttcctctgggaggaatgtcttctgtctttggtattatagttcatcttcccattcttttacttagtgcatttgtgcagatatttttaactctgtacatcagaagagagcccttggtaaccagttttgctcttcttctgccactcctccctgcttgcatctcgttgctggcagagtcctcttgtacttcaagaaagcaaagtgattttgtctgctcctagagcaggtccataccaagtaatagaggcactttagcttccacttggtgggtaaggcctgatcatagtattctgtcagataatgcctaagaatgaccgctgaagaacgttgacccatttgagtacccggtctcagtcgtcatttttaagtccagtgagcattgtggtagttgttcttagattgcagtttcttatgttttgagtttgaagttgattttcagaatgttcttagaaaagaactgcatttttttcctttgtggatctgctttgtttggctgctgggatagataagcatgggcttaaaaaatgtgttcctcccagttttcttgcctttcctgttgtactctgaatttctctccctacctccctcactttcttcctctctccttcctttccttcctttttctctaccaggccatttttcaaatttacatcaaagatacctgaagtgttggtatctgagaatatctgtcactcctcttatctgagaagtgaccttttatttttaagatgactacagacctatttttagatatgttttcagtacaattttgaacagcaactttttaattaaacatcttccagtgttaggaagttgagaaacgttcataggcaagtctgctgttctatgtcaccatcttttgtctcccctagtcccccaggagctctttcctttcccctctagttttgggtgtgcatgtttggagtttgtagtgggtggtttgtaaaactggaccattctgccttgctatgggttgttcaagaaagcctcattcttttctgtgaccctttcgcttttgcattcaccctccttcccacctacctgtcctggggctacttaactatgaggggatggatgcttttgtctttctatgagg

SEQ ID NO: 60029 - DNA, 1911 bp, Homo sapiens
  misc_feature (1841)..(1841): n is a, c, g, or t
ggccgaccagcttccccaactccctctggctcccgccttcgcccgcttccggtcgtcgtcgtcgccgctgctgccgctgctgttgctcctgaggctgctggctgaggccggaggatcgagcggcggcggcggcggcggctgagagggcggcggcgggagcggagcgggacgagggaacgggaggaagcgagcgaggagcgcgcagagcgcgcttttccgtccgcctgaggagccgaagcagccccggccccgccgccgccgcctgcccgccggacaaagccgagagcccgcgcccacagccatgtcctcgtcagccggcagcggccaccagcccagccagagccgcgccatccccacccgcaccgtggccatcagcgacgccgcgcagctacctcatgactattgcaccacgcccggggggacgctcttctccaccacaccgggaggaactcgaatcatttatgacagaaagtttctgttggatcgtcgcaattctcccatggctcagaccccaccctgccacctgcccaatatcccaggagtcactagccctggcaccttaattgaagactccaaagtagaagtaaacaatttgaacaacttgaacaatcacgacaggaaacatgcagttggggatgatgctcagttcgagatggacatctgactctcctgcaaggattagaagaaaagcagcaacactgatacttgtgtgcacctgatttggccaataggatcaacagtgaaaagacagaagaggcaataccagcagtccccattacagtctccacctccccgtcttcctctgggtgccaaatgatgggaagatgagcttcatctgaccatttcttctccctgtctcctgttccccttcccagttaaacaggttagattgaaggcccttgctgtatttctgtagagctaagcagcccttagaggaaaacagttcaactctgactttcctagttgtttttttattgagagccaccctcataccctgtaattttgtcccaaatcaaatatcaacctaccaacaactgcctggctgggaagtctggggaagggatacagagcttggtgggcctaacaccattcatattccttaccctctgtctctcctccctgtatcccacctatggttcagtgttgcaagagtctgggcttggggtctttaaaaccagcagggggaaatgataaaaagagagctgctttcccttttaccttgaggtattcgtccctcgggacagagcacagcttgtgcaactctggtagcgttaccctgtgacactgttttgaggtccacttcctttctttcctctgggaggaatgtcttctgtctttggtattatagttcatcttcccattcttttacttagtgcatttgtgcagatatttttaactctgtacatcagaagagagcccttggtaaccagttttgctcttcttctgccactcctccctgcttgcatctcgttgctggcagagtcctcttgtacttcaagaaagcaaagtgattttgtctgctcctagagcaggtccataccaagtaatagaggcactttagcttccacttggtgggtaaggcctgatcatagtattctgtcagataatgcctaagaatgaccgctgaagaacgttgacccatttgagtacccggtctcagtcgtcatttttaagtccagtgagcattgtggtagttgttcttagattgcagtttcttatgttttgagtttgaagttgattttcagaatgttcttagaaaagaactgcatttttttcctttgtggatctgctttgtttggctgctgggatagataagcatgggctaacctcctcactttttnctctctcttctttccttcttttttctaccaggctttttaaattacataagatcctgagtgttgttctgaa

SEQ ID NO: 60030 - DNA, 1332 bp, Homo sapiens
ggccgaccagcttccccaactccctctggctcccgccttcgcccgcttccggtcgtcgtcgtcgccgctgctgccgctgctgttgctcctgaggctgctggctgaggccggaggatcgagcggcggcggcggcggcggctgagagggcggcggcgggagcggagcgggacgagggaacgggaggaagcgagcgaggagcgcgcagagcgcgcttttccgtccgcctgaggagccgaagcagccccggccccgccgccgccgcctgcccgccggacaaagccgagagcccgcgcccacagccatgtcctcgtcagccggcagcggccaccagcccagccagagccgcgccatccccacccgcaccgtggccatcagcgacgccgcgcagctacctcatgactattgcaccacgcccggggggacgctcttctccaccacaccgggaggaactcgaatcatttatgacagaaagtttctgttggatcgtcgcaattctcccatggctcagaccccaccctgccacctgcccaatatcccaggagtcactagccctggcaccttaattgaagactccaaagtagaagtaaacaatttgaacaacttgaacaatcacgacaggaaacatgcagttggggatgatgctcagttcgagatggacatctgactctcctgcaaggattagaagaaaagcagcaacactgatacttgtgtgcacctgatttggccaataggatcaacagtgaaaagacagaagaggcaataccagcagtccccattacagtctccacctccccgtcttcctctgggtgccaaatgatgggaagatgagcttcatctgaccatttcttctccctgtctcctgttccccttcccagttaaacaggttagattgaaggcccttgctgtatttctgtagagctaagcagcccttagaggaaaacagttcaactctgactttcctagttgtttttttattgagagccaccctcataccctgtaattttgtcccaaatcaaatatcaacctaccaacaactgcctggctgggaagtctggggaagggatacagagcttggtgggcctaacaccattcatattccttaccctctgtctctcctccctgtatcccacctatggttcagtgttgcaagagtctggtcattcggcgtgtgcaacacgccgagagcccatactgcacacgccgagaaaccacacctgactacttttttgtatcagctgctacaaaagttactgcattttttgcatttttattttttaaacctgattgtgtatgtgtgtgtatgtgtgtacgtgtgtgcacgtatgtgtgtgt

SEQ ID NO: 60031 - DNA, 2915 bp, Homo sapiens
  misc_feature (12)..(12): n is a, c, g, or t
  misc_feature (14)..(15): n is a, c, g, or t
cttcccctccgngnngacagcctctgggtcctcggtcggtacagtctctgcacctcgcgccccagcaggtaaactaacattatggatttttccaagctacccaaaatactcgatgaagataaagaaagcacatttggttatgtgcatggggtctcaggacctgtggttacagcctgtgacatggcgggtgcagccatgtatgagctggtgagagtgggccacagcgaattggttggagagattattcgattggagggtgacatggctactattcaggtgtatgaagaaacttctggtgtgtctgttggagatcctgtacttcgcactggtaaacccctctctgtagagcttggtcctggcattatgggagccatttttgatggtattcaaagacctttgtcggatatcagcagtcagacccaaagcatctacatccccagaggagtaaacgtgtctgctcttagcagagatatcaaatgggactttacaccttgcaaaaacctacgggttggtagtcatatcactggcggagacatttatggaattgtcagtgagaactcgcttatcaaacacaaaatcatgttacccccacgaaacagaggaactgtaacttacattgctccacctgggaattatgatacctctgatgttgtcttggagcttgaatttgaaggtgtaaaggagaagttcaccatggtgcaagtatggcctgtacgtcaagttcgacctgtcactgagaagctgccagccaatcatcctctgttgactggccagagagtccttgatgccctttttccgtgtgtccagggaggaactactgctatccctggagcctttggctgtggaaagacagtgatatcacagtctctatccaagtattctaacagtgatgtaatcatctatgtaggatgtggtgaaagaggaaatgagatgtctgaagtcctccgggacttcccagagctcacaatggaggttgatggtaaggtagagtcaattatgaagaggacagctttggtagccaatacctccaatatgcctgttgctgctagagaagcctctatttatactggaatcacactgtcagagtacttccgtgacatgggctatcatgtcagtatgatggctgactctacctctagatgggctgaggcccttagagaaatctctggtcgtttagctgaaatgcctgcagatagtggatatccagcctatcttggtgcccgtctggcctcgttttatgaacgagcaggcagggtgaaatgtcttggaaatcctgaaagagaagggagtgtcagcattgtaggagcagtttctccacctggtggtgatttttctgatccagttacatctgccactcttggtatcgttcaggtgttctggggcttagataagaaactagctcaacgtaagcatttcccctctgtcaattggctcatcagctacagcaagtatatgcgtgccttggatgaatactatgacaaacacttcacagagttcgttcctctgaggacgaaagctaaggaaattctgcaggaagaagaagacctggcagaaattgtacagcttgtgggaaaggcttctttggcagaaacagataaaatcactctggaggtagcaaaacttatcaaagatgatttcctacaacaaaatggatatactccttatgacaggttctgcccattctacaagacagtagggatgctgtccaacatgattgcattttatgatatggctcgtagagctgttgaaaccactgcccagagtgacaataaaatcacatggtccattattcgtgagcacatgggagacatcctctataaactttcctccatgaaattcaaggatccactgaaagatggtgaggcaaagatcaaaagcgactatgcacaacttcttgaagacatgcagaatgcattccgtagccttgaagattagaagccttgaagattacaactgtgatttccttttcctcagcaagctcctatgtgtatattttcctgaatttctcatctcaaaccctttgcttctttattgtgcagctttgagactagtgcctatgtgtgttatttgtttccctgtttttttggtaggtcttatataaaacaaacattcctttgttctagtgttgtgaagggcctccctcttcctttatctgaagtggtgaatatagtaaatatacattctggttacactactgtaaacttgtatgtagggtgatgaccctctttgtcctaggtgtaccctttcctcatctctattaaattgtaaacaggactactgcatgtactctctttgcagtgaatttggaatggaaggccaggtttctataacttttgaacaggtactttgtgaaatgactcaatttctattgtggtaagctcattggcagcttagcattttgcaaaggaattgctttgcaggaaatatttaattttcaaaaacataatgattaatgttccaattatgcatcacttcccccagtataaatcaggaatgtttgtgagaaaccattgggaactatactctttttatttttattttttattttttttattattttttttttggggacggagtgtccctcttgttgcccaggctggagtgcaatggcgtgatcttggctcactgcagccttcgcctcccgggttcaagtgattctcctgcctcagcctcccgagtagctgggattacaggcatgctccaccatgcccagctaattttgtatttttagtagaaacggggtttcaccatattggtcaggctggtctcgaactccagacctcaggtgatccgcccacctcggcctcccaaactgctgggattacaggcgtgagccaccgcgcctggccagggactatactctttttaaaatagacatttgtggggctcacacaatatatgaaatagtaccctct

SEQ ID NO: 60032 - DNA, 4695 bp, Homo sapiens
  misc_feature (12)..(12): n is a, c, g, or t
  misc_feature (14)..(15): n is a, c, g, or t
cttcccctccgngnngacagcctctgggtcctcggtcggtacagtctctgcacctcgcgccccagcaggtaaactaacattatggatttttccaagctacccaaaatactcgatgaagataaagaaagcacatttggttatgtgcatggggtctcaggacctgtggttacagcctgtgacatggcgggtgcagccatgtatgagctggtgagagtgggccacagcgaattggttggagagattattcgattggagggtgacatggctactattcaggtgtatgaagaaacttctggtgtgtctgttggagatcctgtacttcgcactggtaaacccctctctgtagagcttggtcctggcattatgggagccatttttgatggtattcaaagacctttgtcggatatcagcagtcagacccaaagcatctacatccccagaggagtaaacgtgtctgctcttagcagagatatcaaatgggactttacaccttgcaaaaacctacgggttggtagtcatatcactggcggagacatttatggaattgtcagtgagaactcgcttatcaaacacaaaatcatgttacccccacgaaacagaggaactgtaacttacattgctccacctgggaattatgatacctctgatgttgtcttggagcttgaatttgaaggtgtaaaggagaagttcaccatggtgcaagtatggcctgtacgtcaagttcgacctgtcactgagaagctgccagccaatcatcctctgttgactggccagagagtccttgatgccctttttccgtgtgtccagggaggaactactgctatccctggagcctttggctgtggaaagacagtgatatcacagtctctatccaagtattctaacagtgatgtaatcatctatgtaggatgtggtgaaagaggaaatgagatgtctgaagtcctccgggacttcccagagctcacaatggaggttgatggtaaggtagagtcaattatgaagaggacagctttggtagccaatacctccaatatgcctgttgctgctagagaagcctctatttatactggaatcacactgtcagagtacttccgtgacatgggctatcatgtcagtatgatggctgactctacctctagatgggctgaggcccttagagaaatctctggtcgtttagctgaaatgcctgcagatagtggatatccagcctatcttggtgcccgtctggcctcgttttatgaacgagcaggcagggtgaaatgtcttggaaatcctgaaagagaagggagtgtcagcattgtaggagcagtttctccacctggtggtgatttttctgatccagttacatctgccactcttggtatcgttcaggtgttctggggcttagataagaaactagctcaacgtaagcatttcccctctgtcaattggctcatcagctacagcaagtatatgcgtgccttggatgaatactatgacaaacacttcacagagttcgttcctctgaggacgaaagctaaggaaattctgcaggaagaagaagacctggcagaaattgtacagcttgtgggaaaggcttctttggcagaaacagataaaatcactctggaggtagcaaaacttatcaaagatgatttcctacaacaaaatggatatactccttatgacaggttctgcccattctacaagacagtagggatgctgtccaacatgattgcattttatgatatggctcgtagagctgttgaaaccactgcccagagtgacaataaaatcacatggtccattattcgtgagcacatgggagacatcctctataaactttcctccatgaaattcaaggatccactgaaagatggtgaggcaaagatcaaaagcgactatgcacaacttcttgaagacatgcagaatgcattccgtagccttgaagattagaagccttgaagattacaactgtgatttccttttcctcagcaagctcctatgtgtatattttcctgaatttctcatctcaaaccctttgcttctttattgtgcagctttgagactagtgcctatgtgtgttatttgtttccctgtttttttggtaggtcttatataaaacaaacattcctttgttctagtgttgtgaagggcctccctcttcctttatctgaagtggtgaatatagtaaatatacattctggttacactactgtaaacttgtatgtagggtgatgaccctctttgtcctaggtgtaccctttcctcatctctattaaattgtaaacaggactactgcatgtactctctttgcagtgaatttggaatggaaggccaggtttctataacttttgaacaggtactttgtgaaatgactcaatttctattgtggtaagctcattggcagcttagcattttgcaaaggaattgctttgcaggaaatatttaattttcaaaaacataatgattaatgttccaattatgcatcacttcccccagtataaatcaggaatgtttgtgagaaaccattgggaactatactctttttatttttattttttattttttttattattttttttttggggacggagtgtccctcttgttgcccaggctggagtgcaatggcgtgatcttggctcactgcagccttcgcctcccgggttcaagtgattctcctgcctcagcctcccgagtagctgggattacaggcatgctccaccatgcccagctaattttgtatttttagtagaaacggggtttcaccatattggtcaggctggtctcgaactccagacctcaggtgatccgcccacctcggcctcccaaactgctgggattacaggcgtgagccaccgcgcctggccagggactatactctttttaaaatagacatttgtggggctcacacaatatatgaaatagtaccctctaaaaaagagaaaaaaaaaatcaggcggtcaaacttagagcaacattgtcttattaaagcatagtttatttcactagaaaaaatttaatatcaaggactattacatacttcattactaggaagttctttttaaaatgacacttaaaacaatcactgaaaacttgatccacatcacaccctgtttattttccttaaacatcttggaagcctaagcttctgagaatcatgtggcaagtgtgatgggcagtaaaataccagagaagatgtttagtagcaattaaaggctgtttgcacctttaaggaccagctgggctgtagtgattcctggggccagagtggcattatgtttttacaaaataatgacatatgtcacatgtttgcatgtttgtttgcttgttgaatttttgaacagccagttgaccaatcatagaaagtattactttctttcatatggtttttggttcactggcttaagaggtttctcagaatatctatggccacagcagcataccagtttccatcctaataggaatgaaattaattttgtatctactgataacagaatctgggtcacatgaaaaaaaatcattttatccgtcttttaagtatatgtttaaaataataatttatgtgtctgcatattgcagaacagctctgagagcaacagtttcccattaactctttctgaccaatagtgctggcaccgttgcttcctctttgggaagaggaaagggtgtgtgaacatggctaacaatcttcaaatacccaaattgtgatagcataaataaagtatttattttatgcctcagtatattattatttaattttttaggtaatgcctatctcttggtctattaaggaaagaagcaatcagtagagaattcaggatagttttgtttaaattcttgcagattacatgtttttacagtggcctgctattgaggaaaggtattcttccatacaacttgttttaacctttgagaacattgacagaaattatgcaatggtttgttgagatacggacttgatggtgctgtttaatcagtttgcttccaaagtggcctactcaagaggccctaagactggtagaaattaaaaggatttcaaaaactttctattcctttcttaaacctaccagcaaactaggattgtgatagcaatgaatggtatgatgaagaaagtttgaccaaatttgtttttttgttgttgttgttgttttgaatttgaaatcattcttattccctttaagaatgtttatgtatgagtgtgaagatgctagcgaacctatgctcagatattcatcgtaagtctcccttcacctgttacagagtttcagatcggtcactgatagtatgtatttctttagtaagaatgtgttaaaattacaatgatcttttaaaaagatgatgcagttctgtatttattgtgctgtgtctggtcctaagtggagccaattaaacaagtttcatatgtatttttccagtgttgaatctcacacactgtactttgaaaatttccttccatcctgaataacgaatagaagaggccatatatattgcctccttatccttgagatttcactacctttatgttaaaagttgtgtataattgttaaaatctgtgaaagaataaaaagtggttacttgaaaaaaagaaaaaaaatttgggctggctgaaattacaaacttgggggcaagaggaggatcagagacggacatgggtaaaaacgggggtgaaggggggaaagaaaaaacggcgagaggaggggttttttttttttc

SEQ ID NO: 60033 - DNA, 4545 bp, Homo sapiens
  misc_feature (12)..(12): n is a, c, g, or t
  misc_feature (14)..(15): n is a, c, g, or t
cttcccctccgngnngacagcctctgggtcctcggtcggtacagtctctgcacctcgcgccccagcagctacccaaaatactcgatgaagataaagaaagcacatttggttatgtgcatggggtctcaggacctgtggttacagcctgtgacatggcgggtgcagccatgtatgagctggtgagagtgggccacagcgaattggttggagagattattcgattggagggtgacatggctactattcaggtgtatgaagaaacttctggtgtgtctgttggagatcctgtacttcgcactggtaaacccctctctgtagagcttggtcctggcattatgggagccatttttgatggtattcaaagacctttgtcggatatcagcagtcagacccaaagcatctacatccccagaggagtaaacgtgtctgctcttagcagagatatcaaatgggactttacaccttgcaaaaacctacgggttggtagtcatatcactggcggagacatttatggaattgtcagtgagaactcgcttatcaaacacaaaatcatgttacccccacgaaacagaggaactgtaacttacattgctccacctgggaattatgatacctctgatgttgtcttggagcttgaatttgaaggtgtaaaggagaagttcaccatggtgcaagtatggcctgtacgtcaagttcgacctgtcactgagaagctgccagccaatcatcctctgttgactggccagagagtccttgatgccctttttccgtgtgtccagggaggaactactgctatccctggagcctttggctgtggaaagacagtgatatcacagtctctatccaagtattctaacagtgatgtaatcatctatgtaggatgtggtgaaagaggaaatgagatgtctgaagtcctccgggacttcccagagctcacaatggaggttgatggtaaggtagagtcaattatgaagaggacagctttggtagccaatacctccaatatgcctgttgctgctagagaagcctctatttatactggaatcacactgtcagagtacttccgtgacatgggctatcatgtcagtatgatggctgactctacctctagatgggctgaggcccttagagaaatctctggtcgtttagctgaaatgcctgcagatagtggatatccagcctatcttggtgcccgtctggcctcgttttatgaacgagcaggcagggtgaaatgtcttggaaatcctgaaagagaagggagtgtcagcattgtaggagcagtttctccacctggtggtgatttttctgatccagttacatctgccactcttggtatcgttcaggtgttctggggcttagataagaaactagctcaacgtaagcatttcccctctgtcaattggctcatcagctacagcaagtatatgcgtgccttggatgaatactatgacaaacacttcacagagttcgttcctctgaggacgaaagctaaggaaattctgcaggaagaagaagacctggcagaaattgtacagcttgtgggaaaggcttctttggcagaaacagataaaatcactctggaggtagcaaaacttatcaaagatgatttcctacaacaaaatggatatactccttatgacaggttctgcccattctacaagacagtagggatgctgtccaacatgattgcattttatgatatggctcgtagagctgttgaaaccactgcccagagtgacaataaaatcacatggtccattattcgtgagcacatgggagacatcctctataaactttcctccatgaaattcaaggatccactgaaagatggtgaggcaaagatcaaaagcgactatgcacaacttcttgaagacatgcagaatgcattccgtagccttgaagattagaagccttgaagattacaactgtgatttccttttcctcagcaagctcctatgtgtatattttcctgaatttctcatctcaaaccctttgcttctttattgtgcagctttgagactagtgcctatgtgtgttatttgtttccctgtttttttggtaggtcttatataaaacaaacattcctttgttctagtgttgtgaagggcctccctcttcctttatctgaagtggtgaatatagtaaatatacattctggttacactactgtaaacttgtatgtagggtgatgaccctctttgtcctaggtgtaccctttcctcatctctattaaattgtaaacaggactactgcatgtactctctttgcagtgaatttggaatggaaggccaggtttctataacttttgaacaggtactttgtgaaatgactcaatttctattgtggtaagctcattggcagcttagcattttgcaaaggaattgctttgcaggaaatatttaattttcaaaaacataatgattaatgttccaattatgcatcacttcccccagtataaatcaggaatgtttgtgagaaaccattgggaactatactctttttatttttattttttattttttttattattttttttttggggacggagtgtccctcttgttgcccaggctggagtgcaatggcgtgatcttggctcactgcagccttcgcctcccgggttcaagtgattctcctgcctcagcctcccgagtagctgggattacaggcatgctccaccatgcccagctaattttgtatttttagtagaaacggggtttcaccatattggtcaggctggtctcgaactccagacctcaggtgatccgcccacctcggcctcccaaactgctgggattacaggcgtgagccaccgcgcctggccagggactatactctttttaaaatagacatttgtggggctcacacaatatatgaaatagtaccctctaaaaaagagaaaaaaaaaatcaggcggtcaaacttagagcaacattgtcttattaaagcatagtttatttcactagaaaaaatttaatatcaaggactattacatacttcattactaggaagttctttttaaaatgacacttaaaacaatcactgaaaacttgatccacatcacaccctgtttattttccttaaacatcttggaagcctaagcttctgagaatcatgtggcaagtgtgatgggcagtaaaataccagagaagatgtttagtagcaattaaaggctgtttgcacctttaaggaccagctgggctgtagtgattcctggggccagagtggcattatgtttttacaaaataatgacatatgtcacatgtttgcatgtttgtttgcttgttgaatttttgaacagccagttgaccaatcatagaaagtattactttctttcatatggtttttggttcactggcttaagaggtttctcagaatatctatggccacagcagcataccagtttccatcctaataggaatgaaattaattttgtatctactgataacagaatctgggtcacatgaaaaaaaatcattttatccgtcttttaagtatatgtttaaaataataatttatgtgtctgcatattgcagaacagctctgagagcaacagtttcccattaactctttctgaccaatagtgctggcaccgttgcttcctctttgggaagaggaaagggtgtgtgaacatggctaacaatcttcaaatacccaaattgtgatagcataaataaagtatttattttatgcctcagtatattattatttaattttttaggtaatgcctatctcttggtctattaaggaaagaagcaatcagtagagaattcaggatagttttgtttaaattcttgcagattacatgtttttacagtggcctgctattgaggaaaggtattcttccatacaacttgttttaacctttgagaacattgacagaaattatgcaatggtttgttgagatacggacttgatggtgctgtttaatcagtttgcttccaaagtggcctactcaagaggccctaagactggtagaaattaaaaggatttcaaaaactttctattcctttcttaaacctaccagcaaactaggattgtgatagcaatgaatggtatgatgaagaaagtttgaccaaatttgtttttttgttgttgttgttgttttgaatttgaaatcattcttattccctttaagaatgtttatgtatgagtgtgaagatgctagcgaacctatgctcagatattcatcgtaagtctcccttcacctgttacagagtttcagatcggtcactgatagtatgtatttctttagtaagaatgtgttaaaattacaatgatcttttaaaaagatgatgcagttctgtatttattgtgctgtgtctggtcctaagtggagccaattaaacaagtttcatatgtatttttccagtgttgaatctcacacactgtactttgaaaatttccttccatcctgaataacgaatagaagaggccatatatattgcctccttatccttgagatttcactacctttatgttaaaagttgtgtataattgttaaaatctgtgaaagaataaaaagtggatttaaattaaaaaaaaaaa

SEQ ID NO: 60034 - DNA, 3204 bp, Homo sapiens
agcgggactccaggagttcaagaccagcctgggcaacatgacgagaccttgtctctacaaaaaatataaaaattagctgggtgtgatggtgtgggcctgtagtcccagctacttggaaagctgaggtgtgatgatcacttgagctcaggaggttgagactacagtgaaaagagatctcgccactgcattccatcctgggtgacagagcttctttggcagaaacagataaaatcactctggaggtagcaaaacttatcaaagatgatttcctacaacaaaatggatatactccttatgacaggttctgcccattctacaagacagtagggatgctgtccaacatgattgcattttatgatatggctcgtagagctgttgaaaccactgcccagagtgacaataaaatcacatggtccattattcgtgagcacatgggagacatcctctataaactttcctccatgaaattcaaggatccactgaaagatggtgaggcaaagatcaaaagcgactatgcacaacttcttgaagacatgcagaatgcattccgtagccttgaagattagaagccttgaagattacaactgtgatttccttttcctcagcaagctcctatgtgtatattttcctgaatttctcatctcaaaccctttgcttctttattgtgcagctttgagactagtgcctatgtgtgttatttgtttccctgtttttttggtaggtcttatataaaacaaacattcctttgttctagtgttgtgaagggcctccctcttcctttatctgaagtggtgaatatagtaaatatacattctggttacactactgtaaacttgtatgtagggtgatgaccctctttgtcctaggtgtaccctttcctcatctctattaaattgtaaacaggactactgcatgtactctctttgcagtgaatttggaatggaaggccaggtttctataacttttgaacaggtactttgtgaaatgactcaatttctattgtggtaagctcattggcagcttagcattttgcaaaggaattgctttgcaggaaatatttaattttcaaaaacataatgattaatgttccaattatgcatcacttcccccagtataaatcaggaatgtttgtgagaaaccattgggaactatactctttttatttttattttttattttttttattattttttttttggggacggagtgtccctcttgttgcccaggctggagtgcaatggcgtgatcttggctcactgcagccttcgcctcccgggttcaagtgattctcctgcctcagcctcccgagtagctgggattacaggcatgctccaccatgcccagctaattttgtatttttagtagaaacggggtttcaccatattggtcaggctggtctcgaactccagacctcaggtgatccgcccacctcggcctcccaaactgctgggattacaggcgtgagccaccgcgcctggccagggactatactctttttaaaatagacatttgtggggctcacacaatatatgaaatagtaccctctaaaaaagagaaaaaaaaaatcaggcggtcaaacttagagcaacattgtcttattaaagcatagtttatttcactagaaaaaatttaatatcaaggactattacatacttcattactaggaagttctttttaaaatgacacttaaaacaatcactgaaaacttgatccacatcacaccctgtttattttccttaaacatcttggaagcctaagcttctgagaatcatgtggcaagtgtgatgggcagtaaaataccagagaagatgtttagtagcaattaaaggctgtttgcacctttaaggaccagctgggctgtagtgattcctggggccagagtggcattatgtttttacaaaataatgacatatgtcacatgtttgcatgtttgtttgcttgttgaatttttgaacagccagttgaccaatcatagaaagtattactttctttcatatggtttttggttcactggcttaagaggtttctcagaatatctatggccacagcagcataccagtttccatcctaataggaatgaaattaattttgtatctactgataacagaatctgggtcacatgaaaaaaaatcattttatccgtcttttaagtatatgtttaaaataataatttatgtgtctgcatattgcagaacagctctgagagcaacagtttcccattaactctttctgaccaatagtgctggcaccgttgcttcctctttgggaagaggaaagggtgtgtgaacatggctaacaatcttcaaatacccaaattgtgatagcataaataaagtatttattttatgcctcagtatattattatttaattttttaggtaatgcctatctcttggtctattaaggaaagaagcaatcagtagagaattcaggatagttttgtttaaattcttgcagattacatgtttttacagtggcctgctattgaggaaaggtattcttccatacaacttgttttaacctttgagaacattgacagaaattatgcaatggtttgttgagatacggacttgatggtgctgtttaatcagtttgcttccaaagtggcctactcaagaggccctaagactggtagaaattaaaaggatttcaaaaactttctattcctttcttaaacctaccagcaaactaggattgtgatagcaatgaatggtatgatgaagaaagtttgaccaaatttgtttttttgttgttgttgttgttttgaatttgaaatcattcttattccctttaagaatgtttatgtatgagtgtgaagatgctagcgaacctatgctcagatattcatcgtaagtctcccttcacctgttacagagtttcagatcggtcactgatagtatgtatttctttagtaagaatgtgttaaaattacaatgatcttttaaaaagatgatgcagttctgtatttattgtgctgtgtctggtcctaagtggagccaattaaacaagtttcatatgtatttttccagtgttgaatctcacacactgtactttgaaaatttccttccatcctgaataacgaatagaagaggccatatatattgcctccttatccttgagatttcactacctttatgttaaaagttgtgtataattgttaaaatctgtgaaagaataaaaagtggatttaaattaaaaaaaaaaa

SEQ ID NO: 60035 - DNA, 3230 bp, Homo sapiens
agcgggactccaggagttcaagaccagcctgggcaacatgacgagaccttgtctctacaaaaaatataaaaattagctgggtgtgatggtgtgggcctgtagtcccagctacttggaaagctgaggtgtgatgatcacttgagctcaggaggttgagactacagtgaaaagagatctcgccactgcattccatcctgggtgacagagtgagaccctatctctattaaaaaatgcttctttggcagaaacagataaaatcactctggaggtagcaaaacttatcaaagatgatttcctacaacaaaatggatatactccttatgacaggttctgcccattctacaagacagtagggatgctgtccaacatgattgcattttatgatatggctcgtagagctgttgaaaccactgcccagagtgacaataaaatcacatggtccattattcgtgagcacatgggagacatcctctataaactttcctccatgaaattcaaggatccactgaaagatggtgaggcaaagatcaaaagcgactatgcacaacttcttgaagacatgcagaatgcattccgtagccttgaagattagaagccttgaagattacaactgtgatttccttttcctcagcaagctcctatgtgtatattttcctgaatttctcatctcaaaccctttgcttctttattgtgcagctttgagactagtgcctatgtgtgttatttgtttccctgtttttttggtaggtcttatataaaacaaacattcctttgttctagtgttgtgaagggcctccctcttcctttatctgaagtggtgaatatagtaaatatacattctggttacactactgtaaacttgtatgtagggtgatgaccctctttgtcctaggtgtaccctttcctcatctctattaaattgtaaacaggactactgcatgtactctctttgcagtgaatttggaatggaaggccaggtttctataacttttgaacaggtactttgtgaaatgactcaatttctattgtggtaagctcattggcagcttagcattttgcaaaggaattgctttgcaggaaatatttaattttcaaaaacataatgattaatgttccaattatgcatcacttcccccagtataaatcaggaatgtttgtgagaaaccattgggaactatactctttttatttttattttttattttttttattattttttttttggggacggagtgtccctcttgttgcccaggctggagtgcaatggcgtgatcttggctcactgcagccttcgcctcccgggttcaagtgattctcctgcctcagcctcccgagtagctgggattacaggcatgctccaccatgcccagctaattttgtatttttagtagaaacggggtttcaccatattggtcaggctggtctcgaactccagacctcaggtgatccgcccacctcggcctcccaaactgctgggattacaggcgtgagccaccgcgcctggccagggactatactctttttaaaatagacatttgtggggctcacacaatatatgaaatagtaccctctaaaaaagagaaaaaaaaaatcaggcggtcaaacttagagcaacattgtcttattaaagcatagtttatttcactagaaaaaatttaatatcaaggactattacatacttcattactaggaagttctttttaaaatgacacttaaaacaatcactgaaaacttgatccacatcacaccctgtttattttccttaaacatcttggaagcctaagcttctgagaatcatgtggcaagtgtgatgggcagtaaaataccagagaagatgtttagtagcaattaaaggctgtttgcacctttaaggaccagctgggctgtagtgattcctggggccagagtggcattatgtttttacaaaataatgacatatgtcacatgtttgcatgtttgtttgcttgttgaatttttgaacagccagttgaccaatcatagaaagtattactttctttcatatggtttttggttcactggcttaagaggtttctcagaatatctatggccacagcagcataccagtttccatcctaataggaatgaaattaattttgtatctactgataacagaatctgggtcacatgaaaaaaaatcattttatccgtcttttaagtatatgtttaaaataataatttatgtgtctgcatattgcagaacagctctgagagcaacagtttcccattaactctttctgaccaatagtgctggcaccgttgcttcctctttgggaagaggaaagggtgtgtgaacatggctaacaatcttcaaatacccaaattgtgatagcataaataaagtatttattttatgcctcagtatattattatttaattttttaggtaatgcctatctcttggtctattaaggaaagaagcaatcagtagagaattcaggatagttttgtttaaattcttgcagattacatgtttttacagtggcctgctattgaggaaaggtattcttccatacaacttgttttaacctttgagaacattgacagaaattatgcaatggtttgttgagatacggacttgatggtgctgtttaatcagtttgcttccaaagtggcctactcaagaggccctaagactggtagaaattaaaaggatttcaaaaactttctattcctttcttaaacctaccagcaaactaggattgtgatagcaatgaatggtatgatgaagaaagtttgaccaaatttgtttttttgttgttgttgttgttttgaatttgaaatcattcttattccctttaagaatgtttatgtatgagtgtgaagatgctagcgaacctatgctcagatattcatcgtaagtctcccttcacctgttacagagtttcagatcggtcactgatagtatgtatttctttagtaagaatgtgttaaaattacaatgatcttttaaaaagatgatgcagttctgtatttattgtgctgtgtctggtcctaagtggagccaattaaacaagtttcatatgtatttttccagtgttgaatctcacacactgtactttgaaaatttccttccatcctgaataacgaatagaagaggccatatatattgcctccttatccttgagatttcactacctttatgttaaaagttgtgtataattgttaaaatctgtgaaagaataaaaagtggatttaaattaaaaaaaaaaa

SEQ ID NO: 60036 - DNA, 3341 bp, Homo sapiens
agcgggactccaggagttcaagaccagcctgggcaacatgacgagaccttgtctctacaaaaaatataaaaattagctgggtgtgatggtgtgggcctgtagtcccagctacttggaaagctgaggtgtgatgatcacttgagctcaggaggttgagactacagtgaaaagagatctcgccactgcattccatcctgggtgacagagtgagaccctatctctattaaaaaatgctcaagcaatcttcccaccccagcctcccaagtagctgggtctagaggcgcatgccaccacgcctggacttgcaagatggaaaagctctagagatttgtttcacagtaatgcttctttggcagaaacagataaaatcactctggaggtagcaaaacttatcaaagatgatttcctacaacaaaatggatatactccttatgacaggttctgcccattctacaagacagtagggatgctgtccaacatgattgcattttatgatatggctcgtagagctgttgaaaccactgcccagagtgacaataaaatcacatggtccattattcgtgagcacatgggagacatcctctataaactttcctccatgaaattcaaggatccactgaaagatggtgaggcaaagatcaaaagcgactatgcacaacttcttgaagacatgcagaatgcattccgtagccttgaagattagaagccttgaagattacaactgtgatttccttttcctcagcaagctcctatgtgtatattttcctgaatttctcatctcaaaccctttgcttctttattgtgcagctttgagactagtgcctatgtgtgttatttgtttccctgtttttttggtaggtcttatataaaacaaacattcctttgttctagtgttgtgaagggcctccctcttcctttatctgaagtggtgaatatagtaaatatacattctggttacactactgtaaacttgtatgtagggtgatgaccctctttgtcctaggtgtaccctttcctcatctctattaaattgtaaacaggactactgcatgtactctctttgcagtgaatttggaatggaaggccaggtttctataacttttgaacaggtactttgtgaaatgactcaatttctattgtggtaagctcattggcagcttagcattttgcaaaggaattgctttgcaggaaatatttaattttcaaaaacataatgattaatgttccaattatgcatcacttcccccagtataaatcaggaatgtttgtgagaaaccattgggaactatactctttttatttttattttttattttttttattattttttttttggggacggagtgtccctcttgttgcccaggctggagtgcaatggcgtgatcttggctcactgcagccttcgcctcccgggttcaagtgattctcctgcctcagcctcccgagtagctgggattacaggcatgctccaccatgcccagctaattttgtatttttagtagaaacggggtttcaccatattggtcaggctggtctcgaactccagacctcaggtgatccgcccacctcggcctcccaaactgctgggattacaggcgtgagccaccgcgcctggccagggactatactctttttaaaatagacatttgtggggctcacacaatatatgaaatagtaccctctaaaaaagagaaaaaaaaaatcaggcggtcaaacttagagcaacattgtcttattaaagcatagtttatttcactagaaaaaatttaatatcaaggactattacatacttcattactaggaagttctttttaaaatgacacttaaaacaatcactgaaaacttgatccacatcacaccctgtttattttccttaaacatcttggaagcctaagcttctgagaatcatgtggcaagtgtgatgggcagtaaaataccagagaagatgtttagtagcaattaaaggctgtttgcacctttaaggaccagctgggctgtagtgattcctggggccagagtggcattatgtttttacaaaataatgacatatgtcacatgtttgcatgtttgtttgcttgttgaatttttgaacagccagttgaccaatcatagaaagtattactttctttcatatggtttttggttcactggcttaagaggtttctcagaatatctatggccacagcagcataccagtttccatcctaataggaatgaaattaattttgtatctactgataacagaatctgggtcacatgaaaaaaaatcattttatccgtcttttaagtatatgtttaaaataataatttatgtgtctgcatattgcagaacagctctgagagcaacagtttcccattaactctttctgaccaatagtgctggcaccgttgcttcctctttgggaagaggaaagggtgtgtgaacatggctaacaatcttcaaatacccaaattgtgatagcataaataaagtatttattttatgcctcagtatattattatttaattttttaggtaatgcctatctcttggtctattaaggaaagaagcaatcagtagagaattcaggatagttttgtttaaattcttgcagattacatgtttttacagtggcctgctattgaggaaaggtattcttccatacaacttgttttaacctttgagaacattgacagaaattatgcaatggtttgttgagatacggacttgatggtgctgtttaatcagtttgcttccaaagtggcctactcaagaggccctaagactggtagaaattaaaaggatttcaaaaactttctattcctttcttaaacctaccagcaaactaggattgtgatagcaatgaatggtatgatgaagaaagtttgaccaaatttgtttttttgttgttgttgttgttttgaatttgaaatcattcttattccctttaagaatgtttatgtatgagtgtgaagatgctagcgaacctatgctcagatattcatcgtaagtctcccttcacctgttacagagtttcagatcggtcactgatagtatgtatttctttagtaagaatgtgttaaaattacaatgatcttttaaaaagatgatgcagttctgtatttattgtgctgtgtctggtcctaagtggagccaattaaacaagtttcatatgtatttttccagtgttgaatctcacacactgtactttgaaaatttccttccatcctgaataacgaatagaagaggccatatatattgcctccttatccttgagatttcactacctttatgttaaaagttgtgtataattgttaaaatctgtgaaagaataaaaagtggatttaaattaaaaaaaaaaa

SEQ ID NO: 60037 - DNA, 2788 bp, Homo sapiens
  misc_feature (12)..(12): n is a, c, g, or t
  misc_feature (35)..(36): n is a, c, g, or t
ggggcaccgacnccgcttcggtcttttggcccggnnggtcgtgggtaccatagccaggatccactgaaagatggtgaggcaaagatcaaaagcgactatgcacaacttcttgaagacatgcagaatgcattccgtagccttgaagattagaagccttgaagattacaactgtgatttccttttcctcagcaagctcctatgtgtatattttcctgaatttctcatctcaaaccctttgcttctttattgtgcagctttgagactagtgcctatgtgtgttatttgtttccctgtttttttggtaggtcttatataaaacaaacattcctttgttctagtgttgtgaagggcctccctcttcctttatctgaagtggtgaatatagtaaatatacattctggttacactactgtaaacttgtatgtagggtgatgaccctctttgtcctaggtgtaccctttcctcatctctattaaattgtaaacaggactactgcatgtactctctttgcagtgaatttggaatggaaggccaggtttctataacttttgaacaggtactttgtgaaatgactcaatttctattgtggtaagctcattggcagcttagcattttgcaaaggaattgctttgcaggaaatatttaattttcaaaaacataatgattaatgttccaattatgcatcacttcccccagtataaatcaggaatgtttgtgagaaaccattgggaactatactctttttatttttattttttattttttttattattttttttttggggacggagtgtccctcttgttgcccaggctggagtgcaatggcgtgatcttggctcactgcagccttcgcctcccgggttcaagtgattctcctgcctcagcctcccgagtagctgggattacaggcatgctccaccatgcccagctaattttgtatttttagtagaaacggggtttcaccatattggtcaggctggtctcgaactccagacctcaggtgatccgcccacctcggcctcccaaactgctgggattacaggcgtgagccaccgcgcctggccagggactatactctttttaaaatagacatttgtggggctcacacaatatatgaaatagtaccctctaaaaaagagaaaaaaaaaatcaggcggtcaaacttagagcaacattgtcttattaaagcatagtttatttcactagaaaaaatttaatatcaaggactattacatacttcattactaggaagttctttttaaaatgacacttaaaacaatcactgaaaacttgatccacatcacaccctgtttattttccttaaacatcttggaagcctaagcttctgagaatcatgtggcaagtgtgatgggcagtaaaataccagagaagatgtttagtagcaattaaaggctgtttgcacctttaaggaccagctgggctgtagtgattcctggggccagagtggcattatgtttttacaaaataatgacatatgtcacatgtttgcatgtttgtttgcttgttgaatttttgaacagccagttgaccaatcatagaaagtattactttctttcatatggtttttggttcactggcttaagaggtttctcagaatatctatggccacagcagcataccagtttccatcctaataggaatgaaattaattttgtatctactgataacagaatctgggtcacatgaaaaaaaatcattttatccgtcttttaagtatatgtttaaaataataatttatgtgtctgcatattgcagaacagctctgagagcaacagtttcccattaactctttctgaccaatagtgctggcaccgttgcttcctctttgggaagaggaaagggtgtgtgaacatggctaacaatcttcaaatacccaaattgtgatagcataaataaagtatttattttatgcctcagtatattattatttaattttttaggtaatgcctatctcttggtctattaaggaaagaagcaatcagtagagaattcaggatagttttgtttaaattcttgcagattacatgtttttacagtggcctgctattgaggaaaggtattcttccatacaacttgttttaacctttgagaacattgacagaaattatgcaatggtttgttgagatacggacttgatggtgctgtttaatcagtttgcttccaaagtggcctactcaagaggccctaagactggtagaaattaaaaggatttcaaaaactttctattcctttcttaaacctaccagcaaactaggattgtgatagcaatgaatggtatgatgaagaaagtttgaccaaatttgtttttttgttgttgttgttgttttgaatttgaaatcattcttattccctttaagaatgtttatgtatgagtgtgaagatgctagcgaacctatgctcagatattcatcgtaagtctcccttcacctgttacagagtttcagatcggtcactgatagtatgtatttctttagtaagaatgtgttaaaattacaatgatcttttaaaaagatgatgcagttctgtatttattgtgctgtgtctggtcctaagtggagccaattaaacaagtttcatatgtatttttccagtgttgaatctcacacactgtactttgaaaatttccttccatcctgaataacgaatagaagaggccatatatattgcctccttatccttgagatttcactacctttatgttaaaagttgtgtataattgttaaaatctgtgaaagaataaaaagtggatttaaattaaaaaaaaaaa

SEQ ID NO: 60038 - DNA, 3150 bp, Homo sapiens
gatagaggggggcagagatagtgggagagacagagtgaacgtgatgtggttctgagaaggatgtatattctgttgatttggggtggagagttctgtagatgtttattaggtccacttggtgcagagctgagttcatgtcctgtatatccttgttaaccttctgtctcattgatctgtctaatattgacagtggggtgttaaagtctcccattattattgtttgggagtctaagtctctttgtatgtctctaaggacttgctttataaatctgggtactcctgtactgggtgcatatatatttaggatagttaggtcttcttgctgaattgatccctttccattatgtaatggccttccttgtctcttttgatctttgttggtttaaagtctgttttgtcagggactaggattgcaaccagatccactgaaagatggtgaggcaaagatcaaaagcgactatgcacaacttcttgaagacatgcagaatgcattccgtagccttgaagattagaagccttgaagattacaactgtgatttccttttcctcagcaagctcctatgtgtatattttcctgaatttctcatctcaaaccctttgcttctttattgtgcagctttgagactagtgcctatgtgtgttatttgtttccctgtttttttggtaggtcttatataaaacaaacattcctttgttctagtgttgtgaagggcctccctcttcctttatctgaagtggtgaatatagtaaatatacattctggttacactactgtaaacttgtatgtagggtgatgaccctctttgtcctaggtgtaccctttcctcatctctattaaattgtaaacaggactactgcatgtactctctttgcagtgaatttggaatggaaggccaggtttctataacttttgaacaggtactttgtgaaatgactcaatttctattgtggtaagctcattggcagcttagcattttgcaaaggaattgctttgcaggaaatatttaattttcaaaaacataatgattaatgttccaattatgcatcacttcccccagtataaatcaggaatgtttgtgagaaaccattgggaactatactctttttatttttattttttattttttttattattttttttttggggacggagtgtccctcttgttgcccaggctggagtgcaatggcgtgatcttggctcactgcagccttcgcctcccgggttcaagtgattctcctgcctcagcctcccgagtagctgggattacaggcatgctccaccatgcccagctaattttgtatttttagtagaaacggggtttcaccatattggtcaggctggtctcgaactccagacctcaggtgatccgcccacctcggcctcccaaactgctgggattacaggcgtgagccaccgcgcctggccagggactatactctttttaaaatagacatttgtggggctcacacaatatatgaaatagtaccctctaaaaaagagaaaaaaaaaatcaggcggtcaaacttagagcaacattgtcttattaaagcatagtttatttcactagaaaaaatttaatatcaaggactattacatacttcattactaggaagttctttttaaaatgacacttaaaacaatcactgaaaacttgatccacatcacaccctgtttattttccttaaacatcttggaagcctaagcttctgagaatcatgtggcaagtgtgatgggcagtaaaataccagagaagatgtttagtagcaattaaaggctgtttgcacctttaaggaccagctgggctgtagtgattcctggggccagagtggcattatgtttttacaaaataatgacatatgtcacatgtttgcatgtttgtttgcttgttgaatttttgaacagccagttgaccaatcatagaaagtattactttctttcatatggtttttggttcactggcttaagaggtttctcagaatatctatggccacagcagcataccagtttccatcctaataggaatgaaattaattttgtatctactgataacagaatctgggtcacatgaaaaaaaatcattttatccgtcttttaagtatatgtttaaaataataatttatgtgtctgcatattgcagaacagctctgagagcaacagtttcccattaactctttctgaccaatagtgctggcaccgttgcttcctctttgggaagaggaaagggtgtgtgaacatggctaacaatcttcaaatacccaaattgtgatagcataaataaagtatttattttatgcctcagtatattattatttaattttttaggtaatgcctatctcttggtctattaaggaaagaagcaatcagtagagaattcaggatagttttgtttaaattcttgcagattacatgtttttacagtggcctgctattgaggaaaggtattcttccatacaacttgttttaacctttgagaacattgacagaaattatgcaatggtttgttgagatacggacttgatggtgctgtttaatcagtttgcttccaaagtggcctactcaagaggccctaagactggtagaaattaaaaggatttcaaaaactttctattcctttcttaaacctaccagcaaactaggattgtgatagcaatgaatggtatgatgaagaaagtttgaccaaatttgtttttttgttgttgttgttgttttgaatttgaaatcattcttattccctttaagaatgtttatgtatgagtgtgaagatgctagcgaacctatgctcagatattcatcgtaagtctcccttcacctgttacagagtttcagatcggtcactgatagtatgtatttctttagtaagaatgtgttaaaattacaatgatcttttaaaaagatgatgcagttctgtatttattgtgctgtgtctggtcctaagtggagccaattaaacaagtttcatatgtatttttccagtgttgaatctcacacactgtactttgaaaatttccttccatcctgaataacgaatagaagaggccatatatattgcctccttatccttgagatttcactacctttatgttaaaagttgtgtataattgttaaaatctgtgaaagaataaaaagtggatttaaattaaaaaaaaaaa

SEQ ID NO: 60039 - DNA, 2524 bp, Homo sapiens
accataataataaaaacagtgtggtattggtaaaataacagaccagcggaccagtggagcagaatagagatagacttgtgattgtataaacgattgatattgcaaagatggtaccgaaaatcaagtgaggagaggatagattgtttcagtctgtgatagaaaactgtttactatttgaaggaaaaaaacaaaatggattgttctctaattccacatacaaagttagaatccagatagattcataatttacgtgggaaaggtaagactttcagtttgatagaaaacaaatattaagaaaatatctttgtgatctagagttggaaaaggacttctaaaataaaccccttaacattagccttaaaacaaaaaaaagagttttttgattacataaaaagtaagcatttatgtttagcaaaggcctaccctggttaaaggtaacagaccagtgacattgggagaggaagtttgtgacatctaaaactcatggactggctgggcattgtgactcatacctgtaatcccagcactttaggaggctgaggtgatggatcacttgaggtcaggagttcgagaccagcctggccaacatggtgaaacctcgtctctactaaaaatatgaaaaaaaaaattagctgggcgtgatggtgggcgcctgtaatcccaactacttgggaggctgaggcaggagaatcacttgaagccaggaggtggaggttgcagtgagccaagatcgtgccactgcactccagcctgggtgacagagcaagactctgcctccaaaaaaaccaccgcgcctggccagggactatactctttttaaaatagacatttgtggggctcacacaatatatgaaatagtaccctctaaaaaagagaaaaaaaaaatcaggcggtcaaacttagagcaacattgtcttattaaagcatagtttatttcactagaaaaaatttaatatcaaggactattacatacttcattactaggaagttctttttaaaatgacacttaaaacaatcactgaaaacttgatccacatcacaccctgtttattttccttaaacatcttggaagcctaagcttctgagaatcatgtggcaagtgtgatgggcagtaaaataccagagaagatgtttagtagcaattaaaggctgtttgcacctttaaggaccagctgggctgtagtgattcctggggccagagtggcattatgtttttacaaaataatgacatatgtcacatgtttgcatgtttgtttgcttgttgaatttttgaacagccagttgaccaatcatagaaagtattactttctttcatatggtttttggttcactggcttaagaggtttctcagaatatctatggccacagcagcataccagtttccatcctaataggaatgaaattaattttgtatctactgataacagaatctgggtcacatgaaaaaaaatcattttatccgtcttttaagtatatgtttaaaataataatttatgtgtctgcatattgcagaacagctctgagagcaacagtttcccattaactctttctgaccaatagtgctggcaccgttgcttcctctttgggaagaggaaagggtgtgtgaacatggctaacaatcttcaaatacccaaattgtgatagcataaataaagtatttattttatgcctcagtatattattatttaattttttaggtaatgcctatctcttggtctattaaggaaagaagcaatcagtagagaattcaggatagttttgtttaaattcttgcagattacatgtttttacagtggcctgctattgaggaaaggtattcttccatacaacttgttttaacctttgagaacattgacagaaattatgcaatggtttgttgagatacggacttgatggtgctgtttaatcagtttgcttccaaagtggcctactcaagaggccctaagactggtagaaattaaaaggatttcaaaaactttctattcctttcttaaacctaccagcaaactaggattgtgatagcaatgaatggtatgatgaagaaagtttgaccaaatttgtttttttgttgttgttgttgttttgaatttgaaatcattcttattccctttaagaatgtttatgtatgagtgtgaagatgctagcgaacctatgctcagatattcatcgtaagtctcccttcacctgttacagagtttcagatcggtcactgatagtatgtatttctttagtaagaatgtgttaaaattacaatgatcttttaaaaagatgatgcagttctgtatttattgtgctgtgtctggtcctaagtggagccaattaaacaagtttcatatgtatttttccagtgttgaatctcacacactgtactttgaaaatttccttccatcctgaataacgaatagaagaggccatatatattgcctccttatccttgagatttcactacctttatgttaaaagttgtgtataattgttaaaatctgtgaaagaataaaaagtggatttaaattaaaaaaaaaaa

SEQ ID NO: 60040 - DNA, 1791 bp, Homo sapiens
  misc_feature (12)..(12): n is a, c, g, or t
  misc_feature (14)..(15): n is a, c, g, or t
cttcccctccgngnngacagcctctgggtcctcggtcggtacagtctctgcacctcgcgccccagcaggtaaactaacattatggatttttccaagctacccaaaatactcgatgaagataaagaaagcacatttggttatgtgcatggggtctcaggacctgtggttacagcctgtgacatggcgggtgcagccatgtatgagctggtgagagtgggccacagcgaattggttggagagattattcgattggagggtgacatggctactattcaggtgtatgaagaaacttctggtgtgtctgttggagatcctgtacttcgcactggtaaacccctctctgtagagcttggtcctggcattatgggagccatttttgatggtattcaaagacctttgtcggatatcagcagtcagacccaaagcatctacatccccagaggagtaaacgtgtctgctcttagcagagatatcaaatgggactttacaccttgcaaaaacctacgggttggtagtcatatcactggcggagacatttatggaattgtcagtgagaactcgcttatcaaacacaaaatcatgttacccccacgaaacagaggaactgtaacttacattgctccacctgggaattatgatacctctgatgttgtcttggagcttgaatttgaaggtgtaaaggagaagttcaccatggtgcaagtatggcctgtacgtcaagttcgacctgtcactgagaagctgccagccaatcatcctctgttgactggccagagagtccttgatgccctttttccgtgtgtccagggaggaactactgctatccctggagcctttggctgtggaaagacagtgatatcacagtctctatccaagtattctaacagtgatgtaatcatctatgtaggatgtggtgaaagaggaaatgagatgtctgaagtcctccgggacttcccagagctcacaatggaggttgatggtaaggtagagtcaattatgaagaggacagctttggtagccaatacctccaatatgcctgttgctgctagagaagcctctatttatactggaatcacactgtcagagtacttccgtgacatgggctatcatgtcagtatgatggctgactctacctctagatgggctgaggcccttagagaaatctctggtcgtttagctgaaatgcctgcagatagtggatatccagcctatcttggtgcccgtctggcctcgttttatgaacgagcaggcagggtgaaatgtcttggaaatcctgaaagagaagggagtgtcagcattgtaggagcagtttctccacctggtggtgatttttctgatccagttacatctgccactcttggtatcgttcaggtgttctggggcttagataagaaactagctcaacgtaagcatttcccctctgtcaattggctcatcagctacagcaagtatatgcgtgccttggatgaatactatgacaaacacttcacagagttcgttcctctgaggacgaaagctaaggaaattctgcaggaagaagaagacctggcagaaattgtacagcttgtgggaaaggtgagttgttaaattccatggaagatagatctgtgggttacactggggtgtttcaaggacagatagagccttggatattacagattcttgcctagcaaaataaatatttattaaatatttttaattgaaattttctattcattatagtacttagcatggtttttgggtatattgtatgtgagaaagaaacatttgatttacttttatcttgaaatg

SEQ ID NO: 60041 - DNA, 866 bp, Homo sapiens
accataataataaaaacagtgtggtattggtaaaataacagaccagcggaccagtggagcagaatagagatagacttgtgattgtataaacgattgatattgcaaagatggtaccgaaaatcaagtgaggagaggatagattgtttcagtctgtgatagaaaactgtttactatttgaaggaaaaaaacaaaatggattgttctctaattccacatacaaagttagaatccagatagattcataatttacgtgggaaaggtaagactttcagtttgatagaaaacaaatattaagaaaatatctttgtgatctagagttggaaaaggacttctaaaataaaccccttaacattagccttaaaacaaaaaaaagagttttttgattacataaaaagtaagcatttatgtttagcaaaggcctaccctggttaaaggtaacagaccagtgacattgggagaggaagtttgtgacatctaaaactcatggactggctgggcattgtgactcatacctgtaatcccagcactttaggaggctgaggtgatggatcacttgaggtcaggagttcgagaccagcctggccaacatggtgaaacctcgtctctactaaaaatatgaaaaaaaaaattagctgggcgtgatggtgggcgcctgtaatcccaactacttgggaggctgaggcaggagaatcacttgaagccaggaggtggaggttgcagtgagccaagatcgtgccactgcactccagcctgggtgacagagcaagactctgcctccaaaaaaaccaccgcgcctggccagggactatactctttttaaaatagacatttgtggggctcacacaatatatgaaatagtaccctct

SEQ ID NO: 60042 - DNA, 4573 bp, Homo sapiens
  misc_feature (12)..(12): n is a, c, g, or t
  misc_feature (14)..(15): n is a, c, g, or t
cttcccctccgngnngacagcctctgggtcctcggtcggtacagtctctgcacctcgcgccccagcaggtaaactaacattatggatttttccaagctacccaaaatactcgatgaagataaagaaagcacatttggttatgtgcatggggtctcaggacctgtggttacagcctgtgacatggcgggtgcagccatgtatgagctggtgagagtgggccacagcgaattggttggagagattattcgattggagggtgacatggctactattcaggtgtatgaagaaacttctggtgtgtctgttggagatcctgtacttcgcactggtaaacccctctctgtagagcttggtcctggcattatgggagccatttttgatggtattcaaagacctttgtcggatatcagcagtcagacccaaagcatctacatccccagaggagtaaacgtgtctgctcttagcagagatatcaaatgggactttacaccttgcaaaaacctacgggttggtagtcatatcactggcggagacatttatggaattgtcagtgagaactcgcttatcaaacacaaaatcatgttacccccacgaaacagaggaactgtaacttacattgctccacctgggaattatgatacctctgatgttgtcttggagcttgaatttgaaggtgtaaaggagaagttcaccatggtgcaagtatggcctgtacgtcaagttcgacctgtcactgagaagctgccagccaatcatcctctgttgactggccagagagtccttgatgccctttttccgtgtgtccagggaggaactactgctatccctggagcctttggctgtggaaagacagtgatatcacagtctctatccaagtattctaacagtgatgtaatcatctatgtaggatgtggtgaaagaggaaatgagatgtctgaagtcctccgggacttcccagagctcacaatggaggttgatggtaaggtagagtcaattatgaagaggacagctttggtagccaatacctccaatatgcctgttgctgctagagaagcctctatttatactggaatcacactgtcagagtacttccgtgacatgggctatcatgtcagtatgatggctgactctacctctagatgggctgaggcccttagagaaatctctggtcgtttagctgaaatgcctgcagatagtggatatccagcctatcttggtgcccgtctggcctcgttttatgaacgagcaggcagggtgaaatgtcttggaaatcctgaaagagaagggagtgtcagcattgtaggagcagtttctccacctggtggtgatttttctgatccagttacatctgccactcttggtatcgttcaggtgttctggggcttagataagaaactagctcaacgtaagcatttcccctctgtcaattggctcatcagctacagcaagtatatgcgtgccttggatgaatactatgacaaacacttcacagagttcgttcctctgaggacgaaagctaaggaaattctgcaggaagaagaagacctggcagaaattgtacagcttgtgggaaaggcttctttggcagaaacagataaaatcactctggaggtagcaaaacttatcaaagatgatttcctacaacaaaatggatatactccttatgacaggttctgcccattctacaagacagtagggatgctgtccaacatgattgcattttatgatatggctcgtagagctgttgaaaccactgcccagagtgacaataaaatcacatggtccattattcgtgagcacatgggagacatcctctataaactttcctccatgaaattcaaggatccactgaaagatggtgaggcaaagatcaaaagcgactatgcacaacttcttgaagacatgcagaatgcattccgtagccttgaagattagaagccttgaagattacaactgtgatttccttttcctcagcaagctcctatgtgtatattttcctgaatttctcatctcaaaccctttgcttctttattgtgcagctttgagactagtgcctatgtgtgttatttgtttccctgtttttttggtaggtcttatataaaacaaacattcctttgttctagtgttgtgaagggcctccctcttcctttatctgaagtggtgaatatagtaaatatacattctggttacactactgtaaacttgtatgtagggtgatgaccctctttgtcctaggtgtaccctttcctcatctctattaaattgtaaacaggactactgcatgtactctctttgcagtgaatttggaatggaaggccaggtttctataacttttgaacaggtactttgtgaaatgactcaatttctattgtggtaagctcattggcagcttagcattttgcaaaggaattgctttgcaggaaatatttaattttcaaaaacataatgattaatgttccaattatgcatcacttcccccagtataaatcaggaatgtttgtgagaaaccattgggaactatactctttttatttttattttttattttttttattattttttttttggggacggagtgtccctcttgttgcccaggctggagtgcaatggcgtgatcttggctcactgcagccttcgcctcccgggttcaagtgattctcctgcctcagcctcccgagtagctgggattacaggcatgctccaccatgcccagctaattttgtatttttagtagaaacggggtttcaccatattggtcaggctggtctcgaactccagacctcaggtgatccgcccacctcggcctcccaaactgctgggattacaggcgtgagccaccgcgcctggccagggactatactctttttaaaatagacatttgtggggctcacacaatatatgaaatagtaccctctaaaaaagagaaaaaaaaaatcaggcggtcaaacttagagcaacattgtcttattaaagcatagtttatttcactagaaaaaatttaatatcaaggactattacatacttcattactaggaagttctttttaaaatgacacttaaaacaatcactgaaaacttgatccacatcacaccctgtttattttccttaaacatcttggaagcctaagcttctgagaatcatgtggcaagtgtgatgggcagtaaaataccagagaagatgtttagtagcaattaaaggctgtttgcacctttaaggaccagctgggctgtagtgattcctggggccagagtggcattatgtttttacaaaataatgacatatgtcacatgtttgcatgtttgtttgcttgttgaatttttgaacagccagttgaccaatcatagaaagtattactttctttcatatggtttttggttcactggcttaagaggtttctcagaatatctatggccacagcagcataccagtttccatcctaataggaatgaaattaattttgtatctactgataacagaatctgggtcacatgaaaaaaaatcattttatccgtcttttaagtatatgtttaaaataataatttatgtgtctgcatattgcagaacagctctgagagcaacagtttcccattaactctttctgaccaatagtgctggcaccgttgcttcctctttgggaagaggaaagggtgtgtgaacatggctaacaatcttcaaatacccaaattgtgatagcataaataaagtatttattttatgcctcagtatattattatttaattttttaggtaatgcctatctcttggtctattaaggaaagaagcaatcagtagagaattcaggatagttttgtttaaattcttgcagattacatgtttttacagtggcctgctattgaggaaaggtattcttccatacaacttgttttaacctttgagaacattgacagaaattatgcaatggtttgttgagatacggacttgatggtgctgtttaatcagtttgcttccaaagtggcctactcaagaggccctaagactggtagaaattaaaaggatttcaaaaactttctattcctttcttaaacctaccagcaaactaggattgtgatagcaatgaatggtatgatgaagaaagtttgaccaaatttgtttttttgttgttgttgttgttttgaatttgaaatcattcttattccctttaagaatgtttatgtatgagtgtgaagatgctagcgaacctatgctcagatattcatcgtaagtctcccttcacctgttacagagtttcagatcggtcactgatagtatgtatttctttagtaagaatgtgttaaaattacaatgatcttttaaaaagatgatgcagttctgtatttattgtgctgtgtctggtcctaagtggagccaattaaacaagtttcatatgtatttttccagtgttgaatctcacacactgtactttgaaaatttccttccatcctgaataacgaatagaagaggccatatatattgcctccttatccttgagatttcactacctttatgttaaaagttgtgtataattgttaaaatctgtgaaagaataaaaagtggatttaaattaaaaaaaaaaa

SEQ ID NO: 60043 - DNA, 4519 bp, Homo sapiens
  misc_feature (12)..(12): n is a, c, g, or t
  misc_feature (14)..(15): n is a, c, g, or t
cttcccctccgngnngacagcctctgggtcctcggtcggtacagtctctgcacctcgcgccccagcaggtaaactaacattatggatttttccaagctacccaaaatactcgatgaagataaagaaagcacatttggttatgtgcatggggtctcaggacctgtggttacagcctgtgacatggcgggtgcagccatgtatgagctggtgagagtgggccacagcgaattggttggagagattattcgattggagggtgacatggctactattcaggtgtatgaagaaacttctggtgtgtctgttggagatcctgtacttcgcactggtaaacccctctctgtagagcttggtcctggcattatgggagccatttttgatggtattcaaagacctttgtcggatatcagcagtcagacccaaagcatctacatccccagaggagtaaacgtgtctgctcttagcagagatatcaaatgggactttacaccttgcaaaaacctacgggttggtagtcatatcactggcggagacatttatggaattgtcagtgagaactcgcttatcaaacacaaaatcatgttacccccacgaaacagaggaactgtaacttacattgctccacctgggaattatgatacctctgatgttgtcttggagcttgaatttgaaggtgtaaaggagaagttcaccatggtgcaagtatggcctgtacgtcaagttcgacctgtcactgagaagctgccagccaatcatcctctgttgactggccagagagtccttgatgccctttttccgtgtgtccagggaggaactactgctatccctggagcctttggctgtggaaagacagtgatatcacagtctctatccaagtattctaacagtgatgtaatcatctatgtaggatgtggtgaaagaggaaatgagatgtctgaagtcctccgggacttcccagagctcacaatggaggttgatggtaaggtagagtcaattatgaagaggacagctttggtagccaatacctccaatatgcctgttgctgctagagaagcctctatttatactggaatcacactgtcagagtacttccgtgacatgggctatcatgtcagtatgatggctgactctacctctagatgggctgaggcccttagagaaatctctggtcgtttagctgaaatgcctgcagatagtggatatccagcctatcttggtgcccgtctggcctcgttttatgaacgagcaggcagggtgaaatgtcttggaaatcctgaaagagaagggagtgtcagcattgtaggagcagtttctccacctggtggtgatttttctgatccagttacatctgccactcttggtatcgttcaggtgttctggggcttagataagaaactagctcaacgtaagcatttcccctctgtcaattggctcatcagctacagcaagtatatgcgtgccttggatgaatactatgacaaacacttcacagagttcgttcctctgaggacgaaagctaaggaaattctgcaggaagaagaagacctggcagaaattgtacagcttgtgggaaaggcttctttggcagaaacagataaaatcactctggaggtagcaaaacttatcaaagatgatttcctacaacaaaatggatatactccttatgacaggttctgcccattctacaagacagtagggatgctgtccaacatgattgcattttatgatatggctcgtagagctgttgaaaccactgcccagagtgacaataaaatcacatggtccattattcgtgagcacatgggagacatcctctataaactttcctccatgaaattcaaggatccactgaaagatggtgaggcaaagatcaaaagcgactatgcacaacttcttgaagacatgcagaatgcattccgtagccttgaagattagaagccttgaagattacaactgtgatttccttttcctcagcaagctcctatgtgtatattttcctgaatttctcatctcaaaccctttgcttctttattgtgcagctttgagactagtgcctatgtgtgttatttgtttccctgtttttttggtaggtcttatataaaacaaacattcctttgttctagtgttgtgaagggcctccctcttcctttatctgaagtggtgaatatagtaaatatacattctggttacactactgtaaacttgtatgtagggtgatgaccctctttgtcctaggtgtaccctttcctcatctctattaaattgtaaacaggactactgcatgtactctctttgcagtgaatttggaatggaaggccaggtttctataacttttgaacaggtactttgtgaaatgactcaatttctattgtggtaagctcattggcagcttagcattttgcaaaggaattgctttgcaggaaatatttaattttcaaaaacataatgattaatgttccaattatgcatcacttcccccagtataaatcaggaatgtttgtgagaaaccattgggaactatactctttttatttttattttttattttttttattattttttttttggggacggagtgtccctcttgttgcccaggctggagtgcaatggcgtgatcttggctcactgcagccttcgcctcccgggttcaagtgattctcctgcctcagcctcccgagtagctgggattacaggcatgctccaccatgcccagctaattttgtatttttagtagaaacggggtttcaccatattggtcaggctggtctcgaactccagacctcaggtgatccgcccacctcggcctcccaaactgctgggattacaggcgtgagccaccgcgcctggccagggactatactctttttaaaatagacatttgtggggctcacacaatatatgaaatagtaccctctaaaaaagagaaaaaaaaaatcaggcggtcaaacttagagcaacattgtcttattaaagcatagtttatttcactagaaaaaatttaatatcaaggactattacatacttcattactaggaagttctttttaaaatgacacttaaaacaatcactgaaaacttgatccacatcacaccctgtttattttccttaaacatcttggaagcctaagcttctgagaatcatgtggcaagtgtgatgggcagtaaaataccagagaagatgtttagtagcaattaaaggctgtttgcacctttaaggaccagctgggctgtagtgattcctggggccagagtggcattatgtttttacaaaataatgacatatgtcacatgtttgcatgtttgtttgcttgttgaatttttgaacagccagttgaccaatcatagaaagtattactttctttcatatggtttttggttcactggcttaagaggtttctcagaatatctatggccacagcagcataccagtttccatcctaataggaatgaaattaattttgtatctactgataacagaatctgggtcacatgaaaaaaaatcattttatccgtcttttaagtatatgttttcccattaactctttctgaccaatagtgctggcaccgttgcttcctctttgggaagaggaaagggtgtgtgaacatggctaacaatcttcaaatacccaaattgtgatagcataaataaagtatttattttatgcctcagtatattattatttaattttttaggtaatgcctatctcttggtctattaaggaaagaagcaatcagtagagaattcaggatagttttgtttaaattcttgcagattacatgtttttacagtggcctgctattgaggaaaggtattcttccatacaacttgttttaacctttgagaacattgacagaaattatgcaatggtttgttgagatacggacttgatggtgctgtttaatcagtttgcttccaaagtggcctactcaagaggccctaagactggtagaaattaaaaggatttcaaaaactttctattcctttcttaaacctaccagcaaactaggattgtgatagcaatgaatggtatgatgaagaaagtttgaccaaatttgtttttttgttgttgttgttgttttgaatttgaaatcattcttattccctttaagaatgtttatgtatgagtgtgaagatgctagcgaacctatgctcagatattcatcgtaagtctcccttcacctgttacagagtttcagatcggtcactgatagtatgtatttctttagtaagaatgtgttaaaattacaatgatcttttaaaaagatgatgcagttctgtatttattgtgctgtgtctggtcctaagtggagccaattaaacaagtttcatatgtatttttccagtgttgaatctcacacactgtactttgaaaatttccttccatcctgaataacgaatagaagaggccatatatattgcctccttatccttgagatttcactacctttatgttaaaagttgtgtataattgttaaaatctgtgaaagaataaaaagtggatttaaattaaaaaaaaaaa

SEQ ID NO: 60044 - DNA, 2266 bp, Homo sapiens
gaattccggcgcgctgcgaccgttggggctttgttcgcgggggtcacagctctcatggctgcagctagcgtgaccccccctggctccctggagttgctacagcccggcttctccaagaccctcctggggaccaagctggaagccaagtacctgtgctccgcctgcagaaacgtcctccgcaggcccttccaggcgcagtgtggccaccggtactgctccttctgcctggccagcatcctcagctctgggcctcagaactgtgctgcctgtgttcacgagggcatatatgaagaaggcatttctattttagaaagcagttcggccttcccagataatgctgcccgcagggaggtggagagcctgccggccgtctgtcccagtgatggatgcacctggaaggggaccctgaaagaatacgagagctgccacgaaggccgctgcccgctcatgctgaccgaatgtcccgcgtgcaaaggcctggtccgccttggtgaaaaggagcgccacctggagcacgagtgcccggagagaagcctgagctgccggcattgccgggcaccctgctgcggagcagacgtgaaggcgcaccacgaggtctgccccaagttccccttaacttgtgacggctgcggcaagaagaagatcccccgggagaagtttcaggaccacgtcaagacttgtggcaagtgtcgagtcccttgcagattccacgccatcggctgcctcgagacggtagagggtgagaaacagcaggagcacgaggtgcagtggctgcgggagcacctggccatgctactgagctcggtgctggaggcaaagcccctcttgggagaccagagccacgcggggtcagagctcctgcagaggtgcgagagcctggagaagaagacggccacttttgagaacattgtctgcgtcctgaaccgggaggtggagagggtggccatgactgccgaggcctgcagccggcagcaccggctggaccaagacaagattgaagccctgagtagcaaggtgcagcagctggagaggagcattggcctcaaggacctggcgatggctgacttggagcagaaggtcaggcccttccaggcgcagtgtggccaccggtactgctccttctgcctggccagcatcctcaggaagcgccaggaagctgtggctggccgcatacccgccatcttctccccagccttctacaccagcaggtacggctacaagatgtgtctgcgtatctacctgaacggcgacggcaccgggcgaggaacacacctgtccctcttctttgtggtgatgaagggcccgaatgacgccctgctgcggtggcccttcaaccagaaggtgaccttaatgctgctcgaccagaataaccgggagcacgtgattgacgccttcaggcccgacgtgacttcatcctcttttcagaggccagtcaacgacatgaacatcgcaagcggctgccccctcttctgccccgtctccaagatggaggcaaagaattcctacgtgcgggacgatgccatcttcatcaaggccattgtggacctgacagggctctaactgccccctactggtgtctgggggttgggggcagccaggcacagccggctcacggaggggccaccacgctgggccagggtctcactgtacaagtgggcaggggccgcgcttgggcgcttgggagggtgtcggcctgcagccaagttcactgtcacgggggaaggagccaccagccagtcctcagatttcagagactgcggaggggcttggcagacggtcttagccaagggctgtggtggcattggccgagggtcttcgggtgcttcccagcacaagctgcccttgctgtcctgtgcagtgaagggagaggccctgggtgggggacactcagagtgggagcacatcccagcagtgcccatgtagcaggagcacagtggatggccttgtgtccctcgggcatgacaggcagaaacgagggctgctccaggagaagggcctcctgctggccagagcaaggaaggctgagcagcttggttctcccctctggcccctggagagaagggagcattcctagacccctgggtgcttgtctgcacagagctctggtctgtgccaccttggccaggctggctgtgggagagggtctggtcccacgccgcctctgctcagaccactgtgtgggaggtgcacagcacagcctgcgggtaaagtgtgagagcttgccatccagctcacgaagacagagttattaaaccattcaaatctc

SEQ ID NO: 60045 - DNA, 778 bp, Homo sapiens
tagagacagggtttctccactttggtgaggctggtctcgaactcctgacctcaggtgatccacctgccttggcactcccaaagtgctgggattacaggctggtctcgaactcctggcctgaagtgatcctccaacctcagcctcccaagtagctgggattacaggttgaatcgctcctagctgacccctcacgtctcttatgatacgtacagaaagcaagagcagcccatgccgtccggccgcgcaccaggtctcagtctgtgtgtctggttcaggtgaccatggtgttcagttcagttcctcctgcctcgtgtgtaggccactgagagctccctagtctaagccggaggaggttctgggctttgttcgcgggggtcacagctctcatggctgcagctagcgtgaccccccctggctccctggagttgctacagcccggcttctccaagaccctcctggggaccaagctggaagccaagtacctgtgctccgcctgcagaaacgtcctccgcaggcccttccaggcgcagtgtggccaccggtactgctccttctgcctggccagcatcctcagctctgggcctcagaactgtgctgcctgtgttcacgagggcatatatgaagaaggcatttctattttagaaagcagttcggccttcccagataatgctgcccgcagggaggtggagagcctgccggccgtctgtcccagtgatggatgcacctggaaggggaccctgaaagaatacgaggaaagatgcctgcgtgtggcatggtg

SEQ ID NO: 60046 - DNA, 663 bp, Homo sapiens
  misc_feature (9)..(9): n is a, c, g, or t
  misc_feature (341)..(341): n is a, c, g, or t
  misc_feature (373)..(373): n is a, c, g, or t
  misc_feature (483)..(483): n is a, c, g, or t
  misc_feature (492)..(492): n is a, c, g, or t
  misc_feature (499)..(499): n is a, c, g, or t
  misc_feature (546)..(546): n is a, c, g, or t
  misc_feature (584)..(584): n is a, c, g, or t
  misc_feature (592)..(592): n is a, c, g, or t
  misc_feature (596)..(596): n is a, c, g, or t
  misc_feature (599)..(599): n is a, c, g, or t
  misc_feature (603)..(603): n is a, c, g, or t
agcggagtntcgggcgcgctgcgaccgttggggctttgttcgcgggggtcacagctctcatggctgcagctagcgtgaccccccctggctccctggagttgctacagcccggcttctccaagaccctcctggggaccaagctggaagccaagtacctgtgctccgcctgcagaaacgtcctccgcaggcccttccaggcgcagtgtggccaccggtactgctccttctgcctggccagcatcctcagctctgggcctcagaactgtgctgcctgtgttcacgagggcatatatgaagaaggcatttctattttagaaagcagttcggcaacgacttccagnggtgcttctcgcaggtcaagggggccatcgangaggacgtggccgaagcggacatcatttccaccgttgagtttaattactctggagatcttcttgcaacaggagacaagggcggcagagttgttatttttcagcgtgaacnagagaatanaagccgncctcattctaggggagaatataatgtttacagcacctttcaaagtcntgaaccggagttgactatttgaaaagtctagaaattgnggaacaanttantanaatnaggtggttaccagaacagaatgctgctcatttgctactgtctagcaatgatacaactata

SEQ ID NO: 60047 - DNA, 361 bp, Homo sapiens
ttgtgtgcggcacgcgtgcaggctgaggacaggcagaatgggcctgggggcacggtggaggacgaggatggggaggatgggcctgggggcacggtggaggacgaggatggggaggatgggcctgggggcgtgtggaggacagggatggggaggatgggcctgggcacgtggtggaggacggggacggggaggatgggcctgggcatgtggtggaggactaggacggggggaggatgggcctgggggcatgtggaggacgaggatggggaggatgggtctgggggcacgtggtggaggacgaggatggggaggatgggcctgggggcacgaggtggagaggactaggacagggaggatgggc

SEQ ID NO: 60048 - DNA, 2268 bp, Homo sapiens
ttagttccgggcgcgctgcgaccgttggggctttgttcgcgggggtcacagctctcatggctgcagctagcgtgaccccccctggctccctggagttgctacagcccggcttctccaagaccctcctggggaccaagctggaagccaagtacctgtgctccgcctgcagaaacgtcctccgcaggcccttccaggcgcagtgtggccaccggtactgctccttctgcctggccagcatcctcagctctgggcctcagaactgtgctgcctgtgttcacgagggcatatatgaagaaggcatttctattttagaaagcagttcggccttcccagataatgctgcccgcagggaggtggagagcctgccggccgtctgtcccagtgatggatgcacctggaaggggaccctgaaagaatacgagagctgccacgaaggccgctgcccgctcatgctgaccgaatgtcccgcgtgcaaaggcctggtccgccttggtgaaaaggagcgccacctggagcacgagtgcccggagagaagcctgagctgccggcattgccgggcaccctgctgcggagcagacgtgaaggcgcaccacgaggtctgccccaagttccccttaacttgtgacggctgcggcaagaagaagatcccccgggagaagtttcaggaccacgtcaagacttgtggcaagtgtcgagtcccttgcagattccacgccatcggctgcctcgagacggtagagggtgagaaacagcaggagcacgaggtgcagtggctgcgggagcacctggccatgctactgagctcggtgctggaggcaaagcccctcttgggagaccagagccacgcggggtcagagctcctgcagaggtgcgagagcctggagaagaagacggccacttttgagaacattgtctgcgtcctgaaccgggaggtggagagggtggccatgactgccgaggcctgcagccggcagcaccggctggaccaagacaagattgaagccctgagtagcaaggtgcagcagctggagaggagcattggcctcaaggacctggcgatggctgacttggagcagaaggtcttggagatggaggcatccacctacgatggggtcttcatctggaagatctcagacttcgccaggaagcgccaggaagctgtggctggccgcatacccgccatcttctccccagccttctacaccagcaggtacggctacaagatgtgtctgcgtatctacctgaacggcgacggcaccgggcgaggaacacacctgtccctcttctttgtggtgatgaagggcccgaatgacgccctgctgcggtggcccttcaaccagaaggtgaccttaatgctgctcgaccagaataaccgggagcacgtgattgacgccttcaggcccgacgtgacttcatcctcttttcagaggccagtcaacgacatgaacatcgcaagcggctgccccctcttctgccccgtctccaagatggaggcaaagaattcctacgtgcgggacgatgccatcttcatcaaggccattgtggacctgacagggctctaactgccccctactggtgtctgggggttgggggcagccaggcacagccggctcacggaggggccaccacgctgggccagggtctcactgtacaagtgggcaggggccgcgcttgggcgcttgggagggtgtcggcctgcagccaagttcactgtcacgggggaaggagccaccagccagtcctcagatttcagagactgcggaggggcttggcagacggtcttagccaagggctgtggtggcattggccgagggtcttcgggtgcttcccagcacaagctgcccttgctgtcctgtgcagtgaagggagaggccctgggtgggggacactcagagtgggagcacatcccagcagtgcccatgtagcaggagcacagtggatggccttgtgtccctcgggcatgacaggcagaaacgagggctgctccaggagaagggcctcctgctggccagagcaaggaaggctgagcagcttggttctcccctctggcccctggagagaagggagcattcctagacccctgggtgcttgtctgcacagagctctggtctgtgccaccttggccaggctggctgtgggagagggtctggtcccacgccgcctctgctcagaccactgtgtgggaggtgcacagcacagcctgcgggtaaagtgtgagagcttgccatccagctcacgaagacagagttattaaaccattcaaatctc

SEQ ID NO: 60049 - DNA, 2380 bp, Homo sapiens
ttagttccgggcgcgctgcgaccgttggggctttgttcgcgggggtcacagctctcatggctgcagctagcgtgaccccccctggctccctggagttgctacagcccggcttctccaagaccctcctggggaccaagctggaagccaagtacctgtgctccgcctgcagaaacgtcctccgcaggcccttccaggcgcagtgtggccaccggtactgctccttctgcctggccagcatcctcagctctgggcctcagaactgtgctgcctgtgttcacgagggcatatatgaagaaggcatttctattttagaaagcagttcggccttcccagataatgctgcccgcagggaggtggagagcctgccggccgtctgtcccagtgatggatgcacctggaaggggaccctgaaagaatacgagagctgccacgaaggccgctgcccgctcatgctgaccgaatgtcccgcgtgcaaaggcctggtccgccttggtgaaaaggagcgccacctggagcacgagtgcccggagagaagcctgagctgccggcattgccgggcaccctgctgcggagcagacgtgaaggcgcaccacgaggtctgccccaagttccccttaacttgtgacggctgcggcaagaagaagatcccccgggagaagtttcaggaccacgtcaagacttgtggcaagtgtcgagtcccttgcagattccacgccatcggctgcctcgagacggtagagggtgagaaacagcaggagcacgaggtgcagtggctgcgggagcacctggccatgctactgagctcggtgctggaggcaaagcccctcttgggagaccagagccacgcggggtcagagctcctgcagaggtgcgagagcctggagaagaagacggccacttttgagaacattgtctgcgtcctgaaccgggaggtggagagggtggccatgactgccgaggcctgcagccggcagcaccggctggaccaagacaagattgaagccctgagtagcaaggtgcagcagctggagaggagcattggcctcaaggacctggcgatggctgacttggagcagaaggtcttggagatggaggcatccacctacgatggggtcttcatctggaagatctcagacttcgccaggaagcgccaggaagctgtggctggccgcatacccgccatcttctccccagctgctggctcagccgattgtatatgctgggagctctgcactaagcgttgggtgaagggtcagcattgtggaggccctgccacggaggtggtcttcttgggagctgcactcagccttctacaccagcaggtacggctacaagatgtgtctgcgtatctacctgaacggcgacggcaccgggcgaggaacacacctgtccctcttctttgtggtgatgaagggcccgaatgacgccctgctgcggtggcccttcaaccagaaggtgaccttaatgctgctcgaccagaataaccgggagcacgtgattgacgccttcaggcccgacgtgacttcatcctcttttcagaggccagtcaacgacatgaacatcgcaagcggctgccccctcttctgccccgtctccaagatggaggcaaagaattcctacgtgcgggacgatgccatcttcatcaaggccattgtggacctgacagggctctaactgccccctactggtgtctgggggttgggggcagccaggcacagccggctcacggaggggccaccacgctgggccagggtctcactgtacaagtgggcaggggccgcgcttgggcgcttgggagggtgtcggcctgcagccaagttcactgtcacgggggaaggagccaccagccagtcctcagatttcagagactgcggaggggcttggcagacggtcttagccaagggctgtggtggcattggccgagggtcttcgggtgcttcccagcacaagctgcccttgctgtcctgtgcagtgaagggagaggccctgggtgggggacactcagagtgggagcacatcccagcagtgcccatgtagcaggagcacagtggatggccttgtgtccctcgggcatgacaggcagaaacgagggctgctccaggagaagggcctcctgctggccagagcaaggaaggctgagcagcttggttctcccctctggcccctggagagaagggagcattcctagacccctgggtgcttgtctgcacagagctctggtctgtgccaccttggccaggctggctgtgggagagggtctggtcccacgccgcctctgctcagaccactgtgtgggaggtgcacagcacagcctgcgggtaaagtgtgagagcttgccatccagctcacgaagacagagttattaaaccattcaaatctc

SEQ ID NO: 60050 - DNA, 2293 bp, Homo sapiens
ttagttccgggcgcgctgcgaccgttggggctttgttcgcgggggtcacagctctcatggctgcagctagcgtgaccccccctggctccctggagttgctacagcccggcttctccaagaccctcctggggaccaagctggaagccaagtacctgtgctccgcctgcagaaacgtcctccgcaggcccttccaggcgcagtgtggccaccggtactgctccttctgcctggccagcatcctcagctctgggcctcagaactgtgctgcctgtgttcacgagggcatatatgaagaaggcatttctattttagaaagcagttcggccttcccagataatgctgcccgcagggaggtggagagcctgccggccgtctgtcccagtgatggatgcacctggaaggggaccctgaaagaatacgagagctgccacgaaggccgctgcccgctcatgctgaccgaatgtcccgcgtgcaaaggcctggtccgccttggtgaaaaggagcgccacctggagcacgagtgcccggagagaagcctgagctgccggcattgccgggcaccctgctgcggagcagacgtgaaggcgcaccacgaggtctgccccaagttccccttaacttgtgacggctgcggcaagaagaagatcccccgggagaagtttcaggaccacgtcaagacttgtggcaagtgtcgagtcccttgcagattccacgccatcggctgcctcgagacggtagagggtgagaaacagcaggagcacgaggtgcagtggctgcgggagcacctggccatgctactgagctcggtgctggaggcaaagcccctcttgggagaccagagccacgcggggtcagagctcctgcagaggtgcgagagcctggagaagaagacggccacttttgagaacattgtctgcgtcctgaaccgggaggtggagagggtggccatgactgccgaggcctgcagccggcagcaccggctggaccaagacaagattgaagccctgagtagcaaggtgcagcagctggagaggagcattggcctcaaggacctggcgatggctgacttggagcagaaggtcttggagatggaggcatccacctacgatggggtcttcatctggaagatctcagacttcgccaggaagcgccaggaagctgtggctggccgcatacccgccatcttctccccagccttctacaccagcaggtacggctacaagatgtgtctgcgtatctacctgaacggcgacggcaccgggcgaggaacacacctgtccctcttctttgtggtgatgaagggcccgaatgacgccctgctgcggtggcccttcaaccagaaggtgaccttaatgctgctcgaccagaataaccgggagcacgtgattgacgccttcaggcccgacgtgacttcatcctcttttcagaggccagtcaacgacatgaacatcgcaagcggctgccccctcttctgccccgtctccaagatggaggcaaagaattcctacgtgcgggacgatgccatcttcatcaaggccattgtggacctgacagggctctaactgccccctactggtgtctgggggttgggggcagccaggcacagccggctcacggaggggccaccacgctgggccagggtctcactgtacaagtgggcaggggccgcgcttgggcgcttgggagggtgtcggcctgcagccaagttcactgtcacgggggaaggagccaccagccagtcctcagatttcagagactgcggaggggcttggcagacggtcttagccaagggctgtggtggcattggccgagggtcttcgggtgcttcccagcacaagctgcccttgctgtcctgtgcagtgaagggagaggccctgggtgggggacactcagagtgggagcacatcccagcagtgcccatgtagcaggagcacagtggatggccttgtgtccctcgggcatgacaggcagaaacgagggctgctccaggagaagggcctcctgctggccagagcaaggaaggctgagcagcttggttctcccctctggcccctggagagaagggagcattcctagacccctgggtgcttgtctgcacagagctctggtctgtgccaccttggccaggctggctgtgggagagggtctggtcccacgccgcctctgctcagaccactgtgtgggaggtgcacagcacagcctgcgggtaaagtgtgagagcttgccatccagctcacgaagacagagttattaaaccattcaaatctcaaaaaaaacacatccacacaacagt

SEQ ID NO: 60051 - DNA, 2431 bp, Homo sapiens
ttagttccgggcgcgctgcgaccgttggggctttgttcgcgggggtcacagctctcatggctgcagctagcgtgaccccccctggctccctggagttgctacagcccggcttctccaagaccctcctggggaccaagctggaagccaagtacctgtgctccgcctgcagaaacgtcctccgcaggcccttccaggcgcagtgtggccaccggtactgctccttctgcctggccagcatcctcagctctgggcctcagaactgtgctgcctgtgttcacgagggcatatatgaagaaggcatttctattttagaaagcagttcggccttcccagataatgctgcccgcagggaggtggagagcctgccggccgtctgtcccagtgatggatgcacctggaaggggaccctgaaagaatacgagagctgccacgaaggccgctgcccgctcatgctgaccgaatgtcccgcgtgcaaaggcctggtccgccttggtgaaaaggagcgccacctggagcacgagtgcccggagagaagcctgagctgccggcattgccgggcaccctgctgcggagcagacgtgaaggcgcaccacgaggtctgccccaagttccccttaacttgtgacggctgcggcaagaagaagatcccccgggagaagtttcaggaccacgtcaagacttgtggcaagtgtcgagtcccttgcagattccacgccatcggctgcctcgagacggtagagggtgagaaacagcaggagcacgaggtgcagtggctgcgggagcacctggccatgctactgagctcggtgctggaggcaaagcccctcttgggagaccagagccacgcggggtcagagctcctgcagaggtgcgagagcctggagaagaagacggccacttttgagaacattgtctgcgtcctgaaccgggaggtggagagggtggccatgactgccgaggcctgcagccggcagcaccggctggaccaagacaagattgaagccctgagtagcaaggtgcagcagctggagaggagcattggcctcaaggacctggcgatggctgacttggagcagaaggtcttggagatggaggcatccacctacgatggggtcttcatctggaagatctcagacttcgccaggaagcgccaggaagctgtggctggccgcatacccgccatcttctccccagccttctacaccagcaggtacggctacaagatgtgtctgcgtatctacctgaacggcgacggcaccgggcgaggaacacacctgtccctcttctttgtggtgatgaagggcccgaatgacgccctgctgcggtggcccttcaaccagaaggtgaccttaatgctgctcgaccagaataaccgggagcacgtgattgacgccttcaggcccgacgtgacttcatcctcttttcagaggccagtcaacgacatgaacatcgcaagcggctgccccctcttctgccccgtctccaagatggaggcaaagaattcctacgtgcgggacgatgccatcttcatcaaggccattgtggacctgacagggctctaactgccccctactggtgtctgggggttgggggcagccaggcacagccggctcacggaggggccaccacgctgggccagggtctcactgtacaagtgggcaggggccgcgcttgggcgcttgggagggtgtcggcctgcagccaagttcactgtcacgggggaaggagccaccagccagtcctcagatttcagagactgcggaggggcttggcagacggtcttagccaagggctgtggtggcattggccgagggtcttcgggtgcttcccagcacaagctgcccttgctgtcctgtgcagtgaagggagaggccctgggtgggggacactcagagtgggagcacatcccagcagtgcccatgtagcaggagcacagtggatggccttgtgtccctcgggcatgacaggcagaaacgagggctgctccaggagaagggcctcctgctggccagagcaaggaaggctgagcagcttggttctcccctctggcccctggagagaagggagcattcctagacccctgggtgcttgtctgcacagagctctggtctgtgccaccttggccaggctggctgtgggagagggtctggtcccacgccgcctctgctcagaccactgtgtgggaggtgcacagcacagcctgcgggtaaagtgtgagagcttgccatccagctcacgaagacagagttattaaaccattcaaatctctctctgtggtcagtggcatccatttgattccaggttgcctgcggcttccagccttggcagtggtgaccctctgcgggtcctcctggcctctcctctcacagacccctccccacggggtgctagcgcctgcctgcttctctagctagccaggcgtgtgttctct

SEQ ID NO: 60052 - DNA, 2464 bp, Homo sapiens
ctcgtgggaaccggtgtcgcccggcttgggctcccggctcacctctcgggtgtgcggcaggggtctccgccccggggccacgggaggggaagcaagggcctcgctgtctcgccgcacctggggaagggacccaattagcgcggaccccacagcgcagcacctcaccagctccccgcaccaacgccccggcgcgctctttgaggaaaaagcagagggcgacttagggctttgttcgcgggggtcacagctctcatggctgcagctagcgtgaccccccctggctccctggagttgctacagcccggcttctccaagaccctcctggggaccaagctggaagccaagtacctgtgctccgcctgcagaaacgtcctccgcaggcccttccaggcgcagtgtggccaccggtactgctccttctgcctggccagcatcctcagctctgggcctcagaactgtgctgcctgtgttcacgagggcatatatgaagaaggcatttctattttagaaagcagttcggccttcccagataatgctgcccgcagggaggtggagagcctgccggccgtctgtcccagtgatggatgcacctggaaggggaccctgaaagaatacgagagctgccacgaaggccgctgcccgctcatgctgaccgaatgtcccgcgtgcaaaggcctggtccgccttggtgaaaaggagcgccacctggagcacgagtgcccggagagaagcctgagctgccggcattgccgggcaccctgctgcggagcagacgtgaaggcgcaccacgaggtctgccccaagttccccttaacttgtgacggctgcggcaagaagaagatcccccgggagaagtttcaggaccacgtcaagacttgtggcaagtgtcgagtcccttgcagattccacgccatcggctgcctcgagacggtagagggtgagaaacagcaggagcacgaggtgcagtggctgcgggagcacctggccatgctactgagctcggtgctggaggcaaagcccctcttgggagaccagagccacgcggggtcagagctcctgcagaggtgcgagagcctggagaagaagacggccacttttgagaacattgtctgcgtcctgaaccgggaggtggagagggtggccatgactgccgaggcctgcagccggcagcaccggctggaccaagacaagattgaagccctgagtagcaaggtgcagcagctggagaggagcattggcctcaaggacctggcgatggctgacttggagcagaaggtcttggagatggaggcatccacctacgatggggtcttcatctggaagatctcagacttcgccaggaagcgccaggaagctgtggctggccgcatacccgccatcttctccccagccttctacaccagcaggtacggctacaagatgtgtctgcgtatctacctgaacggcgacggcaccgggcgaggaacacacctgtccctcttctttgtggtgatgaagggcccgaatgacgccctgctgcggtggcccttcaaccagaaggtgaccttaatgctgctcgaccagaataaccgggagcacgtgattgacgccttcaggcccgacgtgacttcatcctcttttcagaggccagtcaacgacatgaacatcgcaagcggctgccccctcttctgccccgtctccaagatggaggcaaagaattcctacgtgcgggacgatgccatcttcatcaaggccattgtggacctgacagggctctaactgccccctactggtgtctgggggttgggggcagccaggcacagccggctcacggaggggccaccacgctgggccagggtctcactgtacaagtgggcaggggccgcgcttgggcgcttgggagggtgtcggcctgcagccaagttcactgtcacgggggaaggagccaccagccagtcctcagatttcagagactgcggaggggcttggcagacggtcttagccaagggctgtggtggcattggccgagggtcttcgggtgcttcccagcacaagctgcccttgctgtcctgtgcagtgaagggagaggccctgggtgggggacactcagagtgggagcacatcccagcagtgcccatgtagcaggagcacagtggatggccttgtgtccctcgggcatgacaggcagaaacgagggctgctccaggagaagggcctcctgctggccagagcaaggaaggctgagcagcttggttctcccctctggcccctggagagaagggagcattcctagacccctgggtgcttgtctgcacagagctctggtctgtgccaccttggccaggctggctgtgggagagggtctggtcccacgccgcctctgctcagaccactgtgtgggaggtgcacagcacagcctgcgggtaaagtgtgagagcttgccatccagctcacgaagacagagttattaaaccattcaaatctc

SEQ ID NO: 60053 - DNA, 2490 bp, Homo sapiens
agactccgggccggagcgggagcgggggcgggagaggccgcggggcgggggcggggccagcccgaggggatttctctgagccgctgggccggaaaccaagtccgagcgtggctggcgcgggaaagttcgggaacgcgcgcggccgtgctcggagcagcgccagggcacggtccggggttttgcgcggggtcgcggctcccagtaccgcctgaggcccgtgggcggcccacccggccctgccccgtcccggggctttgttcgcgggggtcacagctctcatggctgcagctagcgtgaccccccctggctccctggagttgctacagcccggcttctccaagaccctcctggggaccaagctggaagccaagtacctgtgctccgcctgcagaaacgtcctccgcaggcccttccaggcgcagtgtggccaccggtactgctccttctgcctggccagcatcctcagctctgggcctcagaactgtgctgcctgtgttcacgagggcatatatgaagaaggcatttctattttagaaagcagttcggccttcccagataatgctgcccgcagggaggtggagagcctgccggccgtctgtcccagtgatggatgcacctggaaggggaccctgaaagaatacgagagctgccacgaaggccgctgcccgctcatgctgaccgaatgtcccgcgtgcaaaggcctggtccgccttggtgaaaaggagcgccacctggagcacgagtgcccggagagaagcctgagctgccggcattgccgggcaccctgctgcggagcagacgtgaaggcgcaccacgaggtctgccccaagttccccttaacttgtgacggctgcggcaagaagaagatcccccgggagaagtttcaggaccacgtcaagacttgtggcaagtgtcgagtcccttgcagattccacgccatcggctgcctcgagacggtagagggtgagaaacagcaggagcacgaggtgcagtggctgcgggagcacctggccatgctactgagctcggtgctggaggcaaagcccctcttgggagaccagagccacgcggggtcagagctcctgcagaggtgcgagagcctggagaagaagacggccacttttgagaacattgtctgcgtcctgaaccgggaggtggagagggtggccatgactgccgaggcctgcagccggcagcaccggctggaccaagacaagattgaagccctgagtagcaaggtgcagcagctggagaggagcattggcctcaaggacctggcgatggctgacttggagcagaaggtcttggagatggaggcatccacctacgatggggtcttcatctggaagatctcagacttcgccaggaagcgccaggaagctgtggctggccgcatacccgccatcttctccccagccttctacaccagcaggtacggctacaagatgtgtctgcgtatctacctgaacggcgacggcaccgggcgaggaacacacctgtccctcttctttgtggtgatgaagggcccgaatgacgccctgctgcggtggcccttcaaccagaaggtgaccttaatgctgctcgaccagaataaccgggagcacgtgattgacgccttcaggcccgacgtgacttcatcctcttttcagaggccagtcaacgacatgaacatcgcaagcggctgccccctcttctgccccgtctccaagatggaggcaaagaattcctacgtgcgggacgatgccatcttcatcaaggccattgtggacctgacagggctctaactgccccctactggtgtctgggggttgggggcagccaggcacagccggctcacggaggggccaccacgctgggccagggtctcactgtacaagtgggcaggggccgcgcttgggcgcttgggagggtgtcggcctgcagccaagttcactgtcacgggggaaggagccaccagccagtcctcagatttcagagactgcggaggggcttggcagacggtcttagccaagggctgtggtggcattggccgagggtcttcgggtgcttcccagcacaagctgcccttgctgtcctgtgcagtgaagggagaggccctgggtgggggacactcagagtgggagcacatcccagcagtgcccatgtagcaggagcacagtggatggccttgtgtccctcgggcatgacaggcagaaacgagggctgctccaggagaagggcctcctgctggccagagcaaggaaggctgagcagcttggttctcccctctggcccctggagagaagggagcattcctagacccctgggtgcttgtctgcacagagctctggtctgtgccaccttggccaggctggctgtgggagagggtctggtcccacgccgcctctgctcagaccactgtgtgggaggtgcacagcacagcctgcgggtaaagtgtgagagcttgccatccagctcacgaagacagagttattaaaccattcaaatctc

SEQ ID NO: 60054 - DNA, 2406 bp, Homo sapiens
agatgactgcagagtgagagtgaaaccagcttccctcggaggctgcagcacagggctgacatgcaaacgtctgaaaaagaggcaagctctcggtgtgagcaagtggactgcggctatttgaggaaggagcccacgtgggaatcccctgagctgcgccatggccagaggctttgttcgcgggggtcacagctctcatggctgcagctagcgtgaccccccctggctccctggagttgctacagcccggcttctccaagaccctcctggggaccaagctggaagccaagtacctgtgctccgcctgcagaaacgtcctccgcaggcccttccaggcgcagtgtggccaccggtactgctccttctgcctggccagcatcctcagctctgggcctcagaactgtgctgcctgtgttcacgagggcatatatgaagaaggcatttctattttagaaagcagttcggccttcccagataatgctgcccgcagggaggtggagagcctgccggccgtctgtcccagtgatggatgcacctggaaggggaccctgaaagaatacgagagctgccacgaaggccgctgcccgctcatgctgaccgaatgtcccgcgtgcaaaggcctggtccgccttggtgaaaaggagcgccacctggagcacgagtgcccggagagaagcctgagctgccggcattgccgggcaccctgctgcggagcagacgtgaaggcgcaccacgaggtctgccccaagttccccttaacttgtgacggctgcggcaagaagaagatcccccgggagaagtttcaggaccacgtcaagacttgtggcaagtgtcgagtcccttgcagattccacgccatcggctgcctcgagacggtagagggtgagaaacagcaggagcacgaggtgcagtggctgcgggagcacctggccatgctactgagctcggtgctggaggcaaagcccctcttgggagaccagagccacgcggggtcagagctcctgcagaggtgcgagagcctggagaagaagacggccacttttgagaacattgtctgcgtcctgaaccgggaggtggagagggtggccatgactgccgaggcctgcagccggcagcaccggctggaccaagacaagattgaagccctgagtagcaaggtgcagcagctggagaggagcattggcctcaaggacctggcgatggctgacttggagcagaaggtcttggagatggaggcatccacctacgatggggtcttcatctggaagatctcagacttcgccaggaagcgccaggaagctgtggctggccgcatacccgccatcttctccccagccttctacaccagcaggtacggctacaagatgtgtctgcgtatctacctgaacggcgacggcaccgggcgaggaacacacctgtccctcttctttgtggtgatgaagggcccgaatgacgccctgctgcggtggcccttcaaccagaaggtgaccttaatgctgctcgaccagaataaccgggagcacgtgattgacgccttcaggcccgacgtgacttcatcctcttttcagaggccagtcaacgacatgaacatcgcaagcggctgccccctcttctgccccgtctccaagatggaggcaaagaattcctacgtgcgggacgatgccatcttcatcaaggccattgtggacctgacagggctctaactgccccctactggtgtctgggggttgggggcagccaggcacagccggctcacggaggggccaccacgctgggccagggtctcactgtacaagtgggcaggggccgcgcttgggcgcttgggagggtgtcggcctgcagccaagttcactgtcacgggggaaggagccaccagccagtcctcagatttcagagactgcggaggggcttggcagacggtcttagccaagggctgtggtggcattggccgagggtcttcgggtgcttcccagcacaagctgcccttgctgtcctgtgcagtgaagggagaggccctgggtgggggacactcagagtgggagcacatcccagcagtgcccatgtagcaggagcacagtggatggccttgtgtccctcgggcatgacaggcagaaacgagggctgctccaggagaagggcctcctgctggccagagcaaggaaggctgagcagcttggttctcccctctggcccctggagagaagggagcattcctagacccctgggtgcttgtctgcacagagctctggtctgtgccaccttggccaggctggctgtgggagagggtctggtcccacgccgcctctgctcagaccactgtgtgggaggtgcacagcacagcctgcgggtaaagtgtgagagcttgccatccagctcacgaagacagagttattaaaccattcaaatctc

SEQ ID NO: 60055 - DNA, 2598 bp, Homo sapiens
tagagacagggtttctccactttggtgaggctggtctcgaactcctgacctcaggtgatccacctgccttggcactcccaaagtgctgggattacaggctggtctcgaactcctggcctgaagtgatcctccaacctcagcctcccaagtagctgggattacaggttgaatcgctcctagctgacccctcacgtctcttatgatacgtacagaaagcaagagcagcccatgccgtccggccgcgcaccaggtctcagtctgtgtgtctggttcaggtgaccatggtgttcagttcagttcctcctgcctcgtgtgtaggccactgagagctccctagtctaagccggaggaggttctgggctttgttcgcgggggtcacagctctcatggctgcagctagcgtgaccccccctggctccctggagttgctacagcccggcttctccaagaccctcctggggaccaagctggaagccaagtacctgtgctccgcctgcagaaacgtcctccgcaggcccttccaggcgcagtgtggccaccggtactgctccttctgcctggccagcatcctcagctctgggcctcagaactgtgctgcctgtgttcacgagggcatatatgaagaaggcatttctattttagaaagcagttcggccttcccagataatgctgcccgcagggaggtggagagcctgccggccgtctgtcccagtgatggatgcacctggaaggggaccctgaaagaatacgagagctgccacgaaggccgctgcccgctcatgctgaccgaatgtcccgcgtgcaaaggcctggtccgccttggtgaaaaggagcgccacctggagcacgagtgcccggagagaagcctgagctgccggcattgccgggcaccctgctgcggagcagacgtgaaggcgcaccacgaggtctgccccaagttccccttaacttgtgacggctgcggcaagaagaagatcccccgggagaagtttcaggaccacgtcaagacttgtggcaagtgtcgagtcccttgcagattccacgccatcggctgcctcgagacggtagagggtgagaaacagcaggagcacgaggtgcagtggctgcgggagcacctggccatgctactgagctcggtgctggaggcaaagcccctcttgggagaccagagccacgcggggtcagagctcctgcagaggtgcgagagcctggagaagaagacggccacttttgagaacattgtctgcgtcctgaaccgggaggtggagagggtggccatgactgccgaggcctgcagccggcagcaccggctggaccaagacaagattgaagccctgagtagcaaggtgcagcagctggagaggagcattggcctcaaggacctggcgatggctgacttggagcagaaggtcttggagatggaggcatccacctacgatggggtcttcatctggaagatctcagacttcgccaggaagcgccaggaagctgtggctggccgcatacccgccatcttctccccagccttctacaccagcaggtacggctacaagatgtgtctgcgtatctacctgaacggcgacggcaccgggcgaggaacacacctgtccctcttctttgtggtgatgaagggcccgaatgacgccctgctgcggtggcccttcaaccagaaggtgaccttaatgctgctcgaccagaataaccgggagcacgtgattgacgccttcaggcccgacgtgacttcatcctcttttcagaggccagtcaacgacatgaacatcgcaagcggctgccccctcttctgccccgtctccaagatggaggcaaagaattcctacgtgcgggacgatgccatcttcatcaaggccattgtggacctgacagggctctaactgccccctactggtgtctgggggttgggggcagccaggcacagccggctcacggaggggccaccacgctgggccagggtctcactgtacaagtgggcaggggccgcgcttgggcgcttgggagggtgtcggcctgcagccaagttcactgtcacgggggaaggagccaccagccagtcctcagatttcagagactgcggaggggcttggcagacggtcttagccaagggctgtggtggcattggccgagggtcttcgggtgcttcccagcacaagctgcccttgctgtcctgtgcagtgaagggagaggccctgggtgggggacactcagagtgggagcacatcccagcagtgcccatgtagcaggagcacagtggatggccttgtgtccctcgggcatgacaggcagaaacgagggctgctccaggagaagggcctcctgctggccagagcaaggaaggctgagcagcttggttctcccctctggcccctggagagaagggagcattcctagacccctgggtgcttgtctgcacagagctctggtctgtgccaccttggccaggctggctgtgggagagggtctggtcccacgccgcctctgctcagaccactgtgtgggaggtgcacagcacagcctgcgggtaaagtgtgagagcttgccatccagctcacgaagacagagttattaaaccattcaaatctc

SEQ ID NO: 60056 - DNA, 2235 bp, Homo sapiens
ttagttccgggcgcgctgcgaccgttggggctttgttcgcgggggtcacagctctcatggctgcagctagcgtgaccccccctggctccctggagttgctacagcccggcttctccaagaccctcctggggaccaagctggaagccaagtacctgtgctccgcctgcagaaacgtcctccgcaggcccttccaggcgcagtgtggccaccgctctgggcctcagaactgtgctgcctgtgttcacgagggcatatatgaagaaggcatttctattttagaaagcagttcggccttcccagataatgctgcccgcagggaggtggagagcctgccggccgtctgtcccagtgatggatgcacctggaaggggaccctgaaagaatacgagagctgccacgaaggccgctgcccgctcatgctgaccgaatgtcccgcgtgcaaaggcctggtccgccttggtgaaaaggagcgccacctggagcacgagtgcccggagagaagcctgagctgccggcattgccgggcaccctgctgcggagcagacgtgaaggcgcaccacgaggtctgccccaagttccccttaacttgtgacggctgcggcaagaagaagatcccccgggagaagtttcaggaccacgtcaagacttgtggcaagtgtcgagtcccttgcagattccacgccatcggctgcctcgagacggtagagggtgagaaacagcaggagcacgaggtgcagtggctgcgggagcacctggccatgctactgagctcggtgctggaggcaaagcccctcttgggagaccagagccacgcggggtcagagctcctgcagaggtgcgagagcctggagaagaagacggccacttttgagaacattgtctgcgtcctgaaccgggaggtggagagggtggccatgactgccgaggcctgcagccggcagcaccggctggaccaagacaagattgaagccctgagtagcaaggtgcagcagctggagaggagcattggcctcaaggacctggcgatggctgacttggagcagaaggtcttggagatggaggcatccacctacgatggggtcttcatctggaagatctcagacttcgccaggaagcgccaggaagctgtggctggccgcatacccgccatcttctccccagccttctacaccagcaggtacggctacaagatgtgtctgcgtatctacctgaacggcgacggcaccgggcgaggaacacacctgtccctcttctttgtggtgatgaagggcccgaatgacgccctgctgcggtggcccttcaaccagaaggtgaccttaatgctgctcgaccagaataaccgggagcacgtgattgacgccttcaggcccgacgtgacttcatcctcttttcagaggccagtcaacgacatgaacatcgcaagcggctgccccctcttctgccccgtctccaagatggaggcaaagaattcctacgtgcgggacgatgccatcttcatcaaggccattgtggacctgacagggctctaactgccccctactggtgtctgggggttgggggcagccaggcacagccggctcacggaggggccaccacgctgggccagggtctcactgtacaagtgggcaggggccgcgcttgggcgcttgggagggtgtcggcctgcagccaagttcactgtcacgggggaaggagccaccagccagtcctcagatttcagagactgcggaggggcttggcagacggtcttagccaagggctgtggtggcattggccgagggtcttcgggtgcttcccagcacaagctgcccttgctgtcctgtgcagtgaagggagaggccctgggtgggggacactcagagtgggagcacatcccagcagtgcccatgtagcaggagcacagtggatggccttgtgtccctcgggcatgacaggcagaaacgagggctgctccaggagaagggcctcctgctggccagagcaaggaaggctgagcagcttggttctcccctctggcccctggagagaagggagcattcctagacccctgggtgcttgtctgcacagagctctggtctgtgccaccttggccaggctggctgtgggagagggtctggtcccacgccgcctctgctcagaccactgtgtgggaggtgcacagcacagcctgcgggtaaagtgtgagagcttgccatccagctcacgaagacagagttattaaaccattcaaatctc

SEQ ID NO: 60057 - DNA, 2076 bp, Homo sapiens
ttagttccgggcgcgctgcgaccgttggggctttgttcgcgggggtcacagctctcatggctgcagctagcgtgaccccccctggctccctggagttgctacagcccggcttctccaagaccctcctggggaccaagctggaagccaagtacctgtgctccgcctgcagaaacgtcctccgcaggcccttccaggcgcagtgtggccaccggtactgctccttctgcctggccagcatcctcagctctgggcctcagaactgtgctgcctgtgttcacgagggcatatatgaagaaggcatttctattttagaaagcagttcggccttcccagataatgctgcccgcagggaggtggagagcctgccggccgtctgtcccagtgatggatgcacctggaaggggaccctgaaagaatacgagagctgccacgaaggccgctgcccgctcatgctgaccgaatgtcccgcgtgcaaaggcctggtccgccttggtgaaaaggagcgccacctggagcacgagtgcccggagagaagcctgagctgccggcattgccgggcaccctgctgcggagcagacgtgaaggcgcaccacgaggtctgccccaagttccccttaacttgtgacggctgcggcaagaagaagatcccccgggagaagtttcaggaccacgtcaagacttgtggcaagtgtcgagtcccttgcagattccacgccatcggctgcctcgagacggtagagggtgagaaacagcaggagcacgaggtgcagtggctgcgggagcacctggccatgctactgagctcggtgctggaggcaaagcccctcttgggagaccagagccacgcggggtcagagctcctgcagaggtgcgagagcctggagaagaagacggccacttttgagaacattgtctgcgtcctgaaccgggaggtggagagggtggccatgactgccgaggcctgcagccggcagcaccggctggaccaagacaagattgaagccctgagtagcaaggtgcagcagctggagaggagcattggcctcaaggacctggcgatggctgacttggagcagaaggtcttggagatggaggcatccacctacgatggggtcttcatctggaagatctcagacttcgccaggaagcgccaggaagctgtggctggccgcatacccgccatcttctccccagccttctacaccagcaggtacggctacaagatgtgtctgcgtatctacctgaacggcgacggcaccgggcgaggaacacacctgtccctcttctttgtggtgatgaagggcccgaatgacgccctgctgcggtggcccttcaaccagaaggtgaccttaatgctgctcgaccagaataaccgggagcacgtgattgacgccttcaggcccgacgtgacttcatcctcttttcagaggccagtcaacgacatgaacatcgcaagcggctgccccctcttctgccccgtctccaagatggaggcaaagaattcctacgtgcgggacgatgccatcttcatcaaggccattgtggacctgacagggctctaactgccccctactggtgtctgggggttgggggcagccaggcacagccggctcacggaggggccaccacgctgggccagggtctcactgtacaagtgggcaggggccgcgcttgggcgcttgggagggtgtcggcctgcagccaagttcactgtcacgggggaaggagccaccagccagtcctcagatttcagagactgcggagggggccaggctggctgtgggagagggtctggtcccacgccgcctctgctcagaccactgtgtgggaggtgcacagcacagcctgcgggtaaagtgtgagagcttgccatccagctcacgaagacagagttattaaaccattcaaatctctctctgtggtcagtggcatccatttgattccaggttgcctgcggcttccagccttggcagtggtgaccctctgcgggtcctcctggcctctcctctcacagacccctccccacggggtgctagcgcctgcctgcttctctagctagccaggcgtgtgttctct

SEQ ID NO: 60058 - DNA, 2211 bp, Homo sapiens
  misc_feature (23)..(23): n is a, c, g, or t
  misc_feature (62)..(62): n is a, c, g, or t
  misc_feature (72)..(72): n is a, c, g, or t
  misc_feature (82)..(82): n is a, c, g, or t
  misc_feature (106)..(106): n is a, c, g, or t
  misc_feature (110)..(110): n is a, c, g, or t
  misc_feature (125)..(126): n is a, c, g, or t
  misc_feature (136)..(136): n is a, c, g, or t
  misc_feature (143)..(143): n is a, c, g, or t
  misc_feature (165)..(166): n is a, c, g, or t
  misc_feature (172)..(172): n is a, c, g, or t
  misc_feature (190)..(190): n is a, c, g, or t
  misc_feature (193)..(193): n is a, c, g, or t
  misc_feature (197)..(197): n is a, c, g, or t
  misc_feature (205)..(205): n is a, c, g, or t
  misc_feature (221)..(221): n is a, c, g, or t
  misc_feature (227)..(227): n is a, c, g, or t
  misc_feature (231)..(231): n is a, c, g, or t
  misc_feature (239)..(239): n is a, c, g, or t
  misc_feature (260)..(260): n is a, c, g, or t
  misc_feature (287)..(287): n is a, c, g, or t
  misc_feature (302)..(302): n is a, c, g, or t
  misc_feature (307)..(307): n is a, c, g, or t
  misc_feature (342)..(342): n is a, c, g, or t
  misc_feature (347)..(347): n is a, c, g, or t
  misc_feature (363)..(363): n is a, c, g, or t
  misc_feature (365)..(365): n is a, c, g, or t
  misc_feature (385)..(385): n is a, c, g, or t
  misc_feature (395)..(395): n is a, c, g, or t
  misc_feature (415)..(415): n is a, c, g, or t
  misc_feature (421)..(421): n is a, c, g, or t
ctggctgctcgcttgccgctgcncccccctggttccctggtgttgctcctgctcggcttctncttgctcctnctgggcgtcntcgctggtctgctccgttcttgtnctcngcttgttgttttgtnntctgctgttnttttttntgttgtgtggcccctggttttnntttttntgcttggtttgtttcttntgntttnggcttttnttctgtgttgtttgtntttttntggntttttttnttgttggtttttttttttttntttgttgtttggttttttttgtttttnttgttcgttgtggtngtgtncttgctggttgtttgttccgttatggttgtttctngtggngttttgtttttttttntnttctgttttgttggttgctncttgtttttnctgtttgtttgttttgtgtnttatgnttgtgtttgctttggtgttttggtgcgccacctggagcacgagtgcccggagagaagcctgagctgccggcattgccgggcaccctgctgcggagcagacgtgaaggcgcaccacgaggtctgccccaagttccccttaacttgtgacggctgcggcaagaagaagatcccccgggagaagtttcaggaccacgtcaagacttgtggcaagtgtcgagtcccttgcagattccacgccatcggctgcctcgagacggtagagggtgagaaacagcaggagcacgaggtgcagtggctgcgggagcacctggccatgctactgagctcggtgctggaggcaaagcccctcttgggagaccagagccacgcggggtcagagctcctgcagaggtgcgagagcctggagaagaagacggccacttttgagaacattgtctgcgtcctgaaccgggaggtggagagggtggccatgactgccgaggcctgcagccggcagcaccggctggaccaagacaagattgaagccctgagtagcaaggtgcagcagctggagaggagcattggcctcaaggacctggcgatggctgacttggagcagaaggtcttggagatggaggcatccacctacgatggggtcttcatctggaagatctcagacttcgccaggaagcgccaggaagctgtggctggccgcatacccgccatcttctccccagccttctacaccagcaggtacggctacaagatgtgtctgcgtatctacctgaacggcgacggcaccgggcgaggaacacacctgtccctcttctttgtggtgatgaagggcccgaatgacgccctgctgcggtggcccttcaaccagaaggtgaccttaatgctgctcgaccagaataaccgggagcacgtgattgacgccttcaggcccgacgtgacttcatcctcttttcagaggccagtcaacgacatgaacatcgcaagcggctgccccctcttctgccccgtctccaagatggaggcaaagaattcctacgtgcgggacgatgccatcttcatcaaggccattgtggacctgacagggctctaactgccccctactggtgtctgggggttgggggcagccaggcacagccggctcacggaggggccaccacgctgggccagggtctcactgtacaagtgggcaggggccgcgcttgggcgcttgggagggtgtcggcctgcagccaagttcactgtcacgggggaaggagccaccagccagtcctcagatttcagagactgcggaggggcttggcagacggtcttagccaagggctgtggtggcattggccgagggtcttcgggtgcttcccagcacaagctgcccttgctgtcctgtgcagtgaagggagaggccctgggtgggggacactcagagtgggagcacatcccagcagtgcccatgtagcaggagcacagtggatggccttgtgtccctcgggcatgacaggcagaaacgagggctgctccaggagaagggcctcctgctggccagagcaaggaaggctgagcagcttggttctcccctctggcccctggagagaagggagcattcctagacccctgggtgcttgtctgcacagagctctggtctgtgccaccttggccaggctggctgtgggagagggtctggtcccacgccgcctctgctcagaccactgtgtgggaggtgcacagcacagcctgcgggtaaagtgtgagagcttgccatccagctcacgaagacagagttattaaaccattcaaatctc

SEQ ID NO: 60059 - DNA, 1671 bp, Homo sapiens
ttagttccgggcgcgctgcgaccgttggggctttgttcgcgggggtcacagctctcatggctgcagctagcgtgaccccccctggctccctggagttgctacagcccggcttctccaagaccctcctggggaccaagctggaagccaagtacctgtgctccgcctgcagaaacgtcctccgcaggcccttccaggcgcagtgtggccaccggtactgctccttctgcctggccagcatcctcagctctgggcctcagaactgtgctgcctgtgttcacgagggcatatatgaagaaggcatttctattttagaaagcagttcggccttcccagataatgctgcccgcagggaggtggagagcctgccggccgtctgtcccagtgatggatgcacctggaaggggaccctgaaagaatacgagagctgccacgaaggccgctgcccgctcatgctgaccgaatgtcccgcgtgcaaaggcctggtccgccttggtgaaaaggagcgccacctggagcacgagtgcccggagagaagcctgagctgccggcattgccgggcaccctgctgcggagcagacgtgaaggcgcaccacgaggtctgccccaagttccccttaacttgtgacggctgcggcaagaagaagatcccccgggagaagtttcaggaccacgtcaagacttgtggcaagtgtcgagtcccttgcagattccacgccatcggctgcctcgagacggtagagggtgagaaacagcaggagcacgaggtgcagtggctgcgggagcacctggccatgctactgagctcggtgctggaggcaaagcccctcttgggagaccagagccacgcggggtcagagctcctgcagaggtgcgagagcctggagaagaagacggccacttttgagaacattgtctgcgtcctgaaccgggaggtggagagggtggccatgactgccgaggcctgcagccggcagcaccggctggaccaagacaagattgaagccctgagtagcaaggtgcagcagctggagaggagcattggcctcaaggacctggcgatggctgacttggagcagaaggtcttggagatggaggcatccacctacgatggggtcttcatctggaagatctcagacttcgccaggaagcgccaggaagctgtggctggccgcatacccgccatcttctccccagccttctacaccagcaggtacggctacaagatgtgtctgcgtatctacctgaacggcgacggcaccgggcgaggaacacacctgtccctcttctttgtggtgatgaagggcccgaatgacgccctgctgcggtggcccttcaaccagaaggtgaccttaatgctgctcgaccagaataaccgggagcacgtgattgacgccttcaggcccgacgtgacttcatcctcttttcagaggccagtcaacgacatgaacatcgcaagcggctgccccctcttctgccccgtctccaagatggaggcaaagaattcctacgtgcgggacgatgccatgccaggctggctgtgggagagggtctggtcccacgccgcctctgctcagaccactgtgtgggaggtgcacagcacagcctgcgggtaaagtgtgagagcttgccatccagctcacgaagacagagttattaaaccattcaaatctc

SEQ ID NO: 60060 - DNA, 1143 bp, Homo sapiens
cacgaggctgcggccgcctgccatccatccctgagaacaggaacctaacggagctggtggtggccgtgactgacgagaacatcgtggggctgttcgcggcgctcctggccgagagaagagtcctgctcaccgccagcaaactcagcaccctgacctcgtgcgtccacgcgtcctgcgcgctcctgtaccccctgctgcggtggcccttcaaccagaaggtgaccttaatgctgctcgaccagaataaccgggagcacgtgattgacgccttcaggcccgacgtgacttcatcctcttttcagaggccagtcaacgacatgaacatcgcaagcggctgccccctcttctgccccgtctccaagatggaggcaaagaattcctacgtgcgggacgatgccatcttcatcaaggccattgtggacctgacagggctctaactgccccctactggtgtctgggggttgggggcagccaggcacagccggctcacggaggggccaccacgctgggccagggtctcactgtacaagtgggcaggggccgcgcttgggcgcttgggagggtgtcggcctgcagccaagttcactgtcacgggggaaggagccaccagccagtcctcagatttcagagactgcggaggggcttggcagacggtcttagccaagggctgtggtggcattggccgagggtcttcgggtgcttcccagcacaagctgcccttgctgtcctgtgcagtgaagggagaggccctgggtgggggacactcagagtgggagcacatcccagcagtgcccatgtagcaggagcacagtggatggccttgtgtccctcgggcatgacaggcagaaacgagggctgctccaggagaagggcctcctgctggccagagcaaggaaggctgagcagcttggttctcccctctggcccctggagagaagggagcattcctagacccctgggtgcttgtctgcacagagctctggtctgtgccaccttggccaggctggctgtgggagagggtctggtcccacgccgcctctgctcagaccactgtgtgggaggtgcacagcacagcctgcgggtaaagtgtgagagcttgccatccagctcacgaagacagagttattaaaccattcaaatctc

SEQ ID NO: 60061 - DNA, 801 bp, Homo sapiens
ttagttccgggcgcgctgcgaccgttggggctttgttcgcgggggtcacagctctcatggctgcagctagcgtgaccccccctggctccctggagttgctacagcccggcttctccaagaccctcctggggaccaagctggaagccaagtacctgtgctccgcctgcagaaacgtcctccgcaggcccttccaggcgcagtgtggccaccggtactgctccttctgcctggccagcatcctcagctctgggcctcagaactgtgctgcctgtgttcacgagggcatatatgaagaaggcatttctattttagaaagcagttcggccttcccagataatgctgcccgcagggaggtggagagcctgccggccgtctgtcccagtgatggatgcacctggaaggggaccctgaaagaatacgagagctgccacgaaggccgctgcccgctcatgctgaccgaatgtcccgcgtgcaaaggcctggtccgccttggtgaaaaggagcgccacctggagcacgagtgcccggagagaagcctgagctgccggcattgccgggcaccctgctgcggagcagacgtgaaggcgcaccacgaggtctgccccaagttccccttaacttgtgacggctgcggcaagaagaagatcccccgggagaagtttcaggaccacgtcaagacttgtggcaagtgtcgagtcccttgcagattccacgccatcggctgcctcgagacgggttttgctgtgtcagccaggcagggatgcagtggtatgatctcggctcactgcagcgtcaacctcc

SEQ ID NO: 60062 - DNA, 796 bp, Homo sapiens
ttagttccgggcgcgctgcgaccgttggggctttgttcgcgggggtcacagctctcatggctgcagctagcgtgaccccccctggctccctggagttgctacagcccggcttctccaagaccctcctggggaccaagctggaagccaagtacctgtgctccgcctgcagaaacgtcctccgcaggcccttccaggcgcagtgtggccaccggtactgctccttctgcctggccagcatcctcagctctgggcctcagaactgtgctgcctgtgttcacgagggcatatatgaagaaggcatttctattttagaaagcagttcggccttcccagataatgctgcccgcagggaggtggagagcctgccggccgtctgtcccagtgatggatgcacctggaaggggaccctgaaagaatacgagagctgccacgaaggccgctgcccgctcatgctgaccgaatgtcccgcgtgcaaaggcctggtccgccttggtgaaaaggagcgccacctggagcacgagtgcccggagagaagcctgagctgccggcattgccgggcaccctgctgcggagcagacgtgaaggcgcaccacgaggtctgccccaagttccccttaacttgtgacggctgcggcaagaagaagatcccccgggagaagtttcaggaccacgtcaagacttgtggcaagtgtcgagtcccttgcagattccacgccatcggctgcctcgagacggtgagtcggggggtctgaggttgggggccacccctcatcctgggtgtggtcttcactgcctc

SEQ ID NO: 60063 - DNA, 761 bp, Homo sapiens
ttagttccgggcgcgctgcgaccgttggggctttgttcgcgggggtcacagctctcatggctgcagctagcgtgaccccccctggctccctggagttgctacagcccggcttctccaagaccctcctggggaccaagctggaagccaagtacctgtgctccgcctgcagaaacgtcctccgcaggcccttccaggcgcagtgtggccaccggtactgctccttctgcctggccagcatcctcagctctgggcctcagaactgtgctgcctgtgttcacgagggcatatatgaagaaggcatttctattttagaaagcagttcggccttcccagataatgctgcccgcagggaggtggagagcctgccggccgtctgtcccagtgatggatgcacctggaaggggaccctgaaagaatacgagagctgccacgaaggccgctgcccgctcatgctgaccgaatgtcccgcgtgcaaaggcctggtccgccttggtgaaaaggagcgccacctggagcacgagtgcccggagagaagcctgagctgccggcattgccgggcaccctgctgcggagcagacgtgaaggcgcaccacgaggtctgccccaagttccccttaacttgtgacggctgcggcaagaagaagatcccccgggagaaggtgagtgtccttcacctccttggaggaccgcagggcggggcccatgtgttggacgtgagggtcccgtgggtgggggtggggcaggttatgacccttgtgccc

SEQ ID NO: 60064 - DNA, 428 bp, Homo sapiens
gcgggggtcacagctctcatggctgcagctagcgtgaccccccctggctccctggagttgctacagcccggcttctccaagaccctcctggggaccaagctggaagccaagtacctgtgctccgcctgcagaaacgtcctccgcaggcccttccaggcgcagtgtggccaccggtactgctccttctgcctggccagcatcctcaggtgcatggggcctgcaggctgggaggaggggcaggcaggctaggctggttttagagccacgctgcccagcctggtagctcccagcagagccgggtccagcttagatgtgctccagttatcgatactccctggatttcggaggtttaccacaaagaatgtaaaattaataattttaaaatagcaatttgaaatacgattttggatacatggggttaaatatag

SEQ ID NO: 60065 - DNA, 376 bp, Homo sapiens
gtgcctgctgccaaggccttcagcagggaccagaaacaaaactcacactctttcttctctgagttgagactggaaaaatgaaagattgttttaggggaaacttgagggaacagtctgggcagcctgcagggcatggccctgttcctccagggctgggaaagtcagcactgctttctggtggcgaccttccctctgcagctgctggctcagccgattgtatatgctgggagctctgcactaagcgttgggtgaagggtcagcattgtggaggccctgccacggaggtggtcttcttgggagctgcactcaggcaagaggacctgtttgtgtggaacatctgctttaagcaatgctggtgaacacagcttgtgtgcgg

SEQ ID NO: 60066 - DNA, 1561 bp, Homo sapiens
aaaccctctgtaaagtaacagaagttagaaggggaaatgtcgcctctctgaagattacccaaagaaaaagtgatttgtcattgctttatagactgtaagaagagaacatctcagaagtggagtcttaccctgaaatcaaaggatttaaagaaaaagtggaatttttcttcagcaagctgtgaaactaaatccacaacctttggagacccaggaacaccctccaatctctgtgtgttttgtaaacatcactggagggtcttctacgtgagcaattggattgtcatcagccctgcctgttttgcacctgggaagtgccctggtcttacttgggtccaaattgttggctttcacttttgaccctaagcatctgaagccatgggccacacacggaggcagggaacatcaccatccaagtgtccatacctcaatttctttcagctcttggtgctggctggtctttctcacttctgttcaggtgttatccacgtgaccaaggaagtgaaagaagtggcaacgctgtcctgtggtcacaatgtttctgttgaagagctggcacaaactcgcatctactggcaaaaggagaagaaaatggtgctgactatgatgtctggggacatgaatatatggcccgagtacaagaaccggaccatctttgatatcactaataacctctccattgtgatcctggctctgcgcccatctgacgagggcacatacgagtgtgttgttctgaagtatgaaaaagacgctttcaagcgggaacacctggctgaagtgacgttatcagtcaaagctgacttccctacacctagtatatctgactttgaaattccaacttctaatattagaaggataatttgctcaacctctggaggttttccagagcctcacctctcctggttggaaaatggagaagaattaaatgccatcaacacaacagtttcccaagatcctgaaactgagctctatgctgttagcagcaaactggatttcaatatgacaaccaaccacagcttcatgtgtctcatcaagtatggacatttaagagtgaatcagaccttcaactggaatacaaccaagcaagagcattttcctgataacctgctcccatcctgggccattaccttaatctcagtaaatggaatttttgtgatatgctgcctgacctactgctttgccccaagatgcagagagagaaggaggaatgagagattgagaagggaaagtgtacgccctgtataacagtgtccgcagaagcaaggggctgaaaagatctgaaggtagcctccgtcatctcttctgggatacatggatcgtggggatcatgaggcattcttcccttaacaaatttaagctgttttacccactacctcaccttcttaaaaacctctttcagattaagctgaacagttacaagatggctggcatccctctcctttctccccatatgcaatttgcttaatgtaacctcttcttttgccatgtttccattctgccatcttgaattgtcttgtcagccaattcattatctattaaacactaatttgagttcatcttgaat

SEQ ID NO: 60067 - DNA, 1450 bp, Homo sapiens
aaaccctctgtaaagtaacagaagttagaaggggaaatgtcgcctctctgaagattacccaaagaaaaagtgatttgtcattgctttatagactgtaagaagagaacatctcagaagtggagtcttaccctgaaatcaaaggatttaaagaaaaagtggaatttttcttcagcaagctgtgaaactaaatccacaacctttggagacccaggaacaccctccaatctctgtgtgttttgtaaacatcactggagggtcttctacgtgagcaattggattgtcatcagccctgcctgttttgcacctgggaagtgccctggtcttacttgggtccaaattgttggctttcacttttgaccctaagcatctgaagccatgggccacacacggaggcagggaacatcaccatccaagtgtccatacctcaatttctttcagctcttggtgctggctggtctttctcacttctgttcaggtgttatccacgtgaccaaggaagtgaaagaagtggcaacgctgtcctgtggtcacaatgtttctgttgaagagctggcacaaactcgcatctactggcaaaaggagaagaaaatggtgctgactatgatgtctggggacatgaatatatggcccgagtacaagaaccggaccatctttgatatcactaataacctctccattgtgatcctggctctgcgcccatctgacgagggcacatacgagtgtgttgttctgaagtatgaaaaagacgctttcaagcgggaacacctggctgaagtgacgttatcagtcaaagctgacttccctacacctagtatatctgactttgaaattccaacttctaatattagaaggataatttgctcaacctctggaggttttccagagcctcacctctcctggttggaaaatggagaagaattaaatgccatcaacacaacagtttcccaagatcctgaaactgagctctatgctgttagcagcaaactggatttcaatatgacaaccaaccacagcttcatgtgtctcatcaagtatggacatttaagagtgaatcagaccttcaactggaatacaaccaagcaagagcattttcctgataacctgctcccatcctgggccattaccttaatctcagtaaatggaatttttgtgatatgctgcctgacctactgctttgccccaagatgcagagagagaaggaggaatgagagattgagaagggaaagtgtacgccctgtataacagtgtccgcagaagcaaggggctgaaaagatctgaaggtctcacctccatttgcaattgacctcttctgggaacttcctcagatggacaagattaccccaccttgccctttacgtatctgctcttaggtgcttcttcacttcagttgctttgcaggaagtgtctagaggaatatggtgggcacagaagtagctctggtgaccttgat

SEQ ID NO: 60068 - DNA, 237 bp, Homo sapiens
gttaaattcctctcctgaactgttataaattttccctctgaatataattgaatgtctgcttgtaagtgtctcaaacaagttatacttctagaggaaaggattcaaaatcaattcatgttaactataatataaaacaatatgaaatggattaatattagggagagctatgaatcaagatctctactggaagcataaagacagattgatcatggttcaggtcatgttattgtggtaaga

SEQ ID NO: 60069 - DNA, 336 bp, Homo sapiens
aacagaatgtaaaaatacgcaagtcaaaacctggtagaactgcatggagaaacaaatggattcaatattattagtcgggaaattcaacgccctcctatcgaaaatggacagatccagcaggcagaaaattagtaaggacattgttgagctctgcaataccatcaatcaactggatataatggacatctatagactacttcaacaacagcagaagatacattcttctcaagctcacatggaacattcacaaagatagaccacacccaggcccataaagcacaccttaacaaatttaaaataatataaatcatacagtgtgctctcaaaccacagtga

SEQ ID NO: 60070 - DNA, 488 bp, Homo sapiens
gatacactaaaatatggaaatgtctttatgttataaaacatagtcatatctaaaatatgagctccagcctggagagaatttttgtgtgaggggagaactcagttaaagatcagggctttctgcctgttttgtagatcttaaagtttataagtagatttccagatgttatactatcaaactataacttgagttcagttcattaaaatttcgttgttgatcaggaccctcaactgaatttccaaattatctctctcttacatattcattttaatggccttttggcagcctgcgtcttgcacttgcagttttattgacagacatcatcctttaacacaagattttttgaaccctgaaccagcacatgcaaaacaagacatgtgcctttctggaaaaccagggctcgccaaaagaatggctggcatagcctcccaatcgcaatcaaacccaagaatcttttaattatgcaacagatatgttaaaaaataaaa

SEQ ID NO: 60071 - DNA, 1350 bp, Homo sapiens
tccatttctagattgcccagaactaggccacggcagctgggttctgagcaagacagtgaggttttcccttccgaccagggtgtcaagaagaattgtatgcagattgaatctgctaaattattacctgatacacccgttcaattcatacctccaaatacattgaaccttcgtagctttaccaagatcataaagagactggctgaactgcatccagaagtcagcagagaccatattataaatgcacttcaggaagtgagaataagacataaaggttttctgaatggcttatctattactactattgtggagatgacttcatctcttctgaaaaactctgcttccagttaggaattcaaaaaacaataaagagaacttccttggaaagtgtgtttcctccttcagagaatgttctacagcacttaggaaaaagtagtaataacaagatgatgtaattaaataggctctataaatgggctaagctgttaaaatattctactttatatccctcctttaaaatctagcaacagttgtctatacaatattaagatcttctctatatatttaaagttaaaatataatttttaataagtttttaaatttttttatttcaattttgttacttagaacattaagatgcatatttgtgatctaaagaaattgtcttgtccattttaaaaacctttattaagtcacttttaaaatgtattgaccaagaaggaggtttgttgttacatcaatgtttgtgaaatgatttccatacataaaaaatgtaatttacctgaactttgtcttaagactcttacattggattataggataacagataaataaactgtatagatacattcagtatcatacaacattttggaatgtgtatgctttcaggcttccaagataattaaattactgtcatgatacatttcatgcattttttatgacttcagtataaaacattcaggtgtgttagccttgcctgggaagggtaaacttgtatgtgctttggtaaagtacttaaattccaatgttccctatagtgcttgcattcattttgtgaaaagttttgttgtattgttagaacaattttcaaaggctgattttatgccttatctgatagaaatatagaatagatagttctttaattgcttactttttaaaagtaatataatatttaagttgcatttttattaatagtaagattaacatttaagtctgcattttctttaaatgttttaaatgtttatagcattcaatgtgtagttggatttacttgactaaaaattagccctttaacgtttatatttgttgtatttatatttaataaaggcatctaatctttagtaaaaaaaaaaa

SEQ ID NO: 60072 - DNA, 818 bp, Homo sapiens
tccatttctagattgcccagaactaggccacggcagctgggttctgagcaagacagtgaggttttcccttccgaccagggtgtcaagaagaattgtatgcagattgaatctgctaaattattacctgatacacccgttcaattcatacctccaaatacattgaaccttcgtagctttaccaagatcataaagagactggctgaactgcatccagaagtcagcagagaccatattataaatgcacttcaggaagtgagaataagacataaaggttttctgaatggcttatctattactactattgtggagatgacttcatctcttctgaaaaactctgcttccagttaggaattcaaaaaacaataaagaggtaaagtaatcatattcttttgtatttgaatattacttaaaatttataagctattgatttcattttctttttacataaaaaacatattaaatttaaaataataatataatcacaaaataatatgaaattttaaaacaagcatactgtaattagttaactactaaggcaaaactaattaccctaaaattgactggcttaaacaacactcataaactcacagtttgcagatcaggattcaggagtgacttagccgggtagttttagctcagggtttttcatgttgcagtcaagatgttggcctggactgtagtcattcagaggcttccctgagaccagaggatctgcttctcagggggctcattcacatgtctgttggcaagaggcctcagttcctcaccacataggctcttccataaggctcttcaaatgtctttgcatcatggcagct

SEQ ID NO: 60073 - DNA, 1671 bp, Homo sapiens
  misc_feature (755)..(755): n is a, c, g, or t
ttgcggccgcccctccccgattcccgccacctgccgcctggccaggtggaaggggcgctgccgcgagcctccgggcctcagggtgttccggggagcggcgccccgggtctctgggcccacccgccccgggcgtcctccgagagtgggggctgcgcccgcggggtcagacacctgttcggcccggcccggcgtggtcgccgggggccaggatgaaagtgaccgtgtgcttcggcaggacgggcatcgtggtgccctgcaaggagggccagctgcgcgtcggcgagctcacccagcaggcgctgcagcggtacctgaagacccgggagaaggtgagcgcggcgcggaggagtggggcgcggctgcagccaaggcacctgccagggtcctggttactgggtgaagattcatcacttagaatatacagatggaggaatcctggatccagatgatgtcttggcagatgttgttgaagataaagacaagctgattgctgtgtttgaagaacaagaaccactccacaagattgagagccccagtggaaaccctgcagatcggcagagcccagatgcttttgagacagaagtggccgcccaactggccgcatttaagccaattggtggggagattgaagtaaccccttctgctctaaaactaggcactccactgctggtgaggagaagcagtgacccagtgccaggcccacctgctgatacccagccaagcgcttcacaccctggtggccagagtctgaaacnggttgttccagtaggtatcctgctgcttgtagttctaatgaaagatcaaagtgctgtacccataggttaagtgggactttgcagttttaaacacattgataactagatagagatcttttgatagtatatatagtattagttatactaatagctagtatgggctattacttgtatatagttatagcgatagctattacgtatatggcactgattatgtgccaagtactattttacctgttttatattaagtcatctaaacttccacatcaaggtaagcacatgtttttatctccatttaactgataatgaaattgaggcagaggaaggtttagtaatttgtttaaggtcacatagctaataagtggcaaagcaaggaatttcacccaggtgttctggctccaaaatccttgcttctggccagtacactatactgttacatttccttcatcttccagtttcgtaatgtccaaggatatcattatatttttgttgtgttaacccaatgcttttcaaaaccataccatgtgagtggtgtacattttcaagctcccaatatcacgaaaatgtggtgccaggattggatgtgtagaactcagcattcagattgaagaaaaacaaaatcattgaccaaaagtgcttataaccagatatacttataactaataggttaagtggagaataatttcctgaagagatgatattctccttccatataggactgtgggatcttcctgctaaatcctcagttgctttgaagagctgtaattgtgaataatcctctcagatagcctgagaattcaattttggctaatgactatataccattgcaataggtaatcttcgataacatagccatattaaaaattccctaaaagcaagactctttctcactttaagtctcactgtctataacgca

SEQ ID NO: 60074 - DNA, 492 bp, Homo sapiens
ttgcggccgcccctccccgattcccgccacctgccgcctggccaggtggaaggggcgctgccgcgagcctccgggcctcagggtgttccggggagcggcgccccgggtctctgggcccacccgccccgggcgtcctccgagagtgggggctgcgcccgcggggtcagacacctgttcggcccggcccggcgtggtcgccgggggccaggatgaaagtgaccgtgtgcttcggcaggacgggcatcgtggtgccctgcaaggagggccagctgcgcgtcggcgagctcacccagcaggcgctgcagcggtacctgaagacccgggagaaggcatgatatctctgtcttaggagctactaaattgagcctgcctcctgttgctgaactctcgttttttggattgcaatgtggtggaattgcaggatatcaagacaggccggttaaaaaggttttctctcagtttagtctctatcagatgcagtgccaagtatct

SEQ ID NO: 60075 - DNA, 1619 bp, Homo sapiens
  misc_feature (703)..(703): n is a, c, g, or t
ttgcggccgcccctccccgattcccgccacctgccgcctggccaggtggaaggggcgctgccgcgagcctccgggcctcagggtgttccggggagcggcgccccgggtctctgggcccacccgccccgggcgtcctccgagagtgggggctgcgcccgcggggtcagacacctgttcggcccggcccggcgtggtcgccgggggccaggatgaaagtgaccgtgtgcttcggcaggacgggcatcgtggtgccctgcaaggagggccagctgcgcgtcggcgagctcacccagcaggcgctgcagcggtacctgaagacccgggagaagggtcctggttactgggtgaagattcatcacttagaatatacagatggaggaatcctggatccagatgatgtcttggcagatgttgttgaagataaagacaagctgattgctgtgtttgaagaacaagaaccactccacaagattgagagccccagtggaaaccctgcagatcggcagagcccagatgcttttgagacagaagtggccgcccaactggccgcatttaagccaattggtggggagattgaagtaaccccttctgctctaaaactaggcactccactgctggtgaggagaagcagtgacccagtgccaggcccacctgctgatacccagccaagcgcttcacaccctggtggccagagtctgaaacnggttgttccagtaggtatcctgctgcttgtagttctaatgaaagatcaaagtgctgtacccataggttaagtgggactttgcagttttaaacacattgataactagatagagatcttttgatagtatatatagtattagttatactaatagctagtatgggctattacttgtatatagttatagcgatagctattacgtatatggcactgattatgtgccaagtactattttacctgttttatattaagtcatctaaacttccacatcaaggtaagcacatgtttttatctccatttaactgataatgaaattgaggcagaggaaggtttagtaatttgtttaaggtcacatagctaataagtggcaaagcaaggaatttcacccaggtgttctggctccaaaatccttgcttctggccagtacactatactgttacatttccttcatcttccagtttcgtaatgtccaaggatatcattatatttttgttgtgttaacccaatgcttttcaaaaccataccatgtgagtggtgtacattttcaagctcccaatatcacgaaaatgtggtgccaggattggatgtgtagaactcagcattcagattgaagaaaaacaaaatcattgaccaaaagtgcttataaccagatatacttataactaataggttaagtggagaataatttcctgaagagatgatattctccttccatataggactgtgggatcttcctgctaaatcctcagttgctttgaagagctgtaattgtgaataatcctctcagatagcctgagaattcaattttggctaatgactatataccattgcaataggtaatcttcgataacatagccatattaaaaattccctaaaagcaagactctttctcactttaagtctcactgtctataacgca

SEQ ID NO: 60076 - DNA, 1119 bp, Homo sapiens
atgttggacggcatcaagatggaggagcacgccctgcgccccgggcccgccactctgggggtgctgctgggctccgactgcccgcatcccgccgtctgcgagggctgccagcggcccatctccgaccgcttcctgatgcgagtcaacgagtcgtcctggcacgaggagtgtttgcagtgcgcggcgtgtcagcaagccctcaccaccagctgctacttccgggatcggaaactgtactgcaaacaagactaccaacagctcttcgcggccaagtgcagcggctgcatggagaagatcgcccccaccgagttcgtgatgcgggcgctggagtgcgtgtaccacctgggctgcttctgctgctgcgtgtgtgaacggcagctacgcaagggcgacgaattcgtgctcaaggagggccagctgctgtgcaagggtgactacgagaaggagaaggacctgctcagctccgtgagccccgacgagtccgactccgtgaagagcgaggatgaagatggggacatgaagccggccaaggggcagggcagtcagagcaagggcagcggggatgacgggaaggacccgcggaggcccaagcgaccccggaccatcctcaccacgcagcagcgaagagccttcaaggcctccttcgaggtctcgtcgaagccttgccgaaaggtccgagagacactggcagctgagacgggcctcagtgtgcgcgtggtccaggtctggtttcagaaccaaagagcaaagatgaagaagctggcgcggcggcaccagcagcagcaggagcagcagaactcccagcggctgggccaggaggtcctgtccagccgcatggagggcatgatggcttcctacacgccgctggccccaccacagcagcagatcgtggccatggaacagagcccctacggcagcagcgaccccttccagcagggcctcacgccgccccaaatgccagggaacgactccatcttccatgacatcgacagcgatacctccttaaccagcctcagcgactgcttcctcggctcctcagacgtgggctccctgcaggcccgcgtggggaaccccatcgaccggctctactccatgcagagttcctacttcgcctcctga

SEQ ID NO: 60077 - DNA, 658 bp, Homo sapiens
agcggaactatagtagaatatttaaatattttaatttctcattgttttatttgttaattggattgtaatttgccatcagattctctgtattatagaagctatcttgcttcttcaataagaggaggaaaaagaatctcacaattcccaatataatctttaacaactgtacgttaattgtaccattttaccttctaaacattatttactggagctcagttagtctttaaaacaattactcaggcagagtgtggcaaaagttcagcaagatcaagaaaagtatttaagttattgactgatcatagcactgttatttgtcattgcatgtgtttttccccctcatgtttctatgtgtgctattgatacccaaggaactcaaaaatacttaaaatattggtatacttgatgatttttctgaaaatcttatatttttcatattacaaattcttgagttctttatctttttcaagtctaattttgtagtggtaaaggctttgcacttaacatccttttgtgttcctttttaacaaggaaaaacagaaaataatggaattccatattttttacaccatggagtagtaaaattattttatatattgttagtacttcaacaaacatccctctgctaagtcagacaaaatccttatacagtaatttgtga

SEQ ID NO: 60078 - DNA, 437 bp, Homo sapiens
agatgcttgatggtcgtctctagcaggatcccccgacggtctgtacccaagaaaagtatttaagttattgactgatcatagcactgttatttgtcattgcatgtgtttttccccctcatgtttctatgtgtgctattgatacccaaggaactcaaaaatacttaaaatattggtatacttgatgatttttctgaaaatcttatatttttcatattacaaattcttgagttctttatctttttcaagtctaattttgtagtggtaaaggctttgcacttaacatccttttgtgttcctttttaacaaggaaaaacagaaaataatggaattccatattttttacaccatggagtagtaaaattattttatatattgttagtacttcaacaaacatccctctgctaagtcagacaaaatccttatacagtaatttgtga

SEQ ID NO: 60079 - DNA, 486 bp, Homo sapiens
ttttttttttaagtctagtgatctggcagaaagaattcaatagggataatatgttatagggtcaaaagtatctataaatattatgaagttgtatcagatagacaaatgatgtgttattatccctattttagagtattctgtaaaaaaaaggttaaacatctttcatttcaaattgtaatgtaactgtaacgtgaacaccactaatggccagaaattatctcaggcatcatgagactccctctctgtcacctctgagattagcactaagctttatccagcttgctggtgggacatttttacagtccacttagacaacttagcttcactaataattttaggatcttttattagaaaataaaaatctagcctcatattctcaaagcactattttatgagggatctaaggctatttttcaggtcggatgattactgcccctggctctgtaaaaattctttttgttgagaaacctttgtaaagttgtattt

SEQ ID NO: 60080 - DNA, 360 bp, Homo sapiens
atacaacacattttgaaatatgtatacactgtggaatggttcaactgagctaattaatatatgcgttacctcacatacttattgttttttgtagtgaaaacacttaacatggactcttagagattttcaaatacaatacattgttattaactatagtcccatgctgttgaaattattcctcttacttagctgacatgttgtgtcctttgaccaatatctcatagaaagattagtgatcattgtgtgtcatccagccttccattttattaatggtagatatatttttctttcccctgccccaccatttaggttaggggcatgtatggatgcagatggggtgtggggagaccttgtcttttt

SEQ ID NO: 60081 - DNA, 344 bp, Homo sapiens
accaagttctgttcctcttaattttcaagtgatagtttatttttcttaagcttatgttcctatattacaatgctttttaactgattcatactcttgaatgaatagtaaaaattgcttttcaatgttaaatcacgaatacatttaaacatgcatgtatttcttctattaaacacaatacttataataaaactggacgttaaatgaatattatatctaagaatgacctcttcctctgactatctccttttatgtcttgatgagacactgtactgaaaagatgtgcccataccttggggcatttgatcaagtgctctgaatgcatgttgctatagtgtgtagtttgt

SEQ ID NO: 60082 - DNA, 455 bp, Homo sapiens
catttgaatcatcttatatcatcacaagaagaaaggtgaatacacaataagatattttgagagagaaaaagagaccgcattcacctaatttttattgcagtatattgtgataattgttctattttattattggttattgttgttaatctatactgtgcctaattcataaattaaaccttatcatatatacaggaaaaaacatagtgtatataaggttcaatactatccttggtttcaagaatccactgggggtcttggaacatgtaaggtggtggggggactactgtatacttaaacatttaaaaaatttaaacttgtcatatgttatttgttatatttaaactgtattatatttcgttgtattaagactcattttggcataagaacagaattagaaatagtaacaggtagcattaaacactcaccaggcactgttttccttctttacaagactc

SEQ ID NO: 60083 - DNA, 2184 bp, Homo sapiens
gtgagacaggggtagtgcgaggccgggcacagccttcctgtgtggttttaccgcccagagagcgtcatggacctggggaaaccaatgaaaagcgtgctggtggtggctctccttgtcattttccaggtatgcctgtgtcaagatgaggtcacggacgattacatcggagacaacaccacagtggactacactttgttcgagtctttgtgctccaagaaggacgtgcggaactttaaagcctggttcctccctatcatgtactccatcatttgtttcgtgggcctactgggcaatgggctggtcgtgttgacctatatctatttcaagaggctcaagaccatgaccgatacctacctgctcaacctggcggtggcagacatcctcttcctcctgacccttcccttctgggcctacagcgcggccaagtcctgggtcttcggtgtccacttttgcaagctcatctttgccatctacaagatgagcttcttcagtggcatgctcctacttctttgcatcagcattgaccgctacgtggccatcgtccaggctgtctcagctcaccgccaccgtgcccgcgtccttctcatcagcaagctgtcctgtgtgggcatctggatactagccacagtgctctccatcccagagctcctgtacagtgacctccagaggagcagcagtgagcaagcgatgcgatgctctctcatcacagagcatgtggaggcctttatcaccatccaggtggcccagatggtgatcggctttctggtccccctgctggccatgagcttctgttaccttgtcatcatccgcaccctgctccaggcacgcaactttgagcgcaacaaggccatcaaggtgatcatcgctgtggtcgtggtcttcatagtcttccagctgccctacaatggggtggtcctggcccagacggtggccaacttcaacatcaccagtagcacctgtgagctcagtaagcaactcaacatcgcctacgacgtcacctacagcctggcctgcgtccgctgctgcgtcaaccctttcttgtacgccttcatcggcgtcaagttccgcaacgatctcttcaagctcttcaaggacctgggctgcctcagccaggagcagctccggcagtggtcttcctgtcggcacatccggcgctcctccatgagtgtggaggccgagaccaccaccaccttctccccataggcgactcttctgcctggactagagggacctctcccagggtccctggggtggggatagggagcagatgcaatgactcaggacatccccccgccaaaagctgctcagggaaaagcagctctcccctcagagtgcaagcccctgctccagaagatagcttcaccccaatcccagctacctcaaccaatgccaaaaaaagacagggctgataagctaacaccagacagacaacactgggaaacagaggctattgtcccctaaaccaaaaactgaaagtgaaagtccagaaactgttcccacctgctggagtgaaggggccaaggagggtgagtgcaaggggcgtgggagtggcctgaagagtcctctgaatgaaccttctggcctcccacagactcaaatgctcagaccagctcttccgaaaaccaggccttatctccaagaccagagatagtggggagacttcttggcttggtgaggaaaagcggacatcagctggtcaaacaaactctctgaacccctccctccatcgttttcttcactgtcctccaagccagcgggaatggcagctgccacgccgccctaaaagcacactcatcccctcacttgccgcgtcgccctcccaggctctcaacaggggagagtgtggtgtttcctgcaggccaggccagctgcctccgcgtgatcaaagccacactctgggctccagagtggggatgacatgcactcagctcttggctccactgggatgggaggagaggacaagggaaatgtcaggggcggggagggtgacagtggccgcccaaggcccacgagcttgttctttgttctttgtcacagggactgaaaacctctcctcatgttctgctttcgattcgttaagagagcaacattttacccacacacagataaagttttcccttgaggaaacaacagctttaaaagaaaaagaaaaaaaaagtctttggtaaatggcaaatgagcgtg

SEQ ID NO: 60084 - DNA, 2134 bp, Homo sapiens
gtgagacaggggtagtgcgaggccgggcacagccttcctgtgtggttttaccgcccagagagcgtcatggacctgggtatgcctgtgtcaagatgaggtcacggacgattacatcggagacaacaccacagtggactacactttgttcgagtctttgtgctccaagaaggacgtgcggaactttaaagcctggttcctccctatcatgtactccatcatttgtttcgtgggcctactgggcaatgggctggtcgtgttgacctatatctatttcaagaggctcaagaccatgaccgatacctacctgctcaacctggcggtggcagacatcctcttcctcctgacccttcccttctgggcctacagcgcggccaagtcctgggtcttcggtgtccacttttgcaagctcatctttgccatctacaagatgagcttcttcagtggcatgctcctacttctttgcatcagcattgaccgctacgtggccatcgtccaggctgtctcagctcaccgccaccgtgcccgcgtccttctcatcagcaagctgtcctgtgtgggcatctggatactagccacagtgctctccatcccagagctcctgtacagtgacctccagaggagcagcagtgagcaagcgatgcgatgctctctcatcacagagcatgtggaggcctttatcaccatccaggtggcccagatggtgatcggctttctggtccccctgctggccatgagcttctgttaccttgtcatcatccgcaccctgctccaggcacgcaactttgagcgcaacaaggccatcaaggtgatcatcgctgtggtcgtggtcttcatagtcttccagctgccctacaatggggtggtcctggcccagacggtggccaacttcaacatcaccagtagcacctgtgagctcagtaagcaactcaacatcgcctacgacgtcacctacagcctggcctgcgtccgctgctgcgtcaaccctttcttgtacgccttcatcggcgtcaagttccgcaacgatctcttcaagctcttcaaggacctgggctgcctcagccaggagcagctccggcagtggtcttcctgtcggcacatccggcgctcctccatgagtgtggaggccgagaccaccaccaccttctccccataggcgactcttctgcctggactagagggacctctcccagggtccctggggtggggatagggagcagatgcaatgactcaggacatccccccgccaaaagctgctcagggaaaagcagctctcccctcagagtgcaagcccctgctccagaagatagcttcaccccaatcccagctacctcaaccaatgccaaaaaaagacagggctgataagctaacaccagacagacaacactgggaaacagaggctattgtcccctaaaccaaaaactgaaagtgaaagtccagaaactgttcccacctgctggagtgaaggggccaaggagggtgagtgcaaggggcgtgggagtggcctgaagagtcctctgaatgaaccttctggcctcccacagactcaaatgctcagaccagctcttccgaaaaccaggccttatctccaagaccagagatagtggggagacttcttggcttggtgaggaaaagcggacatcagctggtcaaacaaactctctgaacccctccctccatcgttttcttcactgtcctccaagccagcgggaatggcagctgccacgccgccctaaaagcacactcatcccctcacttgccgcgtcgccctcccaggctctcaacaggggagagtgtggtgtttcctgcaggccaggccagctgcctccgcgtgatcaaagccacactctgggctccagagtggggatgacatgcactcagctcttggctccactgggatgggaggagaggacaagggaaatgtcaggggcggggagggtgacagtggccgcccaaggcccacgagcttgttctttgttctttgtcacagggactgaaaacctctcctcatgttctgctttcgattcgttaagagagcaacattttacccacacacagataaagttttcccttgaggaaacaacagctttaaaagaaaaagaaaaaaaaagtctttggtaaatggcaaatgagcgtg

SEQ ID NO: 60085 - DNA, 576 bp, Homo sapiens
gtgagacaggggtagtgcgaggccgggcacagccttcctgtgtggttttaccgcccagagagcgtcatggacctgggtgagtgagcctcttcatgtgagaaggaacagtaccagggtcttggacacccagactgaccctgtggaatgggggtggaggatgcgggtggagcgcataggggtgcttcctggagaaatcagttctgatttggtgggcattggaagctacttccagagaatgccccctgctgtcccaggaggggtgcacctgccctttcagacctggagaaggggtcagcctttggtgccagtggggacaagggaggggccgagatcatgtctttctcagcagggacataagagagtggcggggctgggcttggtggtctggcagaacctgttctcatcatgagggtgataggttaggccctctgggacctctggggacaggtttcaacagagaaattctccctagagagcttaggaccttttacccactctctgattcccacctttctcccctgccaaatattcatatacctgtccacttggggtcatgaggagatgcatgcgtgactg

SEQ ID NO: 60086 - DNA, 3268 bp, Homo sapiens
cgcggggctgtcacctccgcctctgctccccgacccggccatgcgcggcctcgggctctggctgctgggcgcgatgatgctgcctgcgattgcccccagccggccctgggccctcatggagcagtatgaggtcgtgttgccgcggcgtctgccaggcccccgagtccgccgagctctgccctcccacttgggcctgcacccagagagggtgagctacgtccttggggccacagggcacaacttcaccctccacctgcggaagaacagggacctgctgggttccggctacacagagacctatacggctgccaatggctccgaggtgacggagcagcctcgcgggcaggaccactgcttctaccagggccacgtagaggggtacccggactcagccgccagcctcagcacctgtgccggcctcaggggtttcttccaggtggggtcagacctgcacctgatcgagcccctggatgaaggtggcgagggcggacggcacgccgtgtaccaggctgagcacctgctgcagacggccgggacctgcggggtcagcgacgacagcctgggcagcctcctgggaccccggacggcagccgtcttcaggcctcggcccggggactctctgccatcccgagagacccgctacgtggagctgtatgtggtcgtggacaatgcagagttccagatgctggggagcgaagcagccgtgcgtcatcgggtgctggaggtggtgaatcacgtggacaagctatatcagaaactcaacttccgtgtggtcctggtgggcctggagatttggaatagtcaggacaggttccacgtcagccccgaccccagtgtcacactggagaacctcctgacctggcaggcacggcaacggacacggcggcacctgcatgacaacgtacagctcatcacgggtgtcgacttcaccgggactactgtggggtttgccagggtgtccgccatgtgctcccacagctcaggggctgtgaaccaggaccacagcaagaaccccgtgggcgtggcctgcaccatggcccatgagatgggccacaacctgggcatggaccatgatgagaacgtccagggctgccgctgccaggaacgcttcgaggccggccgctgcatcatggcaggcagcattggctccagtttccccaggatgttcagtgactgcagccaggcctacctggagagctttttggagcggccgcagtcggtgtgcctcgccaacgcccctgacctcagccacctggtgggcggccccgtgtgtgggaacctgtttgtggagcgtggggagcagtgcgactgcggcccccccgaggactgccggaaccgctgctgcaactctaccacctgccagctggctgagggggcccagtgtgcgcacggtacctgctgccaggagtgcaaggtgaagccggctggtgagctgtgccgtcccaagaaggacatgtgtgacctcgaggagttctgtgacggccggcaccctgagtgcccggaagacgccttccaggagaacggcacgccctgctccgggggctactgctacaacggggcctgtcccacactggcccagcagtgccaggccttctgggggccaggtgggcaggctgccgaggagtcctgcttctcctatgacatcctaccaggctgcaaggccagccggtacagggctgacatgtgtggcgttctgcagtgcaagggtgggcagcagcccctggggcgtgccatctgcatcgtggatgtgtgccacgcgctcaccacagaggatggcactgcgtatgaaccagtgcccgagggcacccggtgtggaccagagaaggtttgctggaaaggacgttgccaggacttacacgtttacagatccagcaactgctctgcccagtgccacaaccatggggtgtgcaaccacaagcaggagtgccactgccacgcgggctgggccccgccccactgcgcgaagctgctgactgaggtgcacgcagcgtccgggagcctccccgtcctcgtggtggtggttctggtgctcctggcagttgtgctggtcaccctggcaggcatcatcgtctaccgcaaagcccggagccgcatcctgagcaggaacgtggctcccaagaccacaatggggcgctccaaccccctgttccaccaggctgccagccgcgtgccggccaagggcggggctccagccccatccaggggcccccaagagctggtccccaccacccacccgggccagcccgcccgacacccggcctcctcggtggctctgaagaggccgccccctgctcctccggtcactgtgtccagcccacccttcccagttcctgtctacacccggcaggcaccaaagcaggtcatcaagccaacgttcgcacccccagtgcccccagtcaaacccggggctggtgcggccaaccctggtccagctgagggtgctgttggcccaaaggttgccctgaagccccccatccagaggaagcaaggagccggagctcccacagcaccctaggggggcacctgcgcctgtgtggaaatttggagaagttgcggcagagaagccatgcgttccagccttccacggtccagctagtgccgctcagccctagaccctgactttgcaggctcagctgctgttctaacctcagtaatgcatctacctgagaggctcctgctgtccacgccctcagccaattccttctccccgccttggccacgtgtagccccagctgtctgcaggcaccaggctgggatgagctgtgtgcttgcgggtgcgtgtgtgtgtacgtgtctccaggtggccgctggtctcccgctgtgttcaggaggccacatatacagcccctcccagccacacctgcccctgctctggggcctgctgagccggctgccctgggcacccggttccaggcagcacagacgtggggcatccccagaaagactccatcccaggaccaggttcccctgcgtgctcttcgagagggtgtcagtgagcagactgcaccccaagctcccgactccaggtcccctgatcttggggcctgtttcccatgggattcaagagggacagccccagctttgtgtgtgtttaagcttaggaatcgcctttatggaaagggctatgtgggagagtcagctatcttgtctggttttcttgagacctcagatgtgtgttcagcagggctgaaagcttttattctttaataatgagaaatgtatattttactaataaattattgaccgagttctgtagattcttgttaga

SEQ ID NO: 60087 - DNA, 3190 bp, Homo sapiens
cgcggggctgtcacctccgcctctgctccccgacccggccatgcgcggcctcgggctctggctgctgggcgcgatgatgctgcctgcgattgcccccagccggccctgggccctcatggagcagtatgaggtcgtgttgccgcggcgtctgccaggcccccgagtccgccgagctctgccctcccacttgggcctgcacccagagagggtgagctacgtccttggggccacagggcacaacttcaccctccacctgcggaagaacagggacctgctgggttccggctacacagagacctatacggctgccaatggctccgaggtgacggagcagcctcgcgggcaggaccactgcttctaccagggccacgtagaggggtacccggactcagccgccagcctcagcacctgtgccggcctcaggggtttcttccaggtggggtcagacctgcacctgatcgagcccctggatgaaggtggcgagggcggacggcacgccgtgtaccaggctgagcacctgctgcagacggccgggacctgcggggtcagcgacgacagcctgggcagcctcctgggaccccggacggcagccgtcttcaggcctcggcccggggactctctgccatcccgagagacccgctacgtggagctgtatgtggtcgtggacaatgcagagttccagatgctggggagcgaagcagccgtgcgtcatcgggtgctggaggtggtgaatcacgtggacaagctatatcagaaactcaacttccgtgtggtcctggtgggcctggagatttggaatagtcaggacaggttccacgtcagccccgaccccagtgtcacactggagaacctcctgacctggcaggcacggcaacggacacggcggcacctgcatgacaacgtacagctcatcacgggtgtcgacttcaccgggactactgtggggtttgccagggtgtccgccatgtgctcccacagctcaggggctgtgaaccaggaccacagcaagaaccccgtgggcgtggcctgcaccatggcccatgagatgggccacaacctgggcatggaccatgatgagaacgtccagggctgccgctgccaggaacgcttcgaggccggccgctgcatcatggcaggcagcattggctccagtttccccaggatgttcagtgactgcagccaggcctacctggagagctttttggagcggccgcagtcggtgtgcctcgccaacgcccctgacctcagccacctggtgggcggccccgtgtgtgggaacctgtttgtggagcgtggggagcagtgcgactgcggcccccccgaggactgccggaaccgctgctgcaactctaccacctgccagctggctgagggggcccagtgtgcgcacggtacctgctgccaggagtgcaaggtgaagccggctggtgagctgtgccgtcccaagaaggacatgtgtgacctcgaggagttctgtgacggccggcaccctgagtgcccggaagacgccttccaggagaacggcacgccctgctccgggggctactgctacaacggggcctgtcccacactggcccagcagtgccaggccttctgggggccaggtgggcaggctgccgaggagtcctgcttctcctatgacatcctaccaggctgcaaggccagccggtacagggctgacatgtgtggcgttctgcagtgcaagggtgggcagcagcccctggggcgtgccatctgcatcgtggatgtgtgccacgcgctcaccacagaggatggcactgcgtatgaaccagtgcccgagggcacccggtgtggaccagagaaggtttgctggaaaggacgttgccaggacttacacgtttacagatccagcaactgctctgcccagtgccacaaccatggggtgtgcaaccacaagcaggagtgccactgccacgcgggctgggccccgccccactgcgcgaagctgctgactgaggtgcacgcagcgtccgggagcctccccgtcctcgtggtggtggttctggtgctcctggcagttgtgctggtcaccctggcaggcatcatcgtctaccgcaaagcccggagccgcatcctgagcaggaacgtggctcccaagaccacaatggggcgctccaaccccctgttccaccaggctgccagccgcgtgccggccaagggcggggctccagccccatccaggggcccccaagagctggtccccaccacccacccgggccagcccgcccgacacccggcctcctcggtggctctgaagaggccgccccctgctcctccggtcactgtgtccagcccacccttcccagttcctgtctacacccggcaggcaccaaagcagggtgctgttggcccaaaggttgccctgaagccccccatccagaggaagcaaggagccggagctcccacagcaccctaggggggcacctgcgcctgtgtggaaatttggagaagttgcggcagagaagccatgcgttccagccttccacggtccagctagtgccgctcagccctagaccctgactttgcaggctcagctgctgttctaacctcagtaatgcatctacctgagaggctcctgctgtccacgccctcagccaattccttctccccgccttggccacgtgtagccccagctgtctgcaggcaccaggctgggatgagctgtgtgcttgcgggtgcgtgtgtgtgtacgtgtctccaggtggccgctggtctcccgctgtgttcaggaggccacatatacagcccctcccagccacacctgcccctgctctggggcctgctgagccggctgccctgggcacccggttccaggcagcacagacgtggggcatccccagaaagactccatcccaggaccaggttcccctgcgtgctcttcgagagggtgtcagtgagcagactgcaccccaagctcccgactccaggtcccctgatcttggggcctgtttcccatgggattcaagagggacagccccagctttgtgtgtgtttaagcttaggaatcgcctttatggaaagggctatgtgggagagtcagctatcttgtctggttttcttgagacctcagatgtgtgttcagcagggctgaaagcttttattctttaataatgagaaatgtatattttactaataaattattgaccgagttctgtagattcttgttaga

SEQ ID NO: 60088 - DNA, 3586 bp, Homo sapiens
cgcggggctgtcacctccgcctctgctccccgacccggccatgcgcggcctcgggctctggctgctgggcgcgatgatgctgcctgcgattgcccccagccggccctgggccctcatggagcagtatgaggtcgtgttgccgcggcgtctgccaggcccccgagtccgccgagctctgccctcccacttgggcctgcacccagagagggtgagctacgtccttggggccacagggcacaacttcaccctccacctgcggaagaacagggacctgctgggttccggctacacagagacctatacggctgccaatggctccgaggtgacggagcagcctcgcgggcaggaccactgcttctaccagggccacgtagaggggtacccggactcagccgccagcctcagcacctgtgccggcctcaggtgggtgtggcggacgaacgccagggctcccgcaggtggagaggaaggcctaagcctgtggtgggggtggggaagggaggcagggagggtgcctcctcctcccactcaggcctttgctgtcttgcatgggggtctgctcaggggacgccaagcccaagaggctcaccctcctgtaccctggggcctgaagtcacctgcggggggctgctggtggcagggtagggggagctgtaggcaacaaactggagcctctggtccttcggggcaggaccaggccactctgaagcccacagcacacccggctcccactcccctcaggggtttcttccaggtggggtcagacctgcacctgatcgagcccctggatgaaggtggcgagggcggacggcacgccgtgtaccaggctgagcacctgctgcagacggccgggacctgcggggtcagcgacgacagcctgggcagcctcctgggaccccggacggcagccgtcttcaggcctcggcccggggactctctgccatcccgagagacccgctacgtggagctgtatgtggtcgtggacaatgcagagttccagatgctggggagcgaagcagccgtgcgtcatcgggtgctggaggtggtgaatcacgtggacaagctatatcagaaactcaacttccgtgtggtcctggtgggcctggagatttggaatagtcaggacaggttccacgtcagccccgaccccagtgtcacactggagaacctcctgacctggcaggcacggcaacggacacggcggcacctgcatgacaacgtacagctcatcacgggtgtcgacttcaccgggactactgtggggtttgccagggtgtccgccatgtgctcccacagctcaggggctgtgaaccaggaccacagcaagaaccccgtgggcgtggcctgcaccatggcccatgagatgggccacaacctgggcatggaccatgatgagaacgtccagggctgccgctgccaggaacgcttcgaggccggccgctgcatcatggcaggcagcattggctccagtttccccaggatgttcagtgactgcagccaggcctacctggagagctttttggagcggccgcagtcggtgtgcctcgccaacgcccctgacctcagccacctggtgggcggccccgtgtgtgggaacctgtttgtggagcgtggggagcagtgcgactgcggcccccccgaggactgccggaaccgctgctgcaactctaccacctgccagctggctgagggggcccagtgtgcgcacggtacctgctgccaggagtgcaaggtgaagccggctggtgagctgtgccgtcccaagaaggacatgtgtgacctcgaggagttctgtgacggccggcaccctgagtgcccggaagacgccttccaggagaacggcacgccctgctccgggggctactgctacaacggggcctgtcccacactggcccagcagtgccaggccttctgggggccaggtgggcaggctgccgaggagtcctgcttctcctatgacatcctaccaggctgcaaggccagccggtacagggctgacatgtgtggcgttctgcagtgcaagggtgggcagcagcccctggggcgtgccatctgcatcgtggatgtgtgccacgcgctcaccacagaggatggcactgcgtatgaaccagtgcccgagggcacccggtgtggaccagagaaggtttgctggaaaggacgttgccaggacttacacgtttacagatccagcaactgctctgcccagtgccacaaccatggggtgtgcaaccacaagcaggagtgccactgccacgcgggctgggccccgccccactgcgcgaagctgctgactgaggtgcacgcagcgtccgggagcctccccgtcctcgtggtggtggttctggtgctcctggcagttgtgctggtcaccctggcaggcatcatcgtctaccgcaaagcccggagccgcatcctgagcaggaacgtggctcccaagaccacaatggggcgctccaaccccctgttccaccaggctgccagccgcgtgccggccaagggcggggctccagccccatccaggggcccccaagagctggtccccaccacccacccgggccagcccgcccgacacccggcctcctcggtggctctgaagaggccgccccctgctcctccggtcactgtgtccagcccacccttcccagttcctgtctacacccggcaggcaccaaagcaggtcatcaagccaacgttcgcacccccagtgcccccagtcaaacccggggctggtgcggccaaccctggtccagctgagggtgctgttggcccaaaggttgccctgaagccccccatccagaggaagcaaggagccggagctcccacagcaccctaggggggcacctgcgcctgtgtggaaatttggagaagttgcggcagagaagccatgcgttccagccttccacggtccagctagtgccgctcagccctagaccctgactttgcaggctcagctgctgttctaacctcagtaatgcatctacctgagaggctcctgctgtccacgccctcagccaattccttctccccgccttggccacgtgtagccccagctgtctgcaggcaccaggctgggatgagctgtgtgcttgcgggtgcgtgtgtgtgtacgtgtctccaggtggccgctggtctcccgctgtgttcaggaggccacatatacagcccctcccagccacacctgcccctgctctggggcctgctgagccggctgccctgggcacccggttccaggcagcacagacgtggggcatccccagaaagactccatcccaggaccaggttcccctgcgtgctcttcgagagggtgtcagtgagcagactgcaccccaagctcccgactccaggtcccctgatcttggggcctgtttcccatgggattcaagagggacagccccagctttgtgtgtgtttaagcttaggaatcgcctttatggaaagggctatgtgggagagtcagctatcttgtctggttttcttgagacctcagatgtgtgttcagcagggctgaaagcttttattctttaataatgagaaatgtatattttactaataaattattgaccgagttctgtagattcttgttaga

SEQ ID NO: 60089 - DNA, 3368 bp, Homo sapiens
cgcggggctgtcacctccgcctctgctccccgacccggccatgcgcggcctcgggctctggctgctgggcgcgatgatgctgcctgcgattgcccccagccggccctgggccctcatggagcagtatgaggtcgtgttgccgcggcgtctgccaggcccccgagtccgccgagctctgccctcccacttgggcctgcacccagagagggtgagctacgtccttggggccacagggcacaacttcaccctccacctgcggaagaacagggacctgctgggttccggctacacagagacctatacggctgccaatggctccgaggtgacggagcagcctcgcgggcaggaccactgcttctaccagggccacgtagaggggtacccggactcagccgccagcctcagcacctgtgccggcctcaggggtttcttccaggtggggtcagacctgcacctgatcgagcccctggatgaaggtggcgagggcggacggcacgccgtgtaccaggctgagcacctgctgcagacggccgggacctgcggggtcagcgacgacagcctgggcagcctcctgggaccccggacggcagccgtcttcaggcctcggcccggggactctctgccatcccgagagacccgctacgtggagctgtatgtggtcgtggacaatgcagagttccagatgctggggagcgaagcagccgtgcgtcatcgggtgctggaggtggtgaatcacgtggacaagctatatcagaaactcaacttccgtgtggtcctggtgggcctggagatttggaatagtcaggacaggttccacgtcagccccgaccccagtgtcacactggagaacctcctgacctggcaggcacggcaacggacacggcggcacctgcatgacaacgtacagctcatcacgggtgtcgacttcaccgggactactgtggggtttgccagggtgtccgccatgtgctcccacagctcaggggctgtgaaccaggaccacagcaagaaccccgtgggcgtggcctgcaccatggcccatgagatgggccacaacctgggcatggaccatgatgagaacgtccagggctgccgctgccaggaacgcttcgaggccggccgctgcatcatggcaggcagcattgggtgaggcggccaggccctgcagagccagggtatgctggaggtacgaggtgggtggggaaggggccaggccgcctcccccaatgctgccccgcctccccagctccagtttccccaggatgttcagtgactgcagccaggcctacctggagagctttttggagcggccgcagtcggtgtgcctcgccaacgcccctgacctcagccacctggtgggcggccccgtgtgtgggaacctgtttgtggagcgtggggagcagtgcgactgcggcccccccgaggactgccggaaccgctgctgcaactctaccacctgccagctggctgagggggcccagtgtgcgcacggtacctgctgccaggagtgcaaggtgaagccggctggtgagctgtgccgtcccaagaaggacatgtgtgacctcgaggagttctgtgacggccggcaccctgagtgcccggaagacgccttccaggagaacggcacgccctgctccgggggctactgctacaacggggcctgtcccacactggcccagcagtgccaggccttctgggggccaggtgggcaggctgccgaggagtcctgcttctcctatgacatcctaccaggctgcaaggccagccggtacagggctgacatgtgtggcgttctgcagtgcaagggtgggcagcagcccctggggcgtgccatctgcatcgtggatgtgtgccacgcgctcaccacagaggatggcactgcgtatgaaccagtgcccgagggcacccggtgtggaccagagaaggtttgctggaaaggacgttgccaggacttacacgtttacagatccagcaactgctctgcccagtgccacaaccatggggtgtgcaaccacaagcaggagtgccactgccacgcgggctgggccccgccccactgcgcgaagctgctgactgaggtgcacgcagcgtccgggagcctccccgtcctcgtggtggtggttctggtgctcctggcagttgtgctggtcaccctggcaggcatcatcgtctaccgcaaagcccggagccgcatcctgagcaggaacgtggctcccaagaccacaatggggcgctccaaccccctgttccaccaggctgccagccgcgtgccggccaagggcggggctccagccccatccaggggcccccaagagctggtccccaccacccacccgggccagcccgcccgacacccggcctcctcggtggctctgaagaggccgccccctgctcctccggtcactgtgtccagcccacccttcccagttcctgtctacacccggcaggcaccaaagcaggtcatcaagccaacgttcgcacccccagtgcccccagtcaaacccggggctggtgcggccaaccctggtccagctgagggtgctgttggcccaaaggttgccctgaagccccccatccagaggaagcaaggagccggagctcccacagcaccctaggggggcacctgcgcctgtgtggaaatttggagaagttgcggcagagaagccatgcgttccagccttccacggtccagctagtgccgctcagccctagaccctgactttgcaggctcagctgctgttctaacctcagtaatgcatctacctgagaggctcctgctgtccacgccctcagccaattccttctccccgccttggccacgtgtagccccagctgtctgcaggcaccaggctgggatgagctgtgtgcttgcgggtgcgtgtgtgtgtacgtgtctccaggtggccgctggtctcccgctgtgttcaggaggccacatatacagcccctcccagccacacctgcccctgctctggggcctgctgagccggctgccctgggcacccggttccaggcagcacagacgtggggcatccccagaaagactccatcccaggaccaggttcccctgcgtgctcttcgagagggtgtcagtgagcagactgcaccccaagctcccgactccaggtcccctgatcttggggcctgtttcccatgggattcaagagggacagccccagctttgtgtgtgtttaagcttaggaatcgcctttatggaaagggctatgtgggagagtcagctatcttgtctggttttcttgagacctcagatgtgtgttcagcagggctgaaagcttttattctttaataatgagaaatgtatattttactaataaattattgaccgagttctgtagattcttgttaga

SEQ ID NO: 60090 - DNA, 1126 bp, Homo sapiens
cgcggggctgtcacctccgcctctgctccccgacccggccatgcgcggcctcgggctctggctgctgggcgcgatgatgctgcctgcgattgcccccagccggccctgggccctcatggagcagtatgaggtcgtgttgccgcggcgtctgccaggcccccgagtccgccgagctctgccctcccacttgggcctgcacccagagagggtgagctacgtccttggggccacagggcacaacttcaccctccacctgcggaagaacagggacctgctgggttccggctacacagagacctatacggctgccaatggctccgaggtgacggagcagcctcgcgggcaggaccactgcttctaccagggccacgtagaggggtacccggactcagccgccagcctcagcacctgtgccggcctcaggtgggtgtggcggacgaacgccagggctcccgcaggtggagaggaaggcctaagcctgtggtgggggtggggaagggaggcagggagggtgcctcctcctcccactcaggcctttgctgtcttgcatgggggtctgctcaggggacgccaagcccaagaggctcaccctcctgtaccctggggcctgaagtcacctgcggggggctgctggtggcagggtagggggagctgtaggcaacaaactggagcctctggtccttcggggcaggaccaggccactctgaagcccacagcacacccggctcccactcccctcaggggtttcttccaggtggggtcagacctgcacctgatcgagcccctggatgaaggtggcgagggcggacggcacgccgtgtaccaggctgagcacctgctgcagacggccgggacctgcggggtcagcgacgacagcctgggcagcctcctgggaccccggacggcagccgtcttcaggcctcggcccggggactctctgccatcccgagagacccgctacgtggagctgtatgtggtcgtggacaatgcagagttccagatgctggggagcgaagcagccgtgcgtcatcgggtgctggaggtggtgaatcacgtggacaaggtgggcagcggtcctggctgcagaggtgccagagcccctggcgggaggtgggggggggtgttg

SEQ ID NO: 60091 - DNA, 665 bp, Homo sapiens
gcgaggtctgtggggagcttcgttccaggtccagagaaggtgatgtccaggctagagccgggactgcctgggggacccatgtcagctgtgtctgtttcctcccaggtcatcaagccaacgttcgcacccccagtgcccccagtcaaacccggggctggtgcggccaaccctggtccagctgaggtgaggccccagcacacaccaggcagagtccactgtgcaatggacggcacggcctccccacggggctgacagtggcacggcctccccacggggctgacggtggcactgccctggagggtggggtttttttctgattatctgtggataaacttgggtgactgaaagaaaagggaaaggcattggcagtggctgtactgtgatatctgtgctgtgatcaggggacttctcagcagatgccgaccccggctgtcagtggtgcctgaccttcccccagcaactgcagggaagaaagtctgtcctctgtgagctgtatatactgtgactgccacacctgccattgtgtgcatgggccatgttgttggtggatgaaccaagaatccacattttaagagatgttaaaggacgtaaaatttcgttgtaccctttatataccttttatagcaggtagtttttcaacatcagttatcttttcctcctcccag

SEQ ID NO: 60092 - DNA, 3463 bp, Homo sapiens
cgcggggctgtcacctccgcctctgctccccgacccggccatgcgcggcctcgggctctggctgctgggcgcgatgatgctgcctgcgattgcccccagccggccctgggccctcatggagcagtatgaggtcgtgttgccgcggcgtctgccaggcccccgagtccgccgagctctgccctcccacttgggagggcagttccggccccagccctgtccttacctcagcatccggggaacctactaccgacctgcccgctgccctgggctcatccagccggtggcacagctaaggctgtcccagagctctgcaggccgagccccagcctgcacatgggggctggagatgcagtggtccagcaggaggctctgcaggcaccaccagggcctgcacccagagagggtgagctacgtccttggggccacagggcacaacttcaccctccacctgcggaagaacagggacctgctgggttccggctacacagagacctatacggctgccaatggctccgaggtgacggagcagcctcgcgggcaggaccactgcttctaccagggccacgtagaggggtacccggactcagccgccagcctcagcacctgtgccggcctcaggggtttcttccaggtggggtcagacctgcacctgatcgagcccctggatgaaggtggcgagggcggacggcacgccgtgtaccaggctgagcacctgctgcagacggccgggacctgcggggtcagcgacgacagcctgggcagcctcctgggaccccggacggcagccgtcttcaggcctcggcccggggactctctgccatcccgagagacccgctacgtggagctgtatgtggtcgtggacaatgcagagttccagatgctggggagcgaagcagccgtgcgtcatcgggtgctggaggtggtgaatcacgtggacaagctatatcagaaactcaacttccgtgtggtcctggtgggcctggagatttggaatagtcaggacaggttccacgtcagccccgaccccagtgtcacactggagaacctcctgacctggcaggcacggcaacggacacggcggcacctgcatgacaacgtacagctcatcacgggtgtcgacttcaccgggactactgtggggtttgccagggtgtccgccatgtgctcccacagctcaggggctgtgaaccaggaccacagcaagaaccccgtgggcgtggcctgcaccatggcccatgagatgggccacaacctgggcatggaccatgatgagaacgtccagggctgccgctgccaggaacgcttcgaggccggccgctgcatcatggcaggcagcattggctccagtttccccaggatgttcagtgactgcagccaggcctacctggagagctttttggagcggccgcagtcggtgtgcctcgccaacgcccctgacctcagccacctggtgggcggccccgtgtgtgggaacctgtttgtggagcgtggggagcagtgcgactgcggcccccccgaggactgccggaaccgctgctgcaactctaccacctgccagctggctgagggggcccagtgtgcgcacggtacctgctgccaggagtgcaaggtgaagccggctggtgagctgtgccgtcccaagaaggacatgtgtgacctcgaggagttctgtgacggccggcaccctgagtgcccggaagacgccttccaggagaacggcacgccctgctccgggggctactgctacaacggggcctgtcccacactggcccagcagtgccaggccttctgggggccaggtgggcaggctgccgaggagtcctgcttctcctatgacatcctaccaggctgcaaggccagccggtacagggctgacatgtgtggcgttctgcagtgcaagggtgggcagcagcccctggggcgtgccatctgcatcgtggatgtgtgccacgcgctcaccacagaggatggcactgcgtatgaaccagtgcccgagggcacccggtgtggaccagagaaggtttgctggaaaggacgttgccaggacttacacgtttacagatccagcaactgctctgcccagtgccacaaccatggggtgtgcaaccacaagcaggagtgccactgccacgcgggctgggccccgccccactgcgcgaagctgctgactgaggtgcacgcagcgtccgggagcctccccgtcctcgtggtggtggttctggtgctcctggcagttgtgctggtcaccctggcaggcatcatcgtctaccgcaaagcccggagccgcatcctgagcaggaacgtggctcccaagaccacaatggggcgctccaaccccctgttccaccaggctgccagccgcgtgccggccaagggcggggctccagccccatccaggggcccccaagagctggtccccaccacccacccgggccagcccgcccgacacccggcctcctcggtggctctgaagaggccgccccctgctcctccggtcactgtgtccagcccacccttcccagttcctgtctacacccggcaggcaccaaagcaggtcatcaagccaacgttcgcacccccagtgcccccagtcaaacccggggctggtgcggccaaccctggtccagctgagggtgctgttggcccaaaggttgccctgaagccccccatccagaggaagcaaggagccggagctcccacagcaccctaggggggcacctgcgcctgtgtggaaatttggagaagttgcggcagagaagccatgcgttccagccttccacggtccagctagtgccgctcagccctagaccctgactttgcaggctcagctgctgttctaacctcagtaatgcatctacctgagaggctcctgctgtccacgccctcagccaattccttctccccgccttggccacgtgtagccccagctgtctgcaggcaccaggctgggatgagctgtgtgcttgcgggtgcgtgtgtgtgtacgtgtctccaggtggccgctggtctcccgctgtgttcaggaggccacatatacagcccctcccagccacacctgcccctgctctggggcctgctgagccggctgccctgggcacccggttccaggcagcacagacgtggggcatccccagaaagactccatcccaggaccaggttcccctgcgtgctcttcgagagggtgtcagtgagcagactgcaccccaagctcccgactccaggtcccctgatcttggggcctgtttcccatgggattcaagagggacagccccagctttgtgtgtgtttaagcttaggaatcgcctttatggaaagggctatgtgggagagtcagctatcttgtctggttttcttgagacctcagatgtgtgttcagcagggctgaaagcttttattctttaataatgagaaatgtatattttactaataaattattgaccgagttctgtagattcttgttaga

SEQ ID NO: 60093 - DNA, 3581 bp, Homo sapiens
cgcggggctgtcacctccgcctctgctccccgacccggccatgcgcggcctcgggctctggctgctgggcgcgatgatgctgcctgcgattgcccccagccggccctgggccctcatggagcagtatgaggtcgtgttgccgcggcgtctgccaggcccccgagtccgccgagctctgccctcccacttgggcctgcacccagagagggtgagctacgtccttggggccacagggcacaacttcaccctccacctgcggaagaacagggacctgctgggttccggctacacagagacctatacggctgccaatggctccgaggtgacggagcagcctcgcgggcaggaccactgcttctaccagggccacgtagaggggtacccggactcagccgccagcctcagcacctgtgccggcctcaggggtttcttccaggtggggtcagacctgcacctgatcgagcccctggatgaaggtggcgagggcggacggcacgccgtgtaccaggctgagcacctgctgcagacggccgggacctgcggggtcagcgacgacagcctgggcagcctcctgggaccccggacggcagccgtcttcaggcctcggcccggggactctctgccatcccgagagacccgctacgtggagctgtatgtggtcgtggacaatgcagagttccagatgctggggagcgaagcagccgtgcgtcatcgggtgctggaggtggtgaatcacgtggacaagctatatcagaaactcaacttccgtgtggtcctggtgggcctggagatttggaatagtcaggacaggttccacgtcagccccgaccccagtgtcacactggagaacctcctgacctggcaggcacggcaacggacacggcggcacctgcatgacaacgtacagctcatcacgggtgtcgacttcaccgggactactgtggggtttgccagggtgtccgccatgtgctcccacagctcaggggctgtgaaccaggaccacagcaagaaccccgtgggcgtggcctgcaccatggcccatgagatgggccacaacctgggcatggaccatgatgagaacgtccagggctgccgctgccaggaacgcttcgaggccggccgctgcatcatggcaggcagcattggctccagtttccccaggatgttcagtgactgcagccaggcctacctggagagctttttggagcggccgcagtcggtgtgcctcgccaacgcccctgacctcagccacctggtgggcggccccgtgtgtgggaacctgtttgtggagcgtggggagcagtgcgactgcggcccccccgaggtgcgtccatgccccatacctgctcccgtcagcactgggtgccacaacctctgtcccttcaggccagggtgaccactgcacatccacacgtggaacttggggctctgtgggtgtccagagcggtcacagggagggagtggctgcagggcaccccagtggtcaggggaggcggccaggtccgccctggagcccagcccggccccagtgcagcctgccaaggcctttgccgtcgccccaggactgccggaaccgctgctgcaactctaccacctgccagctggctgagggggcccagtgtgcgcacggtacctgctgccaggagtgcaaggtgaagccggctggtgagctgtgccgtcccaagaaggacatgtgtgacctcgaggagttctgtgacggccggcaccctgagtgcccggaagacgccttccaggagaacggcacgccctgctccgggggctactgctacaacggggcctgtcccacactggcccagcagtgccaggccttctgggggccaggtgaagtgggcacagagctggcctggcagggtggctgcaggccttgccagggctaacccgctcctggtcccacaggtgggcaggctgccgaggagtcctgcttctcctatgacatcctaccaggctgcaaggccagccggtacagggctgacatgtgtggcgttctgcagtgcaagggtgggcagcagcccctggggcgtgccatctgcatcgtggatgtgtgccacgcgctcaccacagaggatggcactgcgtatgaaccagtgcccgagggcacccggtgtggaccagagaaggtttgctggaaaggacgttgccaggacttacacgtttacagatccagcaactgctctgcccagtgccacaaccatggggtgtgcaaccacaagcaggagtgccactgccacgcgggctgggccccgccccactgcgcgaagctgctgactgaggtgcacgcagcgtccgggagcctccccgtcctcgtggtggtggttctggtgctcctggcagttgtgctggtcaccctggcaggcatcatcgtctaccgcaaagcccggagccgcatcctgagcaggaacgtggctcccaagaccacaatggggcgctccaaccccctgttccaccaggctgccagccgcgtgccggccaagggcggggctccagccccatccaggggcccccaagagctggtccccaccacccacccgggccagcccgcccgacacccggcctcctcggtggctctgaagaggccgccccctgctcctccggtcactgtgtccagcccacccttcccagttcctgtctacacccggcaggcaccaaagcaggtcatcaagccaacgttcgcacccccagtgcccccagtcaaacccggggctggtgcggccaaccctggtccagctgagggtgctgttggcccaaaggttgccctgaagccccccatccagaggaagcaaggagccggagctcccacagcaccctaggggggcacctgcgcctgtgtggaaatttggagaagttgcggcagagaagccatgcgttccagccttccacggtccagctagtgccgctcagccctagaccctgactttgcaggctcagctgctgttctaacctcagtaatgcatctacctgagaggctcctgctgtccacgccctcagccaattccttctccccgccttggccacgtgtagccccagctgtctgcaggcaccaggctgggatgagctgtgtgcttgcgggtgcgtgtgtgtgtacgtgtctccaggtggccgctggtctcccgctgtgttcaggaggccacatatacagcccctcccagccacacctgcccctgctctggggcctgctgagccggctgccctgggcacccggttccaggcagcacagacgtggggcatccccagaaagactccatcccaggaccaggttcccctgcgtgctcttcgagagggtgtcagtgagcagactgcaccccaagctcccgactccaggtcccctgatcttggggcctgtttcccatgggattcaagagggacagccccagctttgtgtgtgtttaagcttaggaatcgcctttatggaaagggctatgtgggagagtcagctatcttgtctggttttcttgagacctcagatgtgtgttcagcagggctgaaagcttttattctttaataatgagaaatgtatattttactaataaattattgaccgagttctgtagattcttgttaga
